United States Patent Application Publication US 2011/0014706 A2 - sequence listing, part 19

SEQ ID NO: 35354 - DNA, 4925 bp, Arabidopsis thaliana landsberg
ctctttacattctttgaaatggttggcgtggtctttctcttttgaaggtgtcagggtagacggagcttggtatgaaaggggaatttggtttttatgtggtggagttaaagtatttagggttaccgaatagtctcgaatgcaggatatgtagcaaaaccacaagagagaacagatcagttgaggtccatagtttccaaccacttcttctttaaaatacctccttctcctttacttctttcatactttcggttcccctaaacttagatttttccgagggggctctcttctgtaatcggctcatctctcctttaggtggccatgtctttccttggaactatgctactagactctcttggttgtaatgtttcatttccttcctttttcatttcttttctcttttctttttttttagattattttttatggaaggggaaacaaaacttctaatcaccgagtctaataagcatacctttttgaattggtttcaaggaagaataacctcttaggccgcattgttgcaatctctctattacttccttcttttgtctttgtggcgggaaactgtgttgttcctttctctccgacgtttttgcacatatctgctaaatgaaaaaggaaaagagaatgcatgaggcttaaaaagaggatatagtttacgggtaggaaccactgaaagtgagtggccattcaggatcaacagagagtggtaaaaagggataagaagtcttgaatgtatatgctcgtttccccgatctaacacctcttcatgagaaagaattaagtttcggttaatcgtccaatatagggtagagttgacgttggatccaacagaaatttccacggggttaaactttcaggggacggtctgggtgtagtgttcaagattggttgttccttgtaaccctgtaagtgttcctcaagaaacaattctcaacacataatggtcaatcatcatcatataacatgatcacagttccttactgtttttgactcaataaaacattactcgataataaagaaaaactttttgcttagttagaacatagtggtgtaaaaagtggaaaaatgtttcaagtcaacaaaatagagagtagcattagtagtaacagattcattaaccccccagacttacttcactccgtcccgatgtaaaaataagaatagggatgaatccgtgagaaagataggttaagaacaatgtcaccttggttgtggtgactaaccggatgatctctctccttgcttaacatcagccatactcggcttaggatggtcgaattcaatgatattaatctccatttgcatcttcctcgaaacaaaaaactaaaaccaccaatagctttaacataacaaaataaaaaaaaacatatctaagagagaattgatcttgtttttgtcaatatggccacgaataaaatcaaattcgtggtgacggatggtgtcaatggatggctggccaggtgctgtgcttcgccgaaagggtggagtgggtgagaaataagcggctgggtgttggttggggtcgccggccattgggatgcgcagaatggtcatgggtcaaacgaatccattgtcgggccgatcggccgtggcggtgcaacttcacttatccattcacgtgttggccatcattggccgagtcttggctggctaagttttgggtcggccgaacaggcgggcgtgatagtatgttgcccaggtcgtcgggcttgctctgctgccaggtagggcagctccggccaaagtgtggcacagccgggcgccctccgaccaaaggttggagcgcatgggcgggctacggccaaaaattggcacgaccgggccggcttcttcatgccgtgccagttactcgaatcagtagtcgggccgtgtgtcacggtgccaagtgacgggtccaggtgaccctccttctttctcttctttttgggttttttctgttttctgtttttctattcttttttgtgtttttataaaaacctgaaacaaatattgaaaagatcaaaagcaaaagcaaaatctaaatcctaaggaaaagtagctacctagtgggttgtctcccactcagtgctcttgtttaacatcgttggctcgatatttaggtcttactagccgtagtaagccgggttgttcctccctaagcgagctctcttggattggaactcttctggttgttctctcgagttctcaccgcttgaatctgttctccttcttgcagtgggataaatggtaccatctagtgaaatacttcgtcatcaatgttggggaagcataccttttgattaggccaatccattctggcgccggttgtggctaggaacgctcctcctagtatgagctgggagggtcttcctttctcgacctttgtgacatggaaatcggttggtacattgcaccttctgattcgaacataaacattgcggactattctttcaggaaccgtgaaaaatgaatccgcaagcccgattcgtaaattcaaaggttatagctctttgattcgaagctttttcgatgtctcctttgtcttaatgttgatgcaagatccggaatcgcatagggcatctttgaattcaacacctcgtatagaacagctcagaacgaatcttcccggactctctatctttcgaagagtgttgaacggttttaggtggtgtaggtttcctcatatagcttcttcatttctcttcttgtttcacaactctcaagaaagaaacggtcaatatggtaagccgaacaagctttagaaaagggtgtacctcgtcgtagcttagcaacggcttggttaaaatctctgagtcgtcttaagcttatcatgcgtgggtgccatagttcttctagaagcctgagccggttgtaaacgcttgttcttcccagagggtcttcatccctttcgtcaatctctccttcttcttggtcatggggttcttgataggtcgtaaccacatcacaagatacatgagggttggagtattcttcttcgctctccatgggttcattccctccaatgcgtgttgataagtccttaactttcttatctaaatcaagaatcctatcaagtagctccacatacttccttgaggattccatggtcacccttcttattgatgctcggatgtgtgattgatcttcaacgttcttgacttggctctcttcaacctcgccttgtctcctaatcacaccctttaaagctacatcttctttcgcgtccttatcttctagttgattgattcccgattggagtctccatatgctttcataaatcccttcggtcttagattggattctccttaggtcatcttggctaatcgacccaaaacctttatcggagcaagatgaccatccatgtttgtctccagggtcgagttcgtcattgctcgctgctagaatgggcccttcggataaggtctcatgaaacatattttgttggtaacttaaatcaccgacccttctttgttcctcatacaaatggtcctcaagcttatatatccggcttcccaggttcacactattgtcagataaggctccaatcttcgcatcacagtccttatccgaatttgttatttgcctcagcaatgccttagtgttgatggtgttatcttgggcgctcttaaggtgtctctcctgctcctcttcgatcttcttgaacctttcttcgttagcttcagcttctttaacccgtaggttttctgatttcttgaattttacaaagaggccgtcgactttactcaagagagtaacttcgatgtcatcgagccttgcattgagctttcttgtatccaaagcttgttgatctaagaattggctcaccaagatctcaaggctttcttcatgagtcttgtgcttccaaggcatgtgagaacggtctcaggttgatatcataggcatgacgggcggttggtagtgttggccggatacctctctttggcacttctcggatagggggtccgaaaacgacttggttagactctttgggctgcatcaaggtcttcacctacttgaacagatcggtcaagttgtggacccccaagcttcctctagagctagctccttcttgagtcccaattccgccgagattagggtttgtgggaatttccccactaagcatgcaggtagccatgcaagagtgggtttccttgagttccccttcttcttcctcttcgctagagatgttggcgagttcgtcatcttcatccgaaagtttttcgatttggttttcttgactcacaaggcaaccttcttttctttcggtttcagaaccttcttcgctagggttttattcatccatagagtcttcttcaaaaggggcggcttcttcttcttctaagtcctcttcttgctcgattttgtcttgaggagaaacaaaaggggtcgaaatccctaagggtcggaatttcccttttcgaaaaaggaaattagggtttttcctttttccacgaggaattcggtttcctttttcgtttcctcctcatatcaggcttgggccttcggaatcatcttcttcttgggaagattggttgcttctccattccgatagctcatttgagtcagtgagcttcttctctagctcccttccaatctagacggctctcaacggtatcgacggtaaactccacattgacgattctagtgttttggtcttggatatcatcttagtggttaaggagagtgttgttgatctcaacaagcgcctcctccatgttctcgagtcgaatagtgaggtcatcaaacttctctccaaattcggctcttatctccttcattgttgagttgatcctcttcatgtcttcttgatggttatcaacgaagtctcggatgagaccaatgactctatctttcgcctcggcggtccggtagggctcattagtttggtaagcatagttgttcaaatgaacagctacaccaaagtctcggatgagaccaatgagtct

SEQ ID NO: 35355 - DNA, 4765 bp, Arabidopsis thaliana landsberg
tgtgttttcttttcacttattatctcaaaccttccttgctagaccaaattcatgttagacgtatgacgtatcttatccaatttctacaatgtacctaaaactgtgatagagatatatgaacatagtggaaaaaattcatgatgcttttaatgaaaatctagagattgagaaaaaagatttaaaatttaataggaatcatattgaaatatttctctgttttcattaagccgaatcaccaccttcactcgtgtgatagaggctgatattggtgaatgttgatgacaatcgagggacgacgagcttacatgcacacaacttaagcaaagtccgtttaaagtcgtaggaacaaaaatatttcggttttaagacggaaaatcgtaaaacaccttgtatcttatacagtttttgtttcttgtttgtttggttgcattaaaattaagatgggtaaaccatatgccaataacaatataacttcattgatggtatttttcaaagatgatgtctgtttaccatttgatatatttctcaaaactattattttcagttaatgaaaaggccgatataaacatattatgatcttgccccatatatatagcttcactccaagctcaataaagttttttttgttggtctccgaaatttcatactcattcttttgtcttcttaaggtgatattataaagagaagggcttctcatatacagcaaatgcctcgttagcgctcaactgtggttcctgccgaagcaaatccaatataccaacatatcttgtcaacaatgcaaatcaattcacataatcttgctacaaaaatcattcactactatatcaattatatatacatcaagttatatttagaatttataccgatttaattttccattagacaagactaatttcgtgactttaattagtatttccttacatattttctaatcgatccctattatgaattttctttttataggtgagaactacatcattttggatctctaatatctaatgtaaaaatgtgaaatttcaaactaatgtttttgatgtattgaagatgtatgaccaatcattaaaaaactaaaatatgttggtccatgaagatccttctaagttggagatagccataacaatattgcaatattatatgagtgagctctaatgatcataattgttcatgataattaagtttagataaaaataattagtatagatgaatggatcacctgagttttttgaggggcttggtttacttcctcttcctcatcaggaggagaagcgcctaagatgagcaaaccaagaagagtagagagaaaatcagcacctcccacttccacaagctctctacctttgtttttgtcgaagatctcatgaaccgttgatctcattgcattcagcaagctcccataagtcatcccgtggccacgttctatggcctgaatgaatgcataagtcattgcccccgtccatgcgctccctgacaattgctgtagtgcacacacgtttctttgtgaggaatacttttagaatgaaggtatggggtaattactataagactataacatctcggtgaaactataaaatgtggatggtttgactggacttgctaaatactatcaaaagttgtttgaaatctagagagattatttatatggccaatagttgggaatgtaccggagtgtcagccgaggtctggtcatcatcgcagcctgtgaaggagaagacttcaccgccactcgtacctttccacattcctgttttaggccgatggtcttcccattcatagtttcctagcctaaaacgaaggatcaagaaaaaaaaaaaaaatgggttacatgtgctatgcataagcagtttcttatttgtgttagttcatagggtatagggtttataaccaatataagaactatatggtctccatttgttttttgtttttttaaacatttctacaagctatcgaggtctgcatacacacgtacataacaagaagtcaataattattgaattcgtacctgttcattctgcataggaagggtaaatccagaacggtaccactatggcaagcgtcgacgatggcatggagcttaactccataagggagcggccgtacgattgtagcattgatctcatcgtccacgatgacacctgaagtcctgtggtccaccgggagaagagtctcatcgaagccgtcaacctcgtcgccgttgtcgtccatctggttgttgccgtgaccggagaagtgaaagacgagggaatctcccggtttgcagctaagaacaagccaatgcatcgccattgttatgttgttcttcgttggccatctcattgggtccgcttcttcttctacaacattttgacacttttaacattacttttacgtgttacacaaattatgacattttatgatatagaataataccggtgagcataagaatgcaagatccagggaattggaaacgcttcatcaacatgaacttcatgcagtttgcgtcattgatacatcctttgagttcgtcctttgtgttcttgtaagaaaccccgactatcaccgctcgcttctgtccatgtaccggcggtggaggacccggcggcgcgtggttgaatggagacgatgctggaggcgcgtgagtgaacgggtaagaatctggaggcgcgtggttgaatggagacggtgcatgcggcgcgtgagtgtacggagaaggtgttggcggcgggtagatgaaagtggatggagccggagatgagttggggaaaggaaaagggctcgccgacgcgtgagattggagacggggctcgggggcgatgagagtgaaggcgtgacaaatggcgcagcggattcgggtggctccgggaggaaggtgaagcggcgtacgacagctggagcagtccaccagcaacaacattattttctataataacccaaaactccttttcttttctcgggaaatccaatttccacccaaagtttcttgaaagttgcagattatagcctttagtttctgatgctgggaaaatcatcaatgatcaaagcattggaactttagaagaagatgccaataaggcaaggaagaaaattctttcgacgactttaagcttatccgctaatgtattcgtcaagacttttgtttgatgatcaaatgaagtcgtctcaacttgcatatatacaacccaagttaaattagcaagttgcgaattataattgttccttcattgcagaagtttggatttgatagtgcgaatgaactaattagaatggagttgactttgattctaatgagtttgcttgacttttatttataattataattttaccaaccatactagtcatatgaagctgttcttataagaccatcgacatggttaatgtatgtgcaggacatgacctttttggaaaacttaagtatagtagactgtttctatatacaaaaaagactgtttagaaaagaaaactcttttgaaaaaaaaaagaaaaagaaaaaaaaaaaaattcattctcgaaagcgaagggcccagatgggccataggcccagatgggccataggcccaataatatcatctatggagaaaaagggggtttcgttgtctctaggttttttcagtctgactgatttcagtcatttcgaattttcccacactttctcgacgaagatcaagggggaagatggagaatctcccaccgaacagaggaatgtggaaccaagagtacagtcatggtcggatttctcaaagcttcaggtcggccaagccgctccttgaccggaaaagaccaattgaaaatgcacctaattcctccaatcctttacctcagaggtccaatactttcttccttgcaatttattcgaatattggtttattcttagcttctttgagccattgaactcagttttacaggggttctagtgggtaattcttgtccaatttctgatatcatcgtatagtgacctcttgctcctacattttgccataccttaggatttggtattttgctattagtataatatgtttggttatattaagctctcccttaaattcaagttactgtttcatcctttatctgatcatcggcattgcttcatcagatttgatgtgaaatctgataaatttcgctacctggatgttgcagaatgaaggaatcaatggatactgaatccgtttctcacaatataaacttcaacagcactcctcttatggagttatctgctaatacaccatacaaacgcctaaaccagagattgagtcatatgctgatggtcattcttgtggcttgagaacccctcctcctaggtttgatctggataaggagatcattaatggatttcagaccgatatttatgcggacgttggatctttatcagaagcttttgttactcccctgaaagaaccagaaagagttacactaagcaatggttgctctacttcttcaattcttgatgatgactttgatgattccattttagaagagattgacttaatatgtgaacagtcagcgagaaaagcagcttgtcaaactccaagtaccagcatatatcagactccgtctaaagataataagagtagtgatcccaaggccagcttagattttagggatgttgaaaagtttgaaccagactctaatgttaaattgaagcttgatgaagagactcctaccattgctgctgatcctgcacttctcaattccatgcctgatgagtgctccaaacatatgttgtctttaaacgatagacagaatgatgaagcttgtagtaatatttcaactcctttgatggttattgcgggtc

SEQ ID NO: 35356 - DNA, 2780 bp, Arabidopsis thaliana landsberg
  unsure (1)..(2780): unsure at all n locations
agaaccaaaaaaaaaagaaaaagtgtcaaacctgagtctgattcctcttccaatggataattataataaaatcgtaaagaatgaaacactgggttcttataatacttttttgtataatattgtgcgttaaatattattttgtatgaaacctgcaatcactatgtatgcataataaattatttttatgtttatataaacggtcgaattcatttgatataattcacaattgacaatttcaattataaaaataataataacaaaaaatttcacttgtctctcttttttatttcagtatttctatataactactgcttttaaatttttctattatttatatttttatctactataaactaaatatttatgtataacattatctattttatggtagaaactccgtaaaagattgtaaaaattatgctaaagaaaaagatattctgttggaccagaaaaacaaagaatgaagaaaagaaaatattctcaatgggccgtagcaaaagcaaaaggcccattgcaactgtgaagaatagacgaagccttaaaataacaccaattcgctactttactcttaaaataaactctccactaaaaaatatgcaatcactactcttgccgccggcgagttcctccggcgtatccgccgtggcgctacggccaggtttccagcactcatttaaccaccaaagcctctctactcgctccctgccattgtttaatccacttctcttcgctccaaagaagaaaaccaccatctcctcataccaatctctgtccgtctacggtttccaaatcggaggatctaaacctagtttcgcaccatccacggtggcattttcatatccgagttctccgtcttnnnnnnnnnnnnnnnnnnnnnncgacaaagcaaaactcgctcaggttctctctccttctctttatccatttcttcggctttttcacaagttagctgaaattgaatgtagaaagagagaaaatgatctaaaaaatcgaaatttagttacatctgcttttgatttgaggaagtagataaacaattttggatttgagttttcagaattgagattttgaagtttttagtgtgaagaatctttatgcagtaactgtattggtgtggaagagattgttttgttttttatgagtatgggtggtttattcacaggttgcaaagagattagagaagacttcaaggtacttcaagaggctagggagtattggtttctgggggcagcttgtgtcaactgtggttgcagctgtgattctatccttctccattgttgtaactgggaaacctacttcacctgctactttctatgctactgctagtgggattgctgctgcgtttgtctcggttttctggtcgtttgggtatattcggctctccgagaggctccgtcgaacttccatcgaccctgccaaggtaatatatgtcgttctcttcattgtagttcaatcctaatcagtgaacacccatacaatagcgcttgtaggtacgtatggtcaactttgtttgttaaagaccggtctgtgaaccttagatttagcagcagctcttgaaccttggatcatgtgcgagtcctgaagctgatcgtatgatccaggcaaggggcacaggtctcccaatagctgcaactactcctacttgactcctgctactcagactagtacttttgagtctaaagggaaaaatccagtctcaatataggttcgtgttgatgcacgcgccgcctcgcgctgatgttgtgaaaggtttgaggagcgggattatggtaaatattttgggaatgggagcagcactactcgggatgcaagcaacggttggatttttagttgcaaaggctttaacaacttcagcaaaccctttctaccaaggagtctctcagggatacagtcccgttcttgctctcgatgtcttccttgttcaggtattggatcaaaagctctaccataagtcttactcaatatgtaaaaatgtgtacgttcactgtttgacgttagagctcgctttgtgcaggcatcggcgaacaccttactctctcatttccttggccttgtttgctcgttggagctgttgcggtctgtgacagtgcccaattcggaatctgttgtagttcctaaggttgcttgagtttctacctttttcagcctcacttcatgtattcataaacgttgaaaactggggcttgtttccttttataaccgagaaccaacgattgctgattcaatggctttgttagcaacattattgaactacataactcaatatcacataagagtaacttttttttttttattgtctctatatcaatttcaagcgctaaagtagaaaaaagggaacaaattatcgagctttaaaccatttgcttgcccgaaacttccccaatactctgattagaatcacatttggttcctgaagtgacacagacatggacttctccatccacagtgtctatataaagagagaatcaaatgaggggttgattcatgacaaaaccacactcaagtctcaacttctctaattcatctacaatcatagcttgttacgtcgcctgttgcactctttacttagttttaccttcccactcagtcctattctgtcttgttttctttcactgcatccaacgaaaagagtactaacagattagtattggtctatgaagaggttatcactatggtgtaatatgttcaaagaagcaaatatgcaactggtatcaacacagaacatgcaaaattgatgtaccactgatatctatataagcacttaacagaacatctaagca

SEQ ID NO: 35357 - DNA, 867 bp, Arabidopsis thaliana landsberg
caaatagtgtaatacataaataatcaaatcatatacaagtaactccgggaaagtaatccaaagcttacatactttccccaccaccagacatctacatctcttcaccaccaccatacgactatcctactcccaaagtgtgtaatacaagtctcgaccaccactggtaaggcccccgagtcgctccaatggcggtagatcccaagggcacaaggaaaccggaaatttgatagggcacacagacaacccaacttagttttcaaatggatttagacccttagccggatcacccacatgaaccatccctcacgaacacggtttaggcttttcaacccttgccatgatgttgtgttaggctggacaagactaatatcgaatgaaacacactctttatatgaagataagcttttataacgtataaattctcgtacaaccaagtatctaaaacgtttttacaatggcgcctcgagcctatactctcaaatccatcaagaaccaaaattattaagttttgaaaaaagtaacaaactctataccggtttacctacgtcccgagcatccctctaatggtttcctctaaggtttcctgaaaaaacaaaagggagtcataagtaatctaagattacttagtgagctcggtctacctgcaacagatattagttcccatcccgtaatcataacatgaaacacgctacagagaatagcaacgaaaggtagtttgccgaagtatataccaaaagcatgcacatgcaatcttgactctaattttttatcaagttttaaagggcccgatatgcttcattcaaacacccccacacgaaaaacacacactcctaggatcttccgctttcaactacaaaggcatgtacc

SEQ ID NO: 35358 - DNA, 2047 bp, Arabidopsis thaliana landsberg
tcaaaagcgtattcatgatattatcgaaaaagtttttctcgatgtgcatcacgtcaaggcaatgccgcaagaggagatccttccaatatgggagttgccaaaagatactttgtttgtgccaattgtgagtgcttccatattcgtcaggcatattcgccgtggtgtgccaattacccccacgtttgcaggtttcctgagcaccataataatcgatctgttcaaacaaatcagttccagaaacataagatggcggaggaagacgaactattttattcttcctaaaacgttttttgttacgccgatatggatgatgcaggagaagaaaccaacggtgacaatcaaaccaacatggttttctgcctttctttagttgaaacgcatctgtacgatccatacagtagggacaagataatcttccatgcgttgtccaccccgataacattccatatgccgggaagtcactaatcgtccacattagcactgcccgcatattgaaattttgtttgctcgagtaatcaaacgtatgacaccttcataccacaacttcttgagttcatgaatcagcggttgcaagaatacatcaagcgcttgtttcagatgctttggcccaggcaataaaatacttaagaacagaaattcgctttgcatacacatatctggaggaagattgtatggggtcaagataacaggccaaagagaatattgtcgcccagacaaaccgaatgtacaaatccatctgtgcataagccaagatacacattcctacactcgttagcaaagtcaggatataccgtttgaaagtgtttccacgcctttgcatctgatgggtgcgttatttctccgtctgcagttgtatgttgagcatgccatctcatttttgccgcagttctttctgattgatataagcgtttcaatctatcagttattggcaagtaccacatccgtttatatggcactcgcgtccttccgccagtagtctggtatctcggcttttcgcaaaattaacattcatgcagattttcatcccagaaaattatgcaatagtcaatgcatacatcaatcgtttctgatggtaatccaagactcgaaacaagcttttgtatttcataataactctcagccgatatattatccgatggcaaatattccttaattaattatgcccatgaattcatgcaattttcacttaagttattatcagctttaatagtcatcatcctagatgccaaagataacttagattgcccttctctacatctctcgtagatgggttgattagcagcatctaacatatcataaaagcgttgtgcatctacgttggtttctacaataatattttcactaaatgcagcagtactttcgtgaaatgcatctgtaaccatatcatgaaatctattttcatggttatacccttgatcagattcttgatgatgaccataattttgataataatcaatatgttcaacaacaccataattcatattactacggtccgcactatctctacaaccttccccatgacgcaaccataaaaaagagtttggcataaatcctctattatatagatgcttcttcacttattaaattccaaatatttatcgttgaaacacttacgacatggacaaaatattgaaccatttgcacgagcaaatgattcgtttgttgcttggtacatgaaacctcgcaatctatcggtaaactccttcgtgacatcaccggtaactgggtctctatgattatacattcactgtggcaatgaatacatatcatgttctacaccacttccaaacgttgttgttaccaaatcttatttttttaatgtggtagtatgtgttttttgttctgttttatatgagatgtgattttctatcaactaacatgtgatagtgagagagaagaatcataaaacattgagaaggaattcctagcaatatgcgaggaacttgcacataacaatccactggccaccaaccggccaatttgtattttaaaggtgtgaacctaaaaagtcctggcaaatccgtcgtaactcaagcaaagaaaacat

SEQ ID NO: 35359 - DNA, 4335 bp, Arabidopsis thaliana landsberg
aaaaccggattctgtacagggagaaaggtgataagctatgttgctaacgttgttttcatgtttttttgcaatatgtgtgagcaatagattatcatagcgtattgaacttgatgcagactttcgcacggcggatgaattggttcatatgattgcgcatttctactataaagcgaagaggccttcgtgtgtcgacaaggctaatgtaaccccgtactgttagtttgtaacgggcatagagtagtttcactcaaaaggtcagtctaggaaaatttacataaacttcactcatagattgttaacatttttgtatgttctatgcaaatataaacttgttcccaagtaatggattttactcgtcaatctgtgctttccctaacacgttgattcgtaaccaatgatgcatacatatatcaagaagccagctccttttatagaaaaattgtttgaaggataaactattaatgcaaaaatccataacataaaaacaaaagcattgaatcaataagaaaaagcaaactaaaaaaaaaatgaattccacaaagctaatctcataatgactaaacctaatgtgtttagtctcttatcagtcaagtagcttcttccacttggcgtaaccaacggtgactatgaaaagcacaatgcaaagcgcaacaacagcccacacaacgtaaccaaagatgtcaggtgtgctatacaatccaattggtatattcataccgaacaagttgaccaccactgtccctgcagttattgcataattgcctatattcacaagcatcattaggtggatcagtccgttacgtctactattctgtagtatcttcacgtaggcttctgtgctgtcaatatgctccttcatctgcaattcaaaaaaatattaaattaccaaggaccgggcattaacacataacaaccaaacataacccgagcttgcatctaaaacttatatggttttcttagacctatttaggtacatttactacttaccaaaagaattttgttccgcattccctctagttgcatgaagtatgcctcaagcaacatctccatatcatcaatgtcatcttcctccgtcaccatactggtgcttattctgtttgatgtgtgccgttgaagatttggttgggagacaatgctatttgatgctgcctcggtttgttggttttgaatccatttcctcgttaagtataagtcttccatgtcttccttgtcatctaagaaatgttcgatttcatctctcacctgaataatgtactatagcttttatgtttccgtccaacacacaacattatagtatcattggaaaaggtaataaccttttaccttttgtacacgggctagcaagtgggtgagactagtttttaaacttcttaggtctttaagattctcattgctgactttcttggttagttcatcaagaatagaccaagcttgtgtctcaaggtctaccacattgctatcaacaaatgagcagaagacctcgaatgcaatctctagtacccgaaattcaaaaggaagcttactcttcaaaccctcttctccaccttcttgatgaccatgagaagaagcttgcaatatattttcaggaccatccttccgaggaaagtgatgctttagtcggtcagtgagtgtaagaacttcaggacggagagaatccaacaacataacttgttctgaagtaattaccgcctttatgacctctaaattcaggacaatagctttctctctggctgcgtcatagcaagacatggatttgttattgtctgttgtgaaaactagtcagcaaaaaagacacaaacgtgtgtatacctagaattttagaagagtgcgagaaggcagttcttaaatccttagccgaaacagaagaacgttcgatgatggtgctcttgtcacatccagccacttccatgaatccagtccgatcaaacctcgtccatagacagactcctcctcttctcttctttgacttccccgtccctcccacgattgcactacaaggcggagtaggaggcaatagagatgaaggcatcctattcatcttcaccgccgtacccttcttccggctgcggttgctcgtactacggcgaagtgatcccattgacttacctgcagctggtcagagatctctccgccgagtcctgccgcttttgcttgactttctatttttccgacgacgtacccgagcagggtttgtgttgtgtgtttcgtttcggtttcggccatgcgtttgttgtgcatttaggtttgggaagtgtttattaagttattaactaatataaagtcttttttaagtgattttttaattgattttttgcttttcttaaaacttgtaaatagttttgcatattatcatagatattacgtttttctttatcaagataagtatgaactcttgtggaattatcttggagatcttgcataatctttgtagtgtttgtttgttagaatcctttttttttggataactgttgtatgtaaaatcgccaaacacaaacaatacaccacgatagatgcaactattgaaggataatctaataattcaataatctatagcataaaaataaagaacccttaaaacaattagtcatactaaaacaaacaaaacaaattcaacaacccgccctactctgattttgcatctccaaaataatcgttcctatccacaccaaaaaaaaagaactatttagtcatcacaattcctgcaattattaactatacttttcagagaaaaaatgttgattaccttaatcgacggagggaattattcactcgcagagacatcagtcgtactcttgtctctaaaaaaatttagaatctctctaaaccagcacgacaaaatagccgaaaggatgacgaagaagacaacgattacggctatggcatatgaggtagcactattcatcttgttctttgcaacacaacgatttttttgtttagtcacttttgtttatgtttcgttcttcttcgtttagagacgattatattttatagacagctcccgtttgtatgttaataaggaaattcctatatcctttacattttcataaaagttaagtatagtcacgtaaatattaactttacattttgacgacaaaattttaagaaacatagtaaactttccccccaaaaaaaaaaaaaaaaaaaaaaaaaaaaccaaacagctttaagcccaagcatctgtggtccagtggtaggagaagatttggggaagggtgaaacttccagatctgggttcgatcctccctggaaacaaaaatcacatgaagtctgtcagttgggctttggcccaattggtttacctagtaggcagaaatacaggcggcctgattaccccctggcattagtcggaaggcatccaaactcgggacagacagtgtggtggtccttcggggagaagtctactctaaagtatttcggtgcgtttctaccggtgctgaccagatcagccgatagagtttatcaaaaaaaaaaatggtgtggttaaaggaatgggtcaaactaaatgagtaaaagttttgtcactcttagaaggggattttcaagctcttgtatttactatgcaatgtaagtcaattcgaggtctaagaaaactcatatttgagggattgcaaactaataaacgatgaagttaaaaaaaacataataaataagcctatagataacaaacaatataaaaagataactcgaatacttgggaccaccacatatgttcctctcaatcataaccaccgtcaccgttcataacattctaaccaaaagctagcccaaggctaaagggaattatccaagctgctgttaaacaagtattcacaacgtttcctgtttccaaccaacgatcctttcatgttcccttcaggatccaacagaaacctaaccggcaaatcactgcacgtcaccctcaatcccttttttttaagactagtgcccgcttggacgcgggcaatgatcttgaccccggtgtcccaaaccacatggccatcttttatgttgtctagcttccgcgtggtgaagccaactgtcaaaattggtgtgtgattaaccaattgcttataagagtagggtgtggttgactcagccataaccctacctccttgtaggagttggccgttaactgtgaagagagataattgacaaaatgtgaaaggactatcagcaaccaatgagacgttccagttcgtattgttggagacggagacagagtcgacgaataggtctaagtaacatctgctaatgttgattatccccatcaacagatacaaccaaaaaccaaaagtatagagcagtattacgtacattctacaataatttacattctacatctgctaaatgtgatgg

SEQ ID NO: 35360 - DNA, 4492 bp, Arabidopsis thaliana landsberg
gcgaaacgctttggtggatgttcgttcaagggaatctaattttgcagatgaatcaatcatttctctggttctagtaaagataagatcaatggttttctgtgggaaacgaccatagacggtgactccactatcaattgcttgactagttttggtcattacttcttccatgttcttcaagacctcatcctcagtgggcgctggcctgaccggttttgagaggaacagatgaagatccaacatatatggcatatcctcaggtgtaacaaaggaatatgcacagcctgtacgaccagccctggcagctcttcccacacgatgaacaaaaatcttcggtctcggagggaaatcccagtttataacattatcaagcaatggtatgtcaatacccctagcagcaatatctgtcacaatcaacaacatagtcttcctcgctctgaaccttgatacatgaatcttacgtgcatcttgatccatatcaccataacatacagatggctcaatattctccaacttaaacaatgagttgacaaattccacatgatgctttgtcgaaacaaatatcaaggtctgttgatctgaacttatatgctccctaaccaagtacagcaatgcagaatacttctcttccggtcgtacagtcaaaaacgaaagcttcaaatcgggacttatcttattctcaacatctaaacgaacaagctgaggctcacgcaaaccagcctttgcaaattcagcaagggcacttggtaaagtggcactaaatagcaaagtctgcctattctcacttaactgagttagaatctgatgtaactgttcagcaaaccccataccaaacagactatctgcctcatcaaaaactacatactcaaccgtccttagcgtcatatcatcaacctcagataaaagatgcataagtctcccaggagtagcaataatcacatcaggtccctttgttaactcttcaaactggtcttccatactatctccaccaaccagtaaggatacacgaagatctgatataacaaacacaacaaatttccttaatcactatcccttttcaacaacaaaagggaaagtttgtaaattgaattcattaaaccaacctgtaaatttgccaagttccttggtgaacttcagagtctgctcagctaagtcacgagtaggagacaagattagtgctctaacacctccttgaggaacgtgttgtttgagcttctcaagcatagggatgagaaaagctgcggtttttccagaaccggttcgagccatagcgacaacatcgacgccagagagaataagcggcatcgtcttcctctgaattggtgtaggaactttgtaaccctttttcttgattgcattgaagacattaggtccgagatttagtgactcgaatcctccagatttgcctttcttcttctgtttctctttacggtgaagctcagtcactgagctcacgaggaagccctttccttcaaccatggtatgcagactttacgactgcagaggaatcccaaaattagggtttaaaagcgaagaagatgacttcgacgcgagttttgttagtctgggttttagggtttaaagaaaagagacgactcacaaaatacctttcgcgggctttacttgggcctatacttaacaccattaaggcccattaatatacttaaatacgtttttctaacaacggcaatagttacattattgatgagaccattgcttgagagagttccaaaaaaaaaaaaaaatgtctctatcttcatgatttggttgtcccaagagcgtttctgaggtttgaatagcgagcttcaagctcaaaccacgaatctaaatccaccaaactattgaattcctcaaaagtagccatcttttgcaagtgatctcgagtgctaccgttttctttaagagtcttgagaacatcgaccagagctcgagtcgatgcatagagtgcggtaagggggtgaactatcaagtggaatcccatttctttaagctcatcaggcgtatgcaatggcgtgcgtccaccttcaagcatgttacacagtctgtaaccttttgtgcgccttccgatttccttaagctcgtcatcgtccctcggtgcctcaacaaaggaagcatcagctcctgcctgcacatttttccaatctgtctctattacccaccattatgtcttctcaaaagttaaagctttaataacacaacatgatttagtagtaacctccatataaagattatcacggtcaatggcgtctgaaagtcctgtctttgcggaaagtgcaccagcatcagtcctagcgattagaaaaaagtcagcatctccaatagcgtctcttgctgatgctattttagcagcgtgttcctccgcaggtatgacctgtttccaaattagaaaaataataatcatctgcactcatggactataaagtaataagtttcaatgtatagattttggtagcaaacgatgagggaatggtaccaatacctctttgccacgcatatgtcctacacaaatgacgaattgagagagctaaccagttaaaaccattattggacattttgacaatagcttataggtttgccgaggatgaaacagaaaaaaaacgtctcttaccacacctctttggccatgcctggtcctgcaagaaacccgaaattagatgagtacaagtcaggatgaagaaactgtttttgtagttactctaatgaacacaacaagtcaacaactaagatagcacaagaaagaaagattaacacaacactatgagtgattaaatctaacacacatgaaaatacattaaaaataagtagagactagtagtttacctcaaggaagcaaccagcagcacctgctgcgattaagtccttgacggttctttgaacattgagagcatttcctccaccagtatctgaacattaatgtcaaagaatatatcttttgaacagaacagaacagaacagaacagaacagaacaaacttctgatattttccaaatcacttcaagatattgaaaaatgaaaattgcaattatctctacgcaaataaagatcaaagtaatcaactatggttaaagtcatttagagcagcaagagaagagtgtttgagattgtgttcttgcctgcatctgcaatgattggaatctttggagccgcagcacacactgatctcgccgttgctgccatctccggaggtctaaaacgacaaagcaaaacgaataaaacgacagaagataaagtttctactaaagaagaccaacaaaaaaaaaaggcgcacgttatcaaaccgaaatctggttttcccaaagttacggcggagagggcgtaaccggagattaatgcggcggagaatccggtctgctgcacaatagccgcagataatgcgtcgtagactccgggaataagcacagcaccttgctcttcaatcagacggtgaacacgtgactgcattctcaccgtcggataaaccgatctgacggcgcgagggttttgccctattttagctgaaattgtagggtttgagctaaagagtgaagtggatttggccgccattaacatcgacattctcgaagctctgaagatagtacagaaccgttggagagtgaagaagacaagagatcagtatatatcaatcgtaataaataagaagaagagaaagtttactttaattcaacgatatccacgtgtcatatgattattagctattaattgtactgaggctctcaatccataatttaaacgaatcgtgttgatatgaaagttataaagaaaaaccattgttgcaaggagagactatggttaggtacgcacgtttattggggttaattatggtcgtggagttatgcattcatcgattctacttccctaacttagtttgtgattcaattcaacgtcattatactttaacgaacagtttggtaagcatgttcctaaactgatcaagggatttagaccgagatcccttgtgtggagttgatgtaggacagacttgttagtgaaattgatatcctctcttactcccttttattaggtgtgtgtattaaccatgttaagcttatcttgacgtatataattcctttggtataggaaaaaagattataaacaaaattatggtcaatttcaatatacttatacaattcatatcaaccaaaaatatcattatattcagaaatttcgcatttactttcgtctttatcaactttaatttgtattttcaattttgtattataacccagatattattttcttatagaaacttattatgttttaaatctatcgtttctctataaacttgggttaaaagtgatgaatcatgattatttttaccaaactttggttaaaactcatgagtcatgattattaattatatatttactttcagttaaaagtgaagtagataaccatttagacaattgattatggttgataaaaaaaatatatgcaatataaatcacatatatactcaaagagttttctctacatttaaggtgtctacaccataaag

SEQ ID NO: 35361 - DNA, 3426 bp, Arabidopsis thaliana landsberg
tttgtcgtgtatatggaacatggtcaacaaaattcaaaacattgaaattcggtaatatcgattgaaacaatcaaattccaaaaagcaaccccataacgtaaatgattattgtaatgatgaaaaacttaattaacgacgagaagtacaagagggtaaaacagtaattaaatttttagcggtggcgtgagagatggagaacgtcgagaagtgaagaagcggcgaggaggagaaacgcgaataaggcgaagacgatggagccagcgagatggtcacagaagaaaccaagagatttgcagaaattaggaagaggcatgtgtctgattcctgttctgttcatattcgtcactcctaaagctgcagatcctccactcaccattgcatatcctattatctgatctgcaacgaagcaaaaccatgcttgtgttcttgtcggaatcacgggagattgtctcattagtcttgttccacttataatctgttgaatcaacgagtaaagaaccgttgccgatgaaaccacaactagatatctgtaaaagaaccgtcagtttcaaaagcaacgtggaatacatatcactggtgatgtcaaatttatgaaatatgcttacataagagaatctgagagagaccaaacggcgtggagctgaaactcgaagccatagagagtggtcatgctagtctcgcgtgctgttaccattaacgtaacagccaccgttgatacggccatgcacatggctcttagcacaaacatggccacgtcattgcgtctcccgccgccgtgacggttatcttcgccgtaagtgatggctgtgttgaccacgtcgcggatatcaagcttcgtttctgcactcgcaacggtcgggttttgtttctgctctgctgctttcgccattgtgagttactgagttttgtaatgtaatttacatgcgagaggggatatataaacacaacaggctagatacgtggctagttcctaatggagtttctaaaacactgcccgtgaggcttccatggaatcagtgtctctctttcaatcattcacgaggcatgactagtctgctcaaagacaaacaacaatgaaacggctaaaagaggagattttaataatcagatttataccaaatttttagccgtcgtcaatacaaaagacaatttgaaacacctcttacaatttttaattttgaccacgctctaagatttacttagccactctgctctcaaaaacttcaaactatgtgtaaagaagaatcattcgggaaatgccattgaagtagcttttaaacaccgaacatcaagtcaaagaactttgagaccattgactttgacggagaggccatagcgccaccacttggttgaggagagaaagcgctgccgttttgcaagtactgaggacgagacaggggtcgagcagtgtttctagtggatgatggtggaggtaaaggcatgaatccttggttgttgagtctctcgtttaacgcttgcttctgtattgggtctactggcttcactcctactattacaactccgtttatcatcatccctgctttgttcagcgccttatgtgcatcagaccggttctgtatcaaatacacagaccattgtcagttcgttgtttcctttatataaaagatttgattagactatcatgtatgatgactcgtctagaagaactatgaatgcttatcaacatgcatcaaacaggtttgaagggaagaacagtaacctggtagaggatgtgcatccagttggcatttcttggaccaggaacatgtttcaagaccataccacatttttcaaactcccgtagtactaaatttgtatcacctggagaaaatctgaaggcagttattatgatcagttcttaagattgaaaagatgggagataaacacaagataagtcacttaataacactaccagttattatccatgtaaagagtcagaattcacaatgatcaaaacataaaatcacaatcaaaggctgatatttgagcatcatgatggtaaagaacagcatttattatgaacagttctctaagattgaaacatgggagacagacacaagttaaggcacttaataacactacccagtaccaatataactgttatcaaccatgtacctagaatttcagagacacgagaatgttgacaaatcaagaacatttgcaacagtaaagtgagaaaaacgagagcaataaagcttaaatggccttacccatagacagtgacccactcttcctcatcaaggtttcctgtaggtataatctgcctctgaacctctggcctagcaacttctcttggcggcggaagagtgaccaatgcacctggctgaaccaccccttctacaggagatccttccctttatcatcctgctcggtactactacctgcctttgactgcgaccaccaactcggactccctgaaacttgctgactctgttgtgcattcagtagagaaaaagaagggcttgcttccaactttcctttaccaggagttacaatattctttccagaactctggaatggtgttcttctgtcagacttagcatctggagacgcagagtagtctgcaataccagactcaggagagaaatcggaccggtcatccaaagtatacattggaggtggtggaagatcagatcctccgaaattctcacgccatagtgcagataccgcagctgcctgtcccggactcgagaatttccctctacgtgctgaaacaggagaagctaaatcttgaaatagcagagattgcctccctgatttaggagtcctgtgtgctgcagcactcattttctactcaatagagttttatttatctccctgcaaagacaaaaaatcatatagctttgagcaaaattacataagaaagctaaaaaaacaaaaacaaatcaattttgcgactttaattcacttgggcaagatcaatattgaatcttgcgattgaaatcactaatctaagcttagctacgggtttctagaggattaatcgaaagaaaattgaggaaaaagttcaacaaaatcgcaagttactgggttttaaacgagaaggtagtaagattgacgccaatcatcgaagacagtacacaaataggagtaatcacactatctaatggatcgatggagagggagagagagagagcaaaccttgaggatgaaaatggaggtgtttgaatttcagctttaggaatcccggagaagctcaggtagagagctcaagggcgcggagggaaggtaagtgaaaccctagaaaccaagattctgaaaacgcaaaattcaagcgccttacgaaaaatgacgaaagtagccttgcatttgtacaatgggtttgaattgggcctatttggaaagttgttggcccagaaggtttcttcaacatataaaggaataaccatcaaaattctcaatccaacatggtgtaaaattaaatgg

SEQ ID NO: 35362 - DNA, 5967 bp, Arabidopsis thaliana landsberg
ttgcatcagtgctgagcggcatcgcgagtctctggctacgagaaactcgaaacgctccgctttacgaaacactagcacaacaggggaaagcggaagagatcgaaaacgaaacaatcatgattacttgattgcattcacagtgttgtatttctatggaatgtttacatccaataattggaaatatgtaaaatctttggaatttccatttaaatgtacgaaactgttgattgttcatctcaagacatcgttgactcaaaacaaaggactgtgttgcaagaagtgtatgaagcgacaggacatagtagtactcatttgaacaggtggtaaacaaaaagcgatctaaccttaataaaaggaaaattgctgttcggaccaaaaagcatcaagtgataataaaaccaagtctttctgttcgcaagcattagagaaaacaagaatctgacagtgctcagaagaggtcgagcgacaaacatttttatgatgggttttgcaggtgagctcttctccttcttcttcctcctcctctaagaagcagcagctttgggagcctcttcagtagcaggggtctcgaaagtctctcccactacaagatctgggacatcatcatcatcgtcctcttcttggattgttgctgggacatcacctgcacctggagcttgtttctggaattgctctgctagcttcttcaggttgtccaagttatctggtcctgcgattatcaaagcaagaaaacaaaatgttaacttaagggaccactggtttgggaaaggacatcagagtgtaacacttaatgctgcataccaagttggctgataatctgaggaagaatgtcttgcaattctgcaggataattcacattccaagattagactatgcataaaccgagaatagtattggatcaacaatgaggatacaaacacttacttttcgtctgtggtgtaccactcacaacccatgtgtttgcagcatttgaagcttgaactgtgatagcaacattaaaacagagacacaacaaccattaatacaataaattttatacgaaacctgagatttataaagccataaaatttgatgttttacctttagggttaatgaactgaatgactacatcatccttaaaaatgttaacttcttcaatggcgggaatggaattgactccaactctcttaagagtgctctggagcctcttgtcatcggttgtagtggtcttgtgaacagccttcttctttctgaaatgagagtcaaaatgtttagagaatataacatgaaaaatggcaaaaacacaaattcacagaaaagacataaatgagtataccttcttactgtcccctttccgccagtgcggacagtgttagccatcttcatcaacttttccctattcatctgtttttcaaaacaaacacacaaagctaaacccatttagcccaaaatgtatcttataaattaagcatatacaataactaatactgttattaattagccaatgacaaaaacagtaatactgagcaatagtcacaacccacaaattgattacactaggattatgagaacagtgcagcgagaagaacaaagctcgtattgttacaatgagcttaacctaaagtttcaattttttcaatcgattaggtcaccattacacaaacattacttttaactaactaacaagttattggaaaacaagataaccaatgtcaaaaacagtaatcaatgaaaaaaaacatatgaatcgaggaagaacaaaaacaaaaaaatgatcttgacccttgtgctaaatcagaaggaaacaatcgaatatcttggaaatgaaatgagtgaacgatttgctgaagtgggcttaccttgttaatcgatttctagggttcttcgttggtcgaagggtataagaagaagataagggaagagagaacagaggagagagagatccaagcggcgctggagggttttgccctttaagtaaatgccatgtgtaatgtagccaatctaagctttaaccactatacaattattatattaatcatcatccaacggtcacgatctctccttcgatattactattagccacgccatgggccctaataaatctctggcccatttcagattctaattttggtttccttcgtaaattgcgtaagagttagttactgttaagcatatagagagtcttctgcaaaatttatgtaatcaagatttaagatgcaaaacttaccattaaagtttgattcttatataattttctagtttaccaaaaacaagattaatcccaaatttctgcaaaatcgagggatttcattttccaatacaaggctttttgatcatgtaacaaaatactctagttcctttttctatccagctcttgaatcatgatgacacttgttaccacatttaatcgaggaattgtacctctttaatcttccatcaagcttggaactcgaggaagagcttaagcttctgtaggagcatgtcgtttgttccaaaaggtggtttcttgcttccaatccaatctctaccaagaagtccggctctgtcgctgttgagcatttcatcgcggaatgtggatagaatctggtatactgatatcctcaaaacatctgtcgctgcatatgcgtaggcgtacattgcgccaatactccttttgatgggtttaacgtcttttctgaccatactcgaggtcgcccatttgatactagcaggtcccatcagttgttgaggtgattgaagattagtcttcttccccataaacgtttcgatagctagcaaaagcgatagaagtgttgagacaacatcagcgtttccaccagacagttgagctactccgagcctgtcttccttgtgagagattgaagtcagggatgcagatgtttgagcacaccatgcatatagctgcaaatatcggatacagagcaaacagattttggttacagctacatgaagaaattatcacatagaaaagggatcaaaatttgaatttcgttttacctggaaagacttaagtgattcgccgaattttggatcaataaaggactcggttggtggctggagtggtgtctgataacctttttcagtaaaggtgtggtctagcccagaagctaacttggaggcaagctcttccaaaggcctcaagcatagagtaattactcttttgtacgtctcggtggactcctcaaagaaggcagcacgacgccatgtgtcaacattattctgagacaccatgtagagatcaaggtatgcaagagactgctcgagggaacctggagcgctcccttctaaagcagcaagaagaggctcgcttggattcgtttctgctgcagcagatccttttggaggagcaaagctgaaccgttttgtgtgcagaacctggatatgaaaacaacaattataactaacttcttttgtatctagaacctggaaaagtagctgaagtttatggatgtaacaagtaatacacagagcaaactcaccgatgaatacttaaagttgtttaggtaggaatagagttaagttattcaagaaaagtaaacatatcaatacaaatttatatgagtcttctttgaactgatccacatacacagaagacagacagaccttggtataggcttccaaaacataaatagtaaagacagaaatgactaacaaaacaggaaaacaattctacacatactatcaatgcaacatttgattgcaaacacagctaacttgtcgtcttttcaaatttttctcagttaagttttgcatcactcaagtaatactgagtgctaacctcaactatgttcactaataagctacagggatcttaaaatactaaacactataccaccaatctaaacggctatacgaccaaccaattacatctatcaatagcaaatcaacagagaaaacttaactaaccttatgtatatggtgagtgacttcccaagagagaatcaaacagaaactgccggcataagataagacctgctcacccaaaaatttcgatacagacacaagcccacctgaccagtctagcagaaacaatagcattatcgtcgacaacacataaagcacaccagatagcttcaaagcttgtgttagagccgaaggaagaccaatcttgaagctgaagaacggtggacgctgttttgaaaaaacacaagtaagaatcagcaaagatacaaaattgatgaaacattccataagtcaagaagcaaagacacaaaacctgaatgataggaaactccaaaacccatcgttgcttagtaacaaagaggactgcgtaaagcaatccagtcactaatcccctaaaccctattcttccaatgggtccaaacgaatcactagacaagcaaaacacagcagaggagcagaatccagcgagggaagtagcgcagacgaagagcacgatgcgtgaagatacgcgagcacggcggcggaactcgggatccgagaggtgacggtgaagaccgacagcgaattggagaggggagagaggagaatctggagtcggagaagagaggagagctagtgagacggagaatagaagctgtgaagaatggaagacgaggaaagtgaagagaaaggaaatgattgaagtggttgagaagaggaaaatgttgaagaagaagaagatggctgatgaaggaatcgattgccagataagaaaagctgcgaagcggtggctcacaaccgtctccggcaccggaggagaaggcataatcgccggcgattgcttttgccccttttgtgattaaggttttattaaattaatttgaaatgagtttcgtgtcagagcttgagcggggccgtgaagtcaagtgactgagccaacgaagacgaagaagaaggtaagcgaaagagagacaggttagggctagtgagccgcgttttgttcacgctatctttaacaaggcttgtgtaagcccattgggccgagaattcattatttgtcattttagcgttgcaacttgcaaggatagccaaattagtgagatatcaaatgtttttcttgaaacttcttacaactgttttgataatttgtatagaagagagctaataatagatcatactcggagatccaaaattaaaattcctcagacaatgttgtataaagaagcaagtcttatctctaaatgaatcaattttgataaaaagaaaagcaattctcgaatctcaaagaaaggtttaaatcacaatgtggtgataagctgatttacctgagactcaatagttgtgtatatatgagaagagaaaccattaacttattggttgcaaacattcttcaaataccaatcataagtttggctcagaccatctctaagagaaaccttaggtgtccaacccaaagacgcgagctttgagctgtccataagtttcctcggtgtgccatctggcttagtgcaatcccatccaagcttcccttcaaaaccaacaacctctttcaccaactcagccaactctctaatagtcacttcttgaccacttccaatgttaacatgctccaacccgctgtatcgatccagcaagaaaacacaagcatcagccaaatcatcaacatgcaagaactccctcaacggactacctgtaccccacaccacaacttcctccgctccattcactttcgcctcgtggaacctcctcataagagcaggaagcacatgagaattctccgggtggaaattgtcattaggaccatagagattagtaggcatgccagagattgcatcccatccgtgctgaatcctataagcctgacaagtcttaatcccagcgatcttagcaatagcataccactcattagttggttcaagcgatgctgttaacaaagcagactcaggaattggctgaggagcaaatttagggtaaatgcaggatgatccaaggaagagaagcttcttcacaccgtgctcatatgcagagtggatcacattggtctgaatctggagattgacaccaatgaaatcagcaggataggtgttgttagcgtgaataccataa

SEQ ID NO: 35363 - DNA, 3469 bp, Arabidopsis thaliana landsberg
cgaccttggcctcaagagaagtctccgcctcacccgaccttgggctaggaccgaccgcgccacaggggatacatcattaccctacccctagctagctcaggctacgaggaaacaagaccggcgtcccatctggctcgccctggtaacaggtaatgatggttccccacatgcgtccatgacgtcggtggttctcagccccctacggaagcaaggagacatcagcaggatcccagcagcatcgacagctgtgcttctacagggctcatgcacttctccgacggcaacgttatcgcgtacacagggatctagcacctctccgacgggcacgttggcatgtacttagggctctagctcctctgtgctagacacgttagcacactgctacaccccccattgtacacatggaccctctccttacgcctataaaaggaaggtccagggctctcgtacgaggaggttggccgcgcgggagaacgggccaacgcataagtgagagcacctagaggggggggtgaataggtgatcctgtaaaacttcaaaacttaagccacaaaaacttgttaagtgttagcacaattatggccaagtggctagagaggagtcaaaacacaataaccacaagaatccaatcacagagatgacacagtggttatcccgtggttcggccaagtacaaaacttgcctactccacgttgtggcgtcccaacggacgagagttgcactcaactcctctcaagtgatccaatgatcaacttgaataccacagtgttcttgcttttcttttctcaatcccgttcgcgaggaatctccacaacttggagcctctcgcccttacacttgagattcacagagaaatacgacgtgagggagggatgagcaacgcacacaaaactcaaaatcatagcaacaacacgcacacaagttgcaacaagagctcgcaacacgactcaataagttcacaactccactagagctctagatgctttcacaatgaatcaaatgcgtgaaatcgatgtcttggtgcttagaaatgttgtagaaatgcttggtgtactcctccatgcgcctaggggtcccttttatagccccaaggcagctaggagccgttgagagcaatctaggaaggttgctgttgccttatgtcgcgtggtgctccggacagtccggtgcacaccgcacactgtccggtgcccgatttccttccaaaaatagcgcagccgaccattgcagatttgggagccgttggcgcaccgaacatgtccggtgcacaccgaacagtctggtgcccccttctagccgttggctcggccacgtgtcccgcgcagatcgcgcggccgaccgttggcccggccgaccgttggctcaccggacagtccggtgcacaccggacagtccggtgcacaccggacagtccggtgaattatagccgtacgtcgccggtgaattcccgagagcggccacttcgctcgcaccagcctggcagcaccgtacactgtccggtgcaccaccggacagtccggtgctcccagaccagagggccttcggttcccacttagctcctttgttgaatccaaaacttgatctttttattggctgagtgtgaacctttggcacctgtgtaatctataatctagagcaaacttagttagtccaaatgtttgtgttggtcgtttcaaccaccaaaatcatttagggaaaaggtgtaagcctaattccctttcaatctccccctttttggtgattgatgccaacacaaaccaaagcaaatatagaagtgcataattgagctagtttgcataatgtaagtgtaaaggttgcttggatttgagccaatataaatacttataatatatgcatggattgtttcttcatttttaacattttggaccacgcttgcaccacatgttttgtttttgcaaattcttttgtaaattcttttcaaagtccttttgcaaatagtcaaaggtaaatggataagattttgcgaagcattttcaagatttgaaattttctccccctgtttcaaatgcttttcctttgactaaacaaaactccccctaaaagagatcctcctcttagtgttcaagagggttttgatatatacttttgaagtactatttttctcccccttttgaacacaataggatactgattgaaaatattcaatacttaagtttttgaattcggtggtggtgcggtccttttgctttgggctcatttctccccctttttggcatggatcgccaaaaacggaatcattagagccctggaagtgctattttccccttgggttataaataaatgagttaagattataccaaagatgaagtccggtccttttgcttttgggttctaactctctcccccaaagacaaggtccttttctttgatgctcagctttttctcccccaagaatggagagtgacttggagcgacggcgaaggatgagttacggagtggaagcctttgtcttcgctgaagactccaattccctttcaatacacctatgacttggtttgaaatagacttgaaaaacacattagtcatagcatatgaaagagatatgatcaaaggtatgtaaatgagctatgtgtgcaatttagcaaaagaagttcctagaatcaagaatattgagctcatgcctaagtttgttaaaagtttgttcatcaagaggcttggtaaagatatcggctaattgatctttagtgttaatgtatgaaatctcgatatctcccttttgttggtgatccctaagaaaatgataccgaatggctatgtgtttagtgtgactatgctcgacgggattgtcggccattttgattgcactctcattatcacatagcaaagggactttggttaatttgtaaccgtagtcccgcagggtttgcctcatccaaagcaattgcgcgcaacaatgtcctgcggcaatgtactcggcttcggcggtggaaagagcgaccgaattttgcttctttgaagcccaggacaccagggatcttcccaagaactgacaagtccttgatgtgctcttcctatcaattttacaccctgcccaatcagcatctgaatatcctattaaatcaaaggtggatcccttgggggtaccaaagaccaaacttaggagtataaactaaatatctcatgattcttttcacagccctaaggtgaacttccttaggatcggcttggaaccttgcacacatgcatacggaaagcataatatccggtcgagatgcacataaatagagtaaagatcctatcatcgatcggtataccttttgatctacggatttacctatcgtgttgaggtcgagatgcccattagttcccatggttgtcttgatgggcttggcatccttcattccaaacttcttaagaatgtcttgaatataaatcgtttggctgatgaaggtgccatcctggagttgcttgatttgaaatcctaacaaccctctcaactcccccatca

SEQ ID NO: 35364 - DNA, 6095 bp, Arabidopsis thaliana landsberg
acatatgacaggaaggtttctaaagggagccctagtgacagcttttcaagtgttttgcttgcaaagagctggtgaggcgaacattatgcatctcgatcttttatccttagttcaatttccaaaacaccacgttttatgacatgagagatccaactgcccacataaggcttttgcctttgattctccttcggaactttacattttagagagaatttcttgatcagaaagtcacattgctaagtcagagttcaatccacaaaattcttgaagctattattcaagaaagaatcatcaaaatcgagagtatccaccaagctaaacatatacctccacttttttgagaggacaaatgttgaagcagcttgttttttttttttttggtatgaatgttaaatttattcaccaaaaaagacagttttacaaaaaatgcaacatcaagctgaaggtttgagaataaaaattaaagacgaacaactgaaaaatagttagtgcggatgagtatggaaccaatatcgtagcccgccttcgtatgcaggggagtccagcaaggtactaagccggtttcagacatttttatcgaccatttttgctagcatgttgggtggagttagtggttccccatgtttcctcccatttcgttcccgccatacactatggatggataactgaaacacataatgcaagacaaagagatggagctttggaattggtaaagtcgtaagcatggaaatcagagactcccaatgagttgtgtagtgttgtccaagcaagtgccgggtgaaggcggaccaaacctgagtcgaatatgaacaagagaaaaagagatggtcccttgtttcgatatcctcatgacacaagacacaattaccacttacggcaacattccaattgagcattctgtcaccagtcgctaagcgattacgaactgcgatccatgctatgaaagagtacttaggtgtagatttgggaaaccatacacctttgtaccattcacataatgtatatgttgtcgtatcgcatgccaagtttctcttcagatgaaaacattctcgaaagtgccattgtttctttttcaaagaaaattgtccttcccggaatgatgagtagggcgtgagtttagggactctaattctttctcaatccggttgagcaaaacagacctatgacgacgacggtgcgctgagaggccttcaactactgagcaagtaaaggagatacctaaatcaatgcatccacgaggacctaaaagatccgtcaacctaccaagagaacaccaataatcataccaaaaggaggtatctgaaccgctatttacctccaatctttgtaaagattttgccttgtctcgatactttagaatttttctccacatccaagaaccaatacttgtagatccgtttaccggtcataaggattttgatcgtaacagagttgctctgacccagagagaatctttggtagagacgagtcgccaaataagcttcagtaaaacagtgttcgtttcagatagcgaccttagccccatcccccccccccttgagaggagactttcaagttcctttatgcacttactaggcaacctgaagactgagagccagaagcttgtgatgctcgatagaaccgattttagcagttgtaagcgacccgcaaacgataaaaaccgatctgtcaaagaagcgattctagatcgtattttctcaagaagtgggagatagccggcacgtgtcatactttttgtgagaagcgggagaccaagatactcgaccggaagtgttcccgcaacaaaaggaaatcggtgaagcagattatctatacgctgaggtgagcaacctgccataaacaacgtcgattctctaagctgatttatagacccgaaaatcctggaaagttcccaaagacctgtagtaatgctgctatggatcgagcactaccatctaaaaaaccaaattgtcgtccgcaaaacacaaatgactgcatgagtcccatgtttttaaaccaaggatggtacccaatatcattatccctagccgctttgtcaagcattttagacagaacattcatacaaatgacgatgaaataaggtgagagggagcagccttgtctcaaccctcgtttgctttggaagtaacctgccaattcttccattgacttgaaccgaaaaagatgcaataccaatacagagttcaattcatcgaacaacaaccagcgggagataataaccttttagaacagtgagaagaaaaggtcattggaccgagtcaaaagcctttgatatatcaatctttaatgcacaccttgcggagattgattccttatatcataacgatacactacaagaaaacaggtgattgacgacctacaagtcagtcgtttagtagtcgtaactaaagctaatacgactaatttgcgactaatgactatagtcattaatccatagtcgctaaaaacactagtcgttaattagtcgttggtcaacgacaataatacgacaactgactaaacagtgaaaaatcgtcgttacgtagtcgtactatgtcagcgactatttgacgactatcctacgattattgtactgtacagagcgtgtgagaacatgtagtcgtttcgtagtcgttaattgtgtacgacgacattacgactatgttgcgattaaatattctaaaccctgggtatgtttccagttgtcgtaaaatagtcgtaaatatgtttacgactattcgacgactctttgacgattaaaagtactttaccaaggatttgaaactttttgtcataacatagccgtataagtatatacgactattggacgtctgttttacgattcttttatgactaatttgtttagtcttatgattgtcgtaaagttatgtgactaattgacgactattcagcgactatagtgctacttatttactacttttttgcgactaatagtttggtccgaataaagatttggtcatcaggtgatgggtttcttgtttgttcttgtttgttcatcgattgttcttgtttgttattgatatgctatacaatatgaaaacactgcttatatattgaaaatcaagttcaaaacataaaattatcttgttcaaacatacaacttattgaaagatacaattagtgtttggaaacctaaattctatggatcattagatgggggagtaattgggatacgctctgtggatgtggaagagtgtgttgcaatgaagtccaagaactgcggatcggtttggcggagatacttctcgactaaggacaagtgctcgagcttgtccttttgctcacctgtgactcgggctgtctcggcttctcgggcagcaatctcagcatctcgcttctcgttatatgcagcctgttcttcaatttgccgctgagcttcctgcagccgttcttctaaggctttaaaggttgagtctccggggagttggcggttggcactgcctagagtttctttaagacagccaagtccataaggattgcctcttgcatccttttctgtggactgcaagaaataaagaggaagataattagtgacagatcctaaatgtctctaagactctgaaaaagacaaagaacatcttacctcgagaaatatggctgcatactcatctagtgtgagatcccgaggacgtgaagagccatcagacacagcagaagcagtcgcctctagttcagacagcttctctctcacattctgctcatacgccagagcaatcttctctgccttctgatcaacataagtcccatccgacttagtgtgtgtctggatgaacacctcaccaagagggacaggtcttcccattttttcttcctgcaaacacagatcacaagcttcattactatcaacagactaaacatcacacacagttaaacgaacatcactaaaacacatgggaagattgcagaaacacttaccaattcatcttggatttcttggaaagactttggcccagagtagtggacgtgaggaccgagaccgttacggtcagagagacgagctttggaatatgtcttactccttttctgtgcctcttcagtgtcccagtagtcgcacatggttccccacagagtttctccaatccatggaggctgctctcgagttctccttgcggtgctaaccatgtccttcaagcgcctcttaacaatctcattgaagtagtattggactgtccctgttattaagggatcccaatggtgagttttctacaaaaaaagtgtgaagttagtgaacaaatgacagattaaatagtacagtctaatgaaaattggagaaatacaagaagcttaccgcaaactctaaaacatctttctctttatccaatgcacacaggaccaattatagtagggagcattgaacttttgagtaaaaatccgtgtgatctttctaaccaatttagatcctctgtcgcgagtaaacctccaaacacatgcaacacagacagaaagtaaacatgtttaaaatccaaaacactacaactacagcagactatataattgaacaaaggcaaattctacaagattctagacaagtataagccgacaagatcacacacagaacacagtagtcaacataacaagatcattgacagtaaagaacaagtatagacaagtatagaacaaagacagatcctcattgtcaaagccgaaaacatgctaagttcaacaatcaacaaatgttccacaattatgttcatgattcacaacagaacacaataaagaacttaacaagattatagacaagtatagaacaaagacagatcctcaatgtcaaagccgaaaacatgctaagttcaataatcaacaaatgttccacaattatgttcatgattcacaacagaacacaataaagaacttaacaagattatagacaagtatagaacaaagacagatcctcaatgtcaaagccgaaaacatgctaagttcaacaatcaacaaatgttccacaattatgttcatgattcaccacagaacacaataaataacctaacaagattatagacaaagtgaagaacttaacaagatcacacacgagtttagaacaaaggcagattctactatgttacacaaaccctaacaaacatccaattccaacaaaggcagattctactatgttacacaaaccctaacaagccattctacagaccataacacgagttacactacacaggctaagcacactagaataaaatagaggaagagaacataccactcggttttaggtttgggaattggagacaagacacaacaccactgctccctgtttggcacagagagtgtcgattgcagagccaatgccgagtcttcttgtagctccggcaacgtcccaggaacttcctcttggaagttgttcccttgagacgacgggtggctgtttgctggagcgtctgaatctcgcgactgaggaggagtttgctgaggtggcgctgttggcggcggagtgtagtggacctcttcagatagaggcggaggagcttgatgttgtggttgagtcgttgagttctggaagagttgcagagacggtagatagttgcggacgtggggtgcagacgttgaaggtccatgttgttgagccggctccgtcgcaggaacttgaaccgccagcgccggagtgaagttgtattggggaggaagatttgcaggtcttgatccgccggcgccggctctctgagtgacgttcggcgtcgtcttacgcttccttgagccacctcgaccggcgataggcatgatagtgagccaaatgaagagattgaagagaagaagaagaagaagacgaagcagatcggagaggttgaaggtgagagatcgaagaagatcgatcgatcttataggaagaagaagaagatcgatctacaaggagaaaggatcgatcttagaaagagttttggggattagggttttcgagacgaagaagaagaagaagaggacgaagcagatcgaagaggttgaaggtgagagatcgaagaagatcgatcgatcttagcagaagaagaagaagatcgatcttagaaggagaagaagaagatcgatcttagaaggagaaaggatcgtgattttggggattagggtttgagagatgaagaacaaagagaattggg

SEQ ID NO: 35365 - DNA, 2037 bp, Arabidopsis thaliana landsberg
atctgacactcagagcaggggacctcagcagcagccaggacgttgggtgattcggccgcagcagcagcagcaggcacccaaccgctctcagctcctagttcaaaggaacaacaatcagccgcagtagcaacagtaccgtcaggccaatgacaactgatgtttcacttgtgataacactggacactatgcaaagaattgccctaagaaccagcagaggcaggggcagaattccaattagaaccatggcaagaggcagaaggtgcaagtgaggcaaggcaggctgaacttcgccaccatggctgacattccagagggagcacacgtcatgactggtatctattccgttttgaattatcctgcaatcattcttttttattctggtgcatcacacagttttatcagtacaaaatttagtgccaaatgccagttacctttccatcacaccaatgggggtattacaatttcaacaccaggaggcatggttgccactatcaaatcaacaggcatgtgcctataaagtttggtagtattataattagaaccaccctcctgattatgggattggatagtgtggatatcatcttaggaactgactggttatcaagacatcaggcagtgattgatatcgcagcaagggccattgaggtgcactcacctacttgtggtgaaatcacgttatatttgcctaaccagggttgtacccgttcctgtgccttcgccctgatagagtcacccgtcaagaggattccaagggtctgtgagtaccccgatgttttcccagatgaattgccagggatgccacccgatatgactatagagtttgcaattgaactgcaaccgggaactacacctttatccaagagaccctataggatgcctccagcagagttggcagaactgaagaaacaatttcaagaattgctagacaagggattcatttgcccaagtacttcaccatggggatgtacggccttgttcgtaaagaagaaggatgatgttgggaccatgcttcatcgccgaaggtcctgcaggaagaaacagcttcggctgaagctgtctgtacgtgatgccgaagggtgccgttcatgaagcttcagaattacaaaccgacttaaagatagaatgaccttttagtccataagagtttgagtcgttgttgtaaacttttatgaggggtatgattgtaattgctcacaggttgtgtcctgtgcctataaatagtgaacaatattcctttactgttcacgcattcctgtaattgcaatcacatcactcggaaattattctttgtcaaggcagaggtataaatgtacctaaacattatatttgaatatcttaagtttatataatatgtaaatgatgttgtttacttctaatttacttgtctttaatgctttatatctagtgttatttttgtattatctctgagagttcaattacgaagatacaacctccgtaattgtgtcattataaccttcgtccgaagttcattaaatccttgggaaataatgggtcagcgggcgaagggcattattatttaacattttatgtgttgccttgttcttaattcatagcatttgagaacaagtccccaataggggtgtagctatgtgctaacgtggctggcggagaagcgccttgagccctgtacacgtgctaacgtggctatcggagaagtgccttgagccctgtagaagcatagctggcggtgcggcatggatcctgctgacgtttccttgcttccgtagggagttgagagcaaccgacgtcatggacgcacgcggggaaccatcattacctcttaccggagtaaccttagatgggacaccggtcttgttccttcgtagcctaaggcggctagctaggggtagggtaatgatgtatcccgtgtagcgtagtcggtccgaggcctaggtcgggcgaggcggagacttctcctgaggccgaggctgaggtcaggcgaggttgtgactcctcccgaggccgaggctgagccgaggcctggggtcgggcgaggcggcgaccttgctcccgagg

SEQ ID NO: 35366 - DNA, 880 bp, Arabidopsis thaliana landsberg
gcaccttctggctgaaaagtcgaaagagcaaagtcagttcatacgtcaggaaaagcttctccaacttaatagaaaataatacgggatttacaaaacatagtgcacgactcgggaaatgacatcaaagaagcaccttacaaccaatgagacgatgcagaagctgttgtaaagctggcaactgttccaagagtttttcaccatctaaatcccttgttttgctatacccctgttcatttccaaaatcgaataccctcaggaaggaaaggagataatataaggccagaaaaccaagtaaaacgcaaatttgataccttctcctgccctggggaaacttttggaagacgttcagcctcgatgtcatatttcagaaccctgaagcattcaagccgttcctcaagaaacaacgcataagtgcgtacccaccctgaacaatcccatgctgtaagcaagcataaagcaaataccatatcaacaataactctatgcagaaaccttgaatgaacctcatttgcttctaaaaacacatagacccgtgaatgtagcagtaaggactcaccgactgggctagagtcatccttgaaattagaaatttgcataatgcgtcctttttgcgaaaaattcaatagctcctctctaaatgtcggatcaccatccctcagaagccggtgtataactagcagtgcttttaatgcaacctgttgaagcaaaacacacaataaaatagccaacagaaagaatgagaaacctaaccaaagctatctacaccaatttgaaacaatgactgaatcgatcctcagaatttcacaccctaaaacatacagaggatgaaagtgaacacatctaatcatactaaacgctgcaaattactataatcactatc

SEQ ID NO: 35367 - DNA, 1586 bp, Arabidopsis thaliana landsberg
tttgtatgttttgagtcattacaggtgcagttatacatttgagatatatggagcataatgagggactttggaatcttttcagcaatgaagattatcaaagacgtttttcacgcgatggcgtcgatcgacaccacatctatgtcgattgacacccttattcggctgagggaattcccacgttttacaagtctttgagaagcccctgaagttttccttatttgcaaaatagaccctacacgtttttagtcgcttatatacctaattttatggtcattgtttaaacctaagcttgttttattttagagatacatttttggagagaagaatccaatccctacggagaggattctgaactctttttacttttcttcatattattcaatgcaatctatgcagactttgatttgtgttcctttgatcatgtctgagtaatcaccttgttgggtttagggagtctcactagggatttagatggattagtagatcaaaaataccttaggattattcttagagttcttcatctataattattcttactgctggttttagattgatcacctagaacttgatcttagataatagatatatccaccaatggtatctgtttaagaactattatagatgagcctgatttataggtgtgtaataagaatcgatctatctactaaggtgaacttatcaaactcgtttagcatgcatgtttaggtataaggtttcacgacaagccaccagaaatcttagctctaggcatagtgaatttcacgaaacgccaccggttattcaaattttagagtttcagtttaagaacagttcgataacaacctagctatttctagatctactgtcatctattttctgagaatacctaagcctaacgctttaattatcttagtttacatccatctcataatctgctattgcttgcttttgctttctttttattttcttatattttgtttagcttaattcgataaccttagtctattgtgtgatctgagagttttgtggaattcgacccttaagtgctaacgacgatcacttatttgtggaattaagcttaaggcaatttgagctatataatgctacaactttgatagagaatcttgcatgtagcaacaatatgtagaatgcagacttcgagaggaagaagatagcagtagttgtttcaagaaaccagatggttgaggtaaatgctaagcatgattcagagcatagtctacttacagggaagaagcaagttcacttcgttgtagaagtagagactattgagcctgagccagagtcagaagaaagtgttttctacattgatggtcaaggttacataaaggttggactaccacagggcaactttagtggcaataggtttacaagaaaccagagttcttcaagtttcgccccaatacctgccttctaaaaaatgttttcttagtaagacttgcaaaggtcttatggtaattcattttgccacccctcctccaccctcagctaagagtaagatggaatcaatgctttaacagattctagagggtcagtcctagagtgtagttgtaggaaattcaatggcaagtttgatgctatctacacag

SEQ ID NO: 35368 - DNA, 2315 bp, Arabidopsis thaliana landsberg
  unsure (1)..(2315): unsure at all n locations
acactcctcaagaagatctgtatcagtgatgtagatatgtcttacggtttcttagcttctactttatataattaaatgttagaatcaaaatgcggtgatgtgaatcggtcatgaaaagtcaaaccttggcttatacaaaaggtccgacccatgcaataagtcattagnnnnnnnnnnnnnnnnnntcattgaaaaaaaaaaaatcattttataatgtaaaattcatgagaattgacgagtttgtgtcataagtgaaattatatacaattacttaacacctctaaattaactcataacaaagtgattgtgtgacacattttcataaattggtcgtatcaatactataagagtaacccttttaaatttggatacgcaactagggatggcatgatgtctatataaaatcatgcatgctttgtgaagtttaaatcacatggccaaacattttagttttcgtcttttgttttcgttcctaaaaacgttacatacttcacttggtcatcttagtcataataattaggttaggtggcttaataaaagaatgctatttacaggtttttctaattccctaagttacaagtcattgactttgtaaacaatctcttttgagtggaaagaacgactttttcacaacgaattggacacactaatgtgtttcttccctttaagcaaccatagccatcaaatcctagttttctttctattaaataactactttcatacaacattttttgttaattgatattctacacatataattcgatacctatcctattttaaaaaaaataaccgcgaattcgggtctaaatcttagtttctgtatattcagattcaatttttagtctatttcttttagaaattatttgctatcgaaatacatctcttcccaaaaaaatttatattaaactagtcttaaaaaaattacaattttttgtacgttttaatttataattgcttataatatacatcttataaactgaacaaccactcactttatcgtagtaattaatcagaaaaatcaataaagaaattggctagtcttatatatgaaaatgaattgtggataagattgaatgtgtgttaatattttgagtttatataattaactaaataaaacacagtaccaagtcaatgttctaaagaaatgttacaatattaggctattaaagtaactagatggtcacataattggaattttcgttgttatgataatatcatatcgtttcacgttagccacatatattttctttcaggttcacatcgtattataagtttataatacgtatagtatataatataggcggagtcacgcaagcatatatctatgaaatctaaatgtgatgtattctttatatttttcagtcactaaacttacgtcaagtatagatatattagtacaacaattagtaataacactactaattattttattctcacgacgagtcctatgaatttttaacttttatataccaagaaacaccgagattaatcataaatggtaaatggatgattgataaaaaaagaaaaaaaaaagtcggtgtggatgacttggagccaacacttttactacgacttttgttttatggtataatcacaaaatcatacagtataataaagacaaccagatactctcaaaatcactaaactcggcattgctgtttagtgattatcaaaactatataaactgttcatagctaatataatgtggattttagtttgcgtgttaaaatattacttaaataatcaaataaatatattttaatcataaattgcaaaattagatgaacgttggttttcatgttacatagacctatatttcctaataatgtacagaaaaaaagccataaatacaaactttcactataaatagaaataaattcgttatcgattcacatgggcggagacaaagaatatatttagacatagaatatattttatacgatatgatttttagtctgttgtcctttaggtttgaagagaggtgggaatgattggatcggcttctcatctccacttcttccacagtgtccaacttgagaaccgaaaaataattggagagataggaatcgtttctcatcaaattcccacttacttatgttaagccacttaagtagtggaacaataattcaaaacttataataatattcttttacccaaaactcttttcatttgaccaaattagtaatcgagttggtaattactagttatgtatacattctgacattcactatccaagttgttttccaataagtagaaagtntaaagtatgcgtagctcgacattaattaattagcttctgttaattatatgattag

SEQ ID NO: 35369 - DNA, 4483 bp, Arabidopsis thaliana landsberg
tacaggtctctgctcgctttcactagtcatggttattgcaattgtatcatccatgtcatgcttcatcaatttaccagcatgctactctcttcttatatgttgcagaggcttgatccccagactagtgatgtacatgtcgcaaggagctatattctttgcttcgtatgaattttacaagagcgtactctctctagcagcggcgcagcctaatacgtcagctctctctggcacaaaacaaaagatggagatagccttaaatcgttaaaggacaaagatagttcaaccccctatgaaaccaccaagactgcaacatatgtaatacaaagaatggaaaattgtacatttgtttcgtttttgtaactattgatttgattaaattcatttgtgcaaagttctttttgactggagagagaagaagaagatccattattcactacaagttacaaaaaaaaattttgaaggatctaccaactctacgctcataagacttctaaccaaataggcacctcccacttgctaccttacaatatgaacagtgtggctttttcttttgcctagatcctaagaagaataaataaatgatacaacaaagaatgtgacgccttcctttctcagtctgaaaatcagagaccatcccatcttaagctctctagcttgtccggcgagtctactgcttcatggttgcgctttatcggggaagttggagaccaaccttctctcctcttcttttcttatcgccaactcaaatgcacctgcaatagtgatagcatcacagactacactcgggagattggcgagaaaggaggattcggcatgtaggattgaagagcggtcacagcttctttcagaggcttagggacttcttcttcctctgttactgcttcaactaagaactgaacatcatcatcaatcagcattttcaacgagttgcaatgcgaaaactgttgtacattctcgccatttctgtaactatctgagacttccgtgttatgtaatatggcaacacagatggagaatgcttgcaatgttgataactgcgcgtggaaatgaacatcgtactgtccttcctcaacaaatgacatgtacaatgctggtatatgttctttagcaccctacaatatgaagaagatatgtgttaaaatgataaacagaagaagagttcctttaaagtcttcaataattttacctggacaaatagttgcaaaggatgctgattttctacaagaggctgatcatgagaacatgagatacgaggattaccaagaaccataagtggacaagccatgtcccaaccaccacagtcacaaccgcctcctgacctccatcgctgaatcaaaggcgaaggacaagagttttcggtagttggtaacccgtggtttcccctcgggattacaaccttcagtttttctaaacttctgctgccaaacaactcctttttctcctcttctattggagaaagaccaagaatattagttttctccatcagtcttttgtcacctcttctatattttaagctttctctcttctcaatagtgtcttgaataattatagctgcgatctcaaggtcaggatgcaaatttgcagctgaccacgggtttgttccatttgaagcctcaagatcatagctttgagatgttcttttaggctgagatctctgcttcattgtatccaaagcatccccggacattgagttatttcttatctctgagtctgatttaacagagttcttggaggcattattaaccgtatcaagtggtagtgattgatcttcctttgtggagacacttcttcttgcttgtgcaatatcatacaaaacaaactcattcaccatcaaagtttctggatcttgtcccttttttcttacttctgaacacatcttacaggtaacttgcatctgagccaccagcaaagattctttactaacatcggtcaaaccccgcacgctagcactgctcctctttctgcttccagcagatgaaaatgtatatacccaactagaaccattgtcagatttccacgtctttgcagcgtaaacttcctcaggagaatctgaaacaaactgaaaaaccggtaatccattcttgctttccatcttgagacggcaatgtagatgaaccggggaagatttcagcaccgaggtataatccttattgacaactggaggaggacaaagattcgatcttttatgaatgtttgagtagtcactcaacatagatctgcaacgctcactgttcctccccaatttgaactgatcacctgattctcctatataaccaagaggacttctcaaagattttgatttaacaaatggatcaaacattttcctaactcttgagctgtccttattgtaactggtttctactgagtctacctttgcagaatatggcttaggcaatctaatcttatggtcattatcatctgaatccaacactacagctctatctttaatacctgacttcaaacaaatgtcaatgaagttgctagaggtgcaaggttcaactaatgacttctgaccatctaaaaccgtcttatgcggtcttttctcagtacttcccttcctcgaagaatcaacaactctaaaggagaaagaagcatcactactacgagacaactcaagtttcgcctttgaatctttacgtccttgtggttctctaagttctttaaacaactcattagagctttgataaacagaaccgcgccttagctccgttgtatctcccattgcaagtggtttagaaggaaagttcttacatgatgtgctacggtaacgcctgaaacttatctcggtgaaaccttctttgactctcaatatctcatctctacgaggcggctttagtcttgtactagtcctcttttctgattcagtgaatggacgaggaggaggaagaacactattggggctttgttccatatcaattcctttaccaaattccatttccactccaatcaccacttcaaaacatctgtaaaacattacacaatacaagaaaacagtttagtcctcctaaataaagacactttcaatgattagtagatgaaacatgctaaaatgaaatctctgaaaatttactaaacaacttcttgtaatgatagtaacagattagagttttaatcagtgattagtagatctaatgaatagaatgtcataaaagcttcaaaaggattcaaattaagcttccaaaacacaaactacacatgcaaaagtaatgatcttttgattcatacacaatgtagatctcatataaggttgatagagcaaacaaaaaacccaattagtagtaaagagtgtatcaaaacaaccctagaaaatcagaaagaacccaaaatagcagtcaaagaagaacaacaaaccaaaagaatcagatagcattaagcaaagaatcaatttttattttttaaagatttagagaaaaaaagagatctaataagagacacagatagagacataagagaaaaaaacaaaacatacccgagttacagtgagaaacagagtgtgtaaatctcaaacatttcttcatcgacatggagaagaagaagaagcaatagagattacaaaacactgaaggtggtaataagagaaaccgatcatgttctttgtaatgtaaacaaaaagatagagaagaaaaaaaagcaatcaattagttttctccatcaaggcatcattttgtttctttatttccctcttcgagtgtgcaaaaataaatctctctctctctctcgcagtcactatctctcacacactgtacttttgctttagtttttttgttgtctgtttctttttcacttgttctatcaaacaaaggtttttttcacttcaatcaagtgttgtgtgtgacctaagacaatcttaccctttgtcagaaattgtcgataaaatatatagaagggtagtttcgtcatttaagtaaacaaatctggtgagactctgagagagattaattaaaattttggatcggttcgtgaaccacaaaaaatattatttacttgtttctcgggaagttcatgtgggattcctatccccaattaaaatctttcgactctatgttaattttaattttatttcgaaaagagtttatgaaattaatacttgtgtgatttattggtagtggtatacttaagatttttttaagattactattaaacaatatactctgatagctagttttctatccataatgggccgcatcgtaattgggaagacccacttttgaccaaactttcaactttaaaacattttggtccaaattggtaaaagacaaaaattagtttatagggatttgggattgaatgactcgtcactcgtataaattaatttggtgactccatttagtattttggagaagaaagtttaaagtttgtgtttgtgtttgtgtttgtgtttgtgtttgtgtatgtttgccctttgattatgaacggtgaaatctagactaattttgacagtataaacaagattaattagattattgcctgcataggctgcatt

SEQ ID NO: 35370 - DNA, 2701 bp, Arabidopsis thaliana landsberg
tgtggttagcaagtaaaacctttaaaaaaaattatcatgtgcttgttttggtgtttctagccctcgtgtgtttacccttgaatttacacctgcacaacttatagaaccccatagctggaccactagatcgactaaagcctccttgtgcacttgtttctgtcaaaaaaaacttttgattggtgtatacttgcggaaaacaatatccagtcccaaattcttcttggaaaaccttgtcccaaaatcctcattaaattctcttctgctcaacctagaagccctctgggttgatgacttctcttttcacctggatctggtaatcttttactggtgaatcatgttgtgactttatcatccgaatctctggatcattcatcgagatctacccatcatcttgttatcttctataacccactctcaagtattaaatatggatcagtctaatatctcattatgatcgttcccatactcttctctgaagatcatgacgttgttttatcgattctatctctaggcagtagatccatttggttcaatggattatgttgttgactttagttctctcatgtctctaaaagctcaacaatctattttgatcccatggtcggttcatcctcatatcaaatctcgtgcaaatctctgatctgataatctccatgttgatcataaaatagttttctgagttgaagaaaattctcatgtgatgctcttttgccaataatctttacttcaactccgatcacattcttattttctgagccatactctcataggctccatctataattgctatgtggatttcttattggttgcgtttggtaagggtattatggctagcaactgatggtgccgcgacgagaccgagagcctactatggtgcacacatggttgagctgctcggcacgcgctggtatcgcggttaatagccatgatacattatggaactacaccgatatgctatctttgatgaagattctctcagagtgatcgctgcattttgtctcagcatgccgcgatattatatccaaatctatcctcattatcttgtcaaatcccatctcctgaatttgcatctatctccagcctgggagttacatgcttctccacccttaaagatcttcatccgaatctcgggacgagattcctttaaggggggaaggctgtgacaccccaggtgttaccatggctagggcacatctatgcactaatgactatgatcacatgtgggagaaacttaaggagcaaagtgtaagagccttggaggctaggttttaaccaagagatgtgaatgaccaaaagcattaccctagttgtgtgcaattatcactttggacaagggggaaataaaccctagacctctcttgaaccctatctcttaagcaccttggttaaaggggagaatttaagcaaaggtgcaagtcatgaccaaacctttggcacaaagttagggaacttaataatctacaaatatagagaggaaacattgctaaaagaccccttaagaaaccccaaatccattccctaagtagagaaagagctagagctctctaattctctctaagtcaaaatctacacctaatctaaagatccaccgtgttcaccttgaagatggcaccaaaaccacctaagttctataccaaaaatgtggcataccacctagggcaccccctggaaaaagttgagaccgagaccttgacatttgacatgtcttggcatcacttttgtcgcgcagcgggcagggggacaagccagatttggcgtccgcatatcttctgacctagggcttatcttcccttggaactcacatataagagatagccataggtgccaggaagaggtctgcgccggatttttgccaagattcgcacgtttgcgatctcagcaagcgtttgaacacgggcagaaacaaaccgccacgtgttcgacgccgtctgccgcgccagagcacgtcccgccggggcccggccgcgcccaagccaagccagtgccctggtccgtgttcgcgactataaaacgcccaggagccttggtcgtacccctccgcacgcgctcaagcctcaccggagctcagttcgccgccgtttgcccatacgcgacgtgcccgcggccacccgagcccctgccaccgtagaccggccagcccagccattcccaaccccgtccagccctcggagaagactgtgcacgtctccgtgaagctccctgagcgaggaatcgggctctgcttcaccggagaggccggcccaaggtcaccggacttcaaccgaccgccggcaaccgtggaccgaggtacaccgtgcacctctcttcgattccttgcacggttagactccttagacctccacgaagctccctatgcccttggattgaactatgccgccgtggataggccggagcacacgccgccgacgagctcgcccgcctgctcacgtggaccgggcgattccggccatccccgacgacgagccgtacctcgatgtgatcgccagaccctccccgagccaaccctacacttcgccggaactccctcgccgccggtaagccgcgccgccctttctttttccacggctactgtttcaatggagggagggactgcgggtgagagggagagaaacccagggggttaagtgaaaggtcagagactcaagtgaatagtgccttaagggtagatctgcgaggtttgaattgttttaaacccaggggc

SEQ ID NO: 35371 - DNA, 10651 bp, Arabidopsis thaliana landsberg
ctccacccctgcaaaagcaactcggtttcttgttcttgaattcaacagagcctttcaacttcagagaagttactcgacctgggggcttcacgactcactcgacctactgaagcattccaactcgaattcggagaagatactcgatccaattcgtctaaggggaactcaggaacagctcagtctactcgagtacagaattgtactcgatcaatagggtctatttcattgcatattgataacaattttggcttcattgctatctttgagactaacctattgacatttgagctttgagttctagatttctacaggggaatcatgagcaattacagtggcagttcttctgttgatcctgactacaacatggatgacacagagtcgtcatcgtcaaggcctgagagaaaacaaagagaatatgaaagcttcagaagaaaagctaagatagcccgagggaagagagcgatgacagagaggtatgagcttatagacgaagatctgaaagatgagtacatgcctgagcatactcgcagagctaccaaacttctgcacaagcctgacgtattgcctgctgaggaatatattaggctcttcaagctgaatgagttatgtagcactaggtatccttactcgaccacacttgcacaactcggattgttggaagatgttcagcacctgtaccagagttgtcatctgcacactctgatggcttatccgtatgtatcatatgaagatgagacaattcaattcctctccacgctgcaagtggagctctaccaaggtatgacctctgatgagttggattgtgaaggattgggattcttgcgattctctgtgtatggtcatgagtataggttatcaatcaagcgcttggaaggattgtttggcttccccagtggaacgggaactaagcccaagtatgatagagaagagttgaaagacttgtagatcaccattggcagctctgtaccgctgaattcttccaggtcaaagagcaatcagatacgcagccctatcatcaggtacttccagcgtgctatagccaatgtactctactcccgagagatcacagagactgttactaattctgatatggagatgatcgcaatggctctcaagggaactcttcgccaaactaagaatggcatgtctctgcaaggtgaaatcaatgacacacctttctctgtacttcttctgatccatctgtgtggatacaagagctgggccgtcagcaataaccacaagagagcacgaggcgctctgtgcataggcggtgttctgacaccgattctgatcgcttgtggagtctcaatcacttttgatggactcgagccgcgagcaatggatatggagcacctacgtcactatgaattcctggagtttgcaatggttgacgatctccacaggttcaggtttgagcactctacagacaggagagctaacatccttctccctagccctgaggtcacacggataatagagggagataacattgattttaggcctgagattggacgcctctactatgagaacgctccgccattggatgaggatgatcttcttgaagaagctgcctcggatgggatggatgaagatagggcagtgaagttcgacactagcatgtatcactttgctgaacatgtacctccagcgaggcagagcaagagcttgactgaagctcataaaaataacagtaaattgcagaagtggtgcaagaagcaggacaagctgatcgccaagtgtttcaagcttctgacagataagctgagttgctcttcctccaccactgctattccacaggtacagcctcctatggagatgccatcgaggagaattaatgcacctgcgcacatgcctgagcttagcgagcagagagtcccacatgtccaggctaggcatttgtcattcgaatcccgggaacacaagagaagaaggaaggctacactcactcgatctagcagcagatcacgcctcatttactcgaggagatcactcgaccgcggtactggccgcagcagaaggagagaggtcgagtttcctcagagcagtgctggccgccacagagctgatgaggtcgagtacccacctgctggagcgatacagaacaaggaggttcgtctatggcctgggagcaatcgcaggcagccattgacgagcaactacgttcattcttcgactgaggtaagcgcctcacttcaccattgtattataccgtctgttgtgatttgtttcttcattttttgtttctgtgattggatttgtcctgagtactctcttccaagtttattcacacagtggactgtgtgatttaagtttgggggagggctcaggaagtgtgtgttgcattgtgtatatttttgagtctgcattcatctaaggcatagaaaaaccaaaaaatttgaaaaatttcagaaaatgatttcacaaaaaaaaagagtgttcatgtagttgcatcacatttaggatcgaatctagagtgtttcatttaggattgttgcatatgcataggggatgatgatgagatagccttgtaagcattttgattcaccggataaactcagtgccctcgttgctagttgtctgttgcatagtcaatgaatttgaaaaaaaaaaaaaactgaaccatgcttagattgctctactcgaccacactgtcatgatctgataccattccctatcaatttgaacctgaatctaatctttaattatcatgtctgcatcaaatttgaactcatggataccctaaaatacttggattttcttattcattttgatcactcttgttaataaaagtagctgactctccttattagagcagttaacccaaacccaaacctagactttctttcaagccctatatcacttgtgattgtttgtgaggtcttatttcgattaagccttgtagaaagtgttaggttcgtaacgacagagatagtgtctcatgtagttctagttcgtattttttggactagataggactaggtgggcgcttatactttgggttgggatgtgtttaaaaaaaaaaaaaaagggttgattcattgataagaaaaggtaaaagactctaggtgaagtaagctaaacaagcagaaaaagtctagtaaaggttttgagatttgtaaagaaaagaaagagttcttgttagctattgaagatgggcaaaagcccttggttttaaaatgttaaaaacatgaaccttagttgttaaagaaatccaaatccgctagatgtatcaaagtgttgagaaagcttctcctagaattaagagaaaagaaaagaatgattagaaaaagggcttaaaagattcacgaatgcaaagggtagagtttagttcttgtattgggattggagatgggattactattagagcttcatttgatgtactctgggtagatgggatcttatctctgtatgcatagcttgggacttacctttagcattcaactaaagcttaatcatttttttttgagagatcccctgttactgaagcctattctgtaagggaccatctttgtctcttgaccttttaccttagccaaatgagttctttgatgatgcattgcttgattcacgttccagaactaatgaatgttaaaggggttggtagatttgaaaacttgtgcaggtcgagcatatgagtcggattgattgatgatgaggcatggctaacgtttttaagtagaattcgatcttgcagcttagaactttcaacttggacattgatttcatctggtttatctggtgctttggctctgagtccccgctttcaaacctcacctccagcttgtttttaattgtttgcttgagggcaagcaaagactaagtttgggggagttgataagtgtgcaatttacatcttttgagcatccatttgttatcactttagcatcatatcaccactgttttataccatttctcatcattttcatcactttgcatgtttatgatagttttgcatgcatgttgcatatttgtgttgttttcaggtgatttggagctgttggcgagctaattggaggaagccgacctgacgatatcaacactcgaccccctggtcgagtagatggcttcgcaacttcaacaaaccactcgaccccctggtcgagtagaaggcctcatcacttcacacgaccactcgacctcgtggtcgagtatcatcatctccaccacctgaccatcactcgatcacactactcgaccccctggtcgagtacctccatcaccttcactcgaccacccactcaattgcacggccgagtctcaccatcatcacacactcgatcgaccactctaccaccaagccaagtaccaccatctccatcactcgacttcatactcgactgccagcttcagagtcttctccattccgcactcaaccagacactcgagcacaaggaagaaaagaagactccagcttatcacttgaccattcaatactgtgtcgttttgagtattagggtttcggaatattttgctataagttgcatgtattttacattatcaaaaactaagttttattccgcagacactgtgttcttgaccttttgtaatccggatgctctcttaatctattcagtatttgcttttgatttcgtttactaagttgttcatcctgttatcatcctactattactctgtttctatcatgttttcattcttatcaacgcttatgttttctacaatgaagtctgagtagtgaataggtttctgaggatgggttagagtattttagaattctccctatgctaggtggttgagtttgattgatagatcccttctggattagttgttcttaatgcctattgctttctgatcaactggaatttgaatctagacatttccgcgcccaaaaggtgttcgatgaaatgtctcaaccactaattccagagattcgtggccctgtaccaatgtattgattgtagggagcgttttggctttaactagttgattcgtaatgcctgttaggttagctctcgtcaatggtgattgagtctgggactaggttaacttgagagtctctgttgcggtggcacttagatttggttaatgaacttgttgtctagggataatttattgagcatgtcaatcacctgtaaactgaggaaacgaaactactcaattaccccatcctcgggaattctttatctgattgattttattgtttactttactgttgtttactgcatcttgtcatctgttgtttagtttctgcaattctttactattacacgacctgatactcgaccacccagttgtctggcaacagactgtgcagtcgagtaaccctgttatacttttctgtctgttactcgacctgtcactcgaccacacccagtgctctacaaagagctgtgttggtcgagtgttttactgtttctgcttgaatttctgttttctgcatgttcacttaggactgctagaacacaccaaaacctgttattgcttggcttgacttagtgacttctgatcacatcttgattgttagcatcacacccatttggattgacaacctaaaatactacaacgacatgattggtgttttaagataattgactaaaaacctattatcaatttggcgctattgcttagattaacagacagtgatgaagtgaataagatgatccaagtatgtatatggtagccatgagttcataaacaatgcatagacatgataattgcaatttcagttcaggttctaatagatagggaatgacatcagaaaagcgagttttgatcaaagtagtatagtcaagttacaaattcaaagcaaggtgcggtcttatttcaaagatacaatcggttatgcaacagagaactaacaacctgggcattgaatttacttcattgaatcaaaacatgcttatcggtttgaaatcatcattatcccctatgtaaatgagcaatcataaatgcaaacactctatatacaatcccaaaattatatgcaatctacatgacattctttttttatgaaatagttttctaaaaatgttttcaaatttttatgattttactaggccttagatgatgcaccccccaaataagaaaagagaatacaatgttaaacatgtcttgaaccctcccccaaaattaaattacacagtcccttgtgtaataaaaatctgaaagagaattcaagacgaaagcacaaaacacacaaataaaaagatgctatggtatatacaatggagaggtggtgctacctcagttttaaggtgaagtagatggagacatagtcatccatactctcttgggtataggcaggggctgaagttgaggcgggagggtgttgctcgttctgtccggtcgagcgtgtggaagctcgtctttgcctgctccttggttctctcaaataggagatcacttcctgaggctcaaaagatgaagctcggggttgatcgatcctttcagctctccttgcagctgagctcgttgaaccgctccttcttactttggcggttggagatggtggccttggcttgctctggaagtccttgagttgagcagccatactcttgagcgacttcttcattgttctcatcttcttcttgaaacccttcattgtcttactgtaaaggtttccaagctcttcaagcacaccaagcttcttgtgaacttcagcaatctcatctccctcttgcttagcaccttcttcataatgagcttgctcttgttcgctgcccccttgctccggttgatcaatatgttgctcaaactcgatttgctcctcataattagcttgagtaaagtactcatgttgctcatagtcggctgggctatattccggttcatcttcccgagctcctccaatgtcgatgttcaaggcggagggaaatggcatgaaattgatgttgcgccttgtcttcaccaaagtccgactctcgcattgtaggggtagaagagaaggtccaagctccgagtgtttgaacttgaagagatagcgatccgctggagttatcttgtcaagaaaatcctttcccttgagatattcgaggctaaagaacttggagaactcgtcaggggttccaaattgcatccccacagctcccagtattggcgttaagagaccaccaacacaaagacttccacgaattcccgagcgatgtatagttgctgataagtgtgcatattatctattttgagcattcatttgtcatcactttagcatcatatcatcactgttttatatcatttgtcatcactttgcatgtttaggataattttgcatgcatgttgcatatttgtgttgttttcaggtgattcggagctattggcgagctaattgaaagaagcggagttgatcactgcaaaacactcgacccctggttgagtagataattccacgacttcaacaaaccacttgaccccctggtcaagtagatgggatcttatctctgtatgcatagcttgggacttaccttagcattctactaaagcttaatcattttttgagagatcccctgttactaaagcctattctgtaagggaccatctttgtctcttgacctgtaccttaagccaaatgagttcattgatgaagcattgcttgattaacgttccagaactaatgaatgttaaagggattggtagatttgaaaacatgtgtaggtcgagtatatagagtgggattgaactataataaggcatggctaacgtttttgagtagagttcgataatatcgcttcctagaactgccaacttggacattgattctatttgatttatctgatgctttggttctgaatccccaccttcaaacttctccttcagcttatgtctacttgtttgcttgagggcaagcaaagactaagtttgggggagttgatataacccgattttcaccgattttatctatgttttagatataggattttgagtctttatgttatttctcgagtctttttagtgtcgtttcaggtattctatgcaatgggacaacaatgtagataagaagacattttggagcaaaagttaaggaaaaagaagctaaagacgattttggtccaggaataagcgaggagtgtcgatcgacacactcttggtgactatgcaatacgacgaacgatcgacaataagacatcaatctatatccactttagttatcatgatccaactccattttcacataatcataaacttgtccaacttcaaagacatgtctgtgtaaaacatgtaaaataaagtttggtatatactctttatatgatagaatgttacttacaagtatctccgagtgtcaaaatcagtaaaagttggattaatgtaaagtttaattgtagttattacctaaacaaaaagaaaaaacaaaatacagtttaattgcattcaaacattgttcacgaatgggaaactctaacaaacttaccattgaactccgagaatctccagaaacgtataacaatgaggactggctcatagttataagtcacataagttattttcttaaaccagtttgtgacgaaaaactgacaagagctaccatttacaaaacaagttataacctttccccttcaaccacaaaattttaaaacattttatacataatgatgttttggtccaaaaaatacaaactgaacataaaataatatagcaaagataatgtaaacttacatgttatcagtgatgtcaaaagacacatatcttgcctcataattagtctctcggtgacggcatacaaatggaaacctttgaataggagatacatttgaaatcacaccaacaacatttgttttaaactagttagtcctaactttatatatttctaaaactacaatattttttgattgaaattacacaaatcaaattacctgtcacataattcttgtcttgatcagtagcatatttgacttcatctcaagagacaaaatcaaggtagttgctactagatttaggactaataggccacatacttgttagccagatacattgaatttccaaaggacaccaagagtattttgtatgtttagttgatctcattacatagaagtttttcatgttataccaactaccttccttgactccctcttggaaattgtacatataattttcatatgtgaggatcattgttgtgggttcaccaaagtggtttggttgatcattcaagatacacaaaatcttcacgtaaacaaaatctaggcctttgaagattaagatcagaaatataatcaacagtacccattactacaagaaaacatgtaatcagcgacaacagaataagtagcgtaatagtcgctaaacccattaagatgacaatttggcaactaaaacatgtactcgataaaccatgcgtcgctaaatttattagtcgtcaaaccgtcgccacttagcgactgatgaacgactaagtaatgttgtcactatttagtcgcctaacagtcgccgatttagcgactattgggagacattattgctactacatagtgactcttttgcgactattttatgaatgatataacgactattttgccacttcatggcgactgtttagttaaagtattggtgactgaattgaaactatttgatgactgattacatgtttaattatcgatttcacattctattttttggaatcctaattacaaaaaactgtattaaacaaacaaagaaccttgattcaaacacacaacataattcaaacatgttcacaacataatattcaaggtacataatatcatttttttaagttttgataagaaaagtcgttatgttgtgaacatgtttgaattatgttggttagacgttgcatattcttagttagctttagtactttacatttctcccacagagaagatgcatttaatgaagataacactattttagctctttctgcccgttggattatgggaagaatttgtctaaaattaccttaccaccaaaaggcatgttatcatgttttccaagcacacatcatttaaacttctatcaaatgattctaaacaaaacttactcatcattggtgtctcatcccatattataagagaagcttccttcattaaatctcaaatatcagtattccgacctattgaagacgtagaggtatcatctggatttaaaggaatagcaaatttggaatgttctgtcagtccaccgggtaaaagtaatgaagttatcccactcgatgcagcattgagcacgatttttcctttggatctgatagcagctgataatattttccacaaaaattgttgccagtacctcctaaaccataaacaaagaaaactccacctgattgagaatcaactacacgcattatctcatcaaaaattgatttttactccattttcatcatagtgagccattcgttgtgcttttctatctgctcacttatgttatatctcatctcatcaacaatcaatctattcgaattatcaattgtttcccttgttgtataaggaaaggtcttaaggtttgtcaaacaataaccattcataagaagtagtttctcaatctcctaaagattataatttctcttgtcaacttcacacaaagtgaaatctgaaacgtatattaacatgtcctaaaaataagaagcaaatcactgtgaatctaaactaatgattaaaactggtttgtatgaaacatagtacaatcctgggttattaaattcttcccaaatcttaatctcaatatcttctgataaaatatgccatgttgc

SEQ ID NO: 35372 - DNA, 6410 bp, Arabidopsis thaliana landsberg
tcacgctctctagttaacgctagtgagttattagtcaacgaactcaacgtaattccattttcgataacattccacaacttccttgttttcaagatggttatcatcttgattttccaaaagccatacgattcaccattgaagattggaataacttgctgcattgttttctccatagctctgataccatgttgaactttgaactctcaaagttgttaaggatcggacaacacatatttaactgtgatttgtcttactctatatttctctgtttttgtaaaacgaaaaccatacactttaattagatatataaactgtatttataggtttacatgacacattttgactaagtgacacgtctctagaagacaacccattgtagagacacatacacacatgtaattgttttgctgttaacaattctatttgaatctcttcaatgtgtgatacgaatataaataaatcagttacttaactatataatatatgactcttctaaaataagatgatgacttgatcacttccaacaaatacctctgtttgcactgagtgctaattttacgttttgaacaaaacttaagcattttcttcctgtcgtaggtatggtgaagaaactaacaggtggatataagatcaaataccacgctaatgggtacgataaagagccaattgaaatcgacttcactcctccatttaggttagtgaaatatctttgttggtcaagacagagttcttctcggtggatttgggaatgatttgatatttctttatttctgtaggagggttgacatgattgtagatttagaaaagatggccaaccttaatataccaaaagacttggctagcaaggaagctaacaagtatctaattgatgtgtgtgagaggtttgatgtcagatgcacacctcctctgacgacagctcatttgttggataaagtaagtttgttatccccttatagtattaaattcgaagttatgtgattagttcatatgcttaatgttttcactgtgcagcttgttggacactttctggaagtgacgtgtgttaaccctactttcataatgaacaaacccaagattatgagtcccttgggaaaatgtgataagccattagtggtttgatatgtttataatttgcatgatttaggcattcattcttcaccactttgtcattgtttcatccacatttcatctcattaggagtcgttttagtgtgttttacatacttaggacgattttgcattaggattgcatgtgcatggcatatttggttgttttcaggtactttggatgcttttggagttcaaacagaggaaaaacagaacatgaagtcagaatgcccaatgacgccttcagcaaaagtactctatcgcagcctcggagccctgccagggcaaatcactctatcgcaaccccggagaagctagcagctcagtttcactcaatcgcgaagccggaggaatcaccccatcagaaccactcgatcaccactcgatcaccaggaagcctatctgctcgttctgcactcaaccagacaagctgagaacaaagaagagaagagaagccgaaggaaccactcgatcaccacctcatgactattagagtgtatgaagaaaggagagagaggtcgatgaggccgagccatctccaagaaagagaagaagaagcagaaaggagtcaaggccgaagtcatgaaaacaaggccgaagatctcctcatcaaacgctgaaaaagccaagtaaagagccgtgaagaacaagtctcggcctaagagagtgtccatacggttttatgtgcattatgccgagactatacctcaagatgaaggcttgagcttgtgttaagacccaaaggaaataaaagagagcccaaggaagaggcccattcgtttgagacaagaatagggaaacaatgtgtgtgtgcaaccatgaggggctgtcactatccacgccttggggatgcttatggacgttggagtatgcaaacaagggatgatcacatgttctattcaggatttgaatgttaggacatgtcactttcagtcttaggattcaacctctctctcttcacgtcgctttctctctttggtctttgtgtagagttcgaactctcctctttgcctatttaaaggctgtgtttctctttgtaatacaacaagaataatagacaagctcttatatcattttgtgtagctctctcttctttacttgtgtttaactaaagagttacaatgtagagagatagtgttacacgatttaggactgctttaaggcagcctattgcttgtcatacacactcttaaatacactctaaactcttctttagttagtacttattctctagcttactgatcctaaatcctctttatcttaagtacacaaactctaagtgttgttgtactagacaaggattagcctcaaactagatgttttctccttcatataaccgatttactctctagtatattcggatatattgttggttatttgtgtggatttcatcacaagttgatgttctcttcctctattgaacgagttcactttgtgtgggtaaagggagattcaatcaccaagtgattgtctactctctcttgtgagctttgtctcataaaacctaacaatgacatccattcgatcgcactctatcacagggtcgctggaccattcaatctcgacttcactacatctcactcgatcgcaaggcggagcccctgaagcctagttttatcaatgacatactcgatcacaggaaaactcatttcagcccatcagatgccaatgacacattcggtcgcagggtaatgacgtgaagattcgctatatatctagtttccttatttgtttcatttcttgctgataataggtttttagtcaattatcctaaaacaccaacatgttgttgtagtattttaggttgtcaatccaaataagtgtgatgataacaatcaagatgtgatcagaagtcactaagtcaagccaagcaataacaggttttggtgtgttctagcagtcctaagtgaacatgcatcaaacagaaagagtaaaacactcgaccaacacagctcgatgcagagcaatgggtgaggtcgagtgacaggtcgagtgacaggtcgagtaaaagacaaaaaacaaaacaaagacactcgactacacagtctgttgccagacaactcagtggtcaagtatcaggtcgagtaacaggaaagaattatagaaactaagctacagatgacaagatccagtaaacaacagtagagtaaacaaagaattcaatcagataaagaattcccgaggatggggtaattgagtagtttcgtttcctcagtttacaggtgattgacatgcttaataaattatccctagacaacatgttcgataaccaaatctaagtgccaccgcaacagagaccctcaagttaaacaagtcccaaactcaatcaccattgacgagagctaacctaacatgcattacgaatcaacaagttaaagccaaaacgatccctgtaaccaataccttggtacagtgcaacgaatctctggaattaggggttcagacatttaatcgaacaccttttgggtgcagaaatgtctgggctcaaattctagttgatcagaaagcaataaacattcagaacaatgaagggatctataaatcaaactcaaccacctagcatattgagaattctaaactactctaacccatcctcagaaacctagtcactactcagacatcattgtagaaagcataaacgatgataagattgaaaacatgatagcaacagagtaatagcaagatgataacaggatgaacaacttagtaaacaaaatgaaaagcaaatactgaatagattaagagaaatccagattacaaaatgtcaagaacacacagtgtctacggaaaaaaacttgttttcgaaaatataaagtacaagctacttatagcaaaatgttctgaaaccctaatactaaaaatgacacagtattgggacggattaagaacggtactcgacccaggtggtcgagtgactggtcgagtgatcagctggagtcttctgctcttccttatggtggagtgtctggttgagtggggaatcgagaagactctgaagctggcagtcgagtattatgtcgagtggtggatgatggtggaactcgacttggtggtagagtgattggtcgagtgaatgatgatggtgatactcggccatgttgcctagtagtcgagtggtgaatcgaagtggtgcaggcagctaatcgaccagggggtcgagtggtgttgtgaagtggggaagtcatctactcgacctcgtggtcgagtggtggatagagtttcgcggtcgagtgatttgttgtggaagttgtggccgagtatttcaggatctccaggatgacggtactcgagctcgtggtcgagtatgttgatttgatcaggtccacctcttcaaattagctcggcagcagctccaaattacctgaacacaacacaaatatgcaatatgcatgcaaaactatcctaaccatgcaaagtgatgacaaatgatgagaaatggtataaaacagtggtgatatgatgctaaagtgatgacaaatggatgctcaaaacgtgtaaaatgcacacttatcaagcttgaatactctattttatattgatccaaaataatttacactctagcattatattatgaaaatttgactataagataaacctttggaaatcgtgaaagtagcaagagtgttgtcattcacaaatcaaaaggtttaaagtattgtcattcgcagtggcataatcttctggatgaatgcgtgtaaacagactaattttattgggtttgagatggtgtttgtctttatctgtatatacgttagcttattcaagttttggacatatttggaaatatgtgtagagtataaatgacaagtgaataatgtttccaccatatatagttatatacaatcatatctttattcgttatcttcactaaacatttcaaaatgagaacactcaaacgaaaaaaaaagcatcactcacaagagtcgacgatctaactctatatatcagaaattgtgtcatttgtgttaaggttttggtttttggtaagaaaattttgggaggtgatatagctcaaattgccttaagcttactccctaaaataagagatcgtcattagcacttaaaagtcgaattccattgagccctcgatgttcacacaatagacttatgatgatttcaattaagctagaccaatagattataaaatgagaaataaagaaaagcaataagtattaagatgtaaataagatgggaaagagtcaagtttagggtattctcgggagatagatgattagtagatatagtgatagctaggttgttatggaaccgttcttaaactcaaactctaattgtggaataaccggtggcgttccacgaaactccctgtgcctatagctaagaataactggagaagccgagagaccttatacctaaacatgcattctaaaggagttcgataagttcatcttagtagataagccgattctcattacacacctataaactaggctcatcaaatagttgttctggtaacagatacctatggcgggtatatctattatctggaatcaagttctagttaattactttagaactagcattaagaacaactaaagatgaagaatcctcatataacctagccaaggggcaatctactaaatcatatgaatccctagtgacaagcagactactcagacatggagattggaacaaacaacatgattgagtgagaaagcataaacaaatcaatagagaaaagagttataaaagatctcttcactgttattgaaaatctctaaatgaatctctgaatacaggggatgaatagcttgatgtctcaaaaagaacttgatagaaaactccttcttgtctaaacaataaactttaaaactatatatatgacctaaaagaatgtgcatggattattaatgaaaatagggaaatcttctgggcaattttccaattcttcaaacttaaaagcgtgatggccttctctgggccgcaacttggtgtctatcgactggatcttatagtgaattcgtcctttagcttattttcttcagcttttgctccaaaatgtctcctcatcttcattgttgtccctctccatagaacacctgaaaagactctaaaaagactctaaaaataacaaaaagactcaaacacctatatttaaaacatagttaaaatagggttgtatcataaagctagattggttgcgaaggggttcacacaaaaagaaggtgttgattatactgaaatattctcaccctgttgttaaacatgtttctatcacgtacagtctgtcaatggtagcacatttcaatatggaattgcagtagattgatgtgaacactgtttttt

SEQ ID NO: 35373 - DNA, 4976 bp, Arabidopsis thaliana landsberg
caataacatgtagatatccaagaatagacatgttatgaagtgaacttttattggttttattgaaaatgttgattttcttatagataaaattttgtgtaattttgttagaacatgttttctagagttctatgaaagtaagagtgtatattctacatttttttacacgttttaccaattttagatttgttttctgttcttaataattcagaagtccgaatatcaaatttctaaaatatttgaaacacgcattatacgatttgttctatgctccaaatattttggactaggcattctactaattacttcatcatatgctattgctagaattgtagggggatgtattataaaaatgattttggaaatttttgctttttttgtaaaaaccacacgttatgcaattagtgattttaaaatctcatctcaaattcatgttattgaaattgaaatttatgtaaaatcattttaaatctcatgttattcaatcatgaatttctttaaaccataacaaattgactgttattcaaacaaccaaatttgttttaaaaaatattgaaaaatgatttggtgagcctaagccctaaggatacctttttagtgtaaaaataagaactaaacaatcacacctctagaggtggtatttgatttttttttgaaaagaactaaaaacatgtggctaacgaaactaaactattgaacaatctcctctcactacaagaaaacagtcattttgcgaggaacaattgcgagggaaggaatccctcgcaaacttgcgagggaattgcaggtattttgctacaccacggacgaacgttgctaatccctcgcaaatattgcgagagtctgcttcctcgcaaatttgcgaggaatgtacaagtactttgcaattaacaatatcaaccctcgcaaaccactcgcaacaatctcgcaaatctttaccctaaaccgtaaaatacatagaagtgatttgggatctttgatttttatttataaatgtaaatctaaatgactgtataatcatacaatttgattatatggtgatgcacaaaaacatattgtatatgtttcaatatcgacatttcatattgaagatgttaaacacttattattcatattattgaaaacacataagttcatcattgatgtatttgggaaaaatgcacatttgaattttttgagatgaaattagattctaatgtagatatttaacttcctaatgattcagaataactaatccgaataattttaattagtgttttcttgtattttttcaaattgactcaatattgcgaggtctttgcgagagatttgcaagtctgtcgtagcagttccctcgcaaatatttaccataaaccttaaattatttaaaatatttactcatgtttttatttgctgagagtcttattcgaaataggagaatctaaatcagatctgattcaaacactgaatcaaaatggtgagttaattggttgaagaattgcgagggaattgctagacgcaatcgcacttccctcgcaaattttaccctaaaccctaaattataaaaaatcataaatggcgagggacttgcttggagttctggcaattccctcgcaatatgtggtgcgttttaattggtttaaaaatcttcgtcgcaatttcaaagcaaactgtgcgagggttttgcgaggaaataaatttctatatatactcgaagacctagtttgagcggcgtcaaaccagccgcatcaaaccctaaccctaaattttttcttcttcttctctgatctcttcggcgccggatctcttcttctccgatctgattctgtcgccgcctctcttcttcttcttctctaatctgttatactcatcgccgcctctcttcttctccgatctgattacggcgcagactctcttcgccgcctctcttcttcttcgatctgtattcaaacaccgtcgcgtctcttcttctccgactcgatctgttttgcctcaaaggtaacctctgtttctccgatctaagttcttctctcaaatctaacttattcttcttctttgatcttacttctttttcccagatctaactcttgatttgttttttgtgcaagatgccgtcggataatacttatgtacggtttagacaacaacagcgtgacccgttgcatgtcaattctcctgttagtggtgggaatatctcaggggttcaaggttcaggttcacgttcaggttcaaccgttccaccatcgcctccaacgccaacgactcagccttctgtcaatcattctgatgttcaagctgaccgtctcaacaatctgacactggaagagctcctcgatagtcttggttgtgctggcttgacaaggctagacccaaagcatcctccgggaactctctggtaaggttaagcttatagtctctggaattaggtcttgtaagttggttagttctgccttagaagtttggtcctgccttagaagtctctggatttaggttggttgtacttagcattgtagtttcttagaagtataaagacatagagatccttatgtgttttgttgctgttgttgtaggtttgacaatgactctacagttgcagcaacaatccgcagcatatttgaaagagatttcaaagaacctcatgccaattggttaatgacaccccaacatgtggttgatcgctggtttgaaacttttgctgtaagtccactaaagtctgttttgttgtgtaaagctttttagttgctgtaatattaagtctaagttttgctgtcacttgtgtctgttttgtagcaaatgtataattgggataaagcaataaacaagagagttaagactgagtttgaagcaaagctgaaggagaggatgtgcgatcaagtttctcgctggaagggaaagtggaagctgaaaggagatgaggcaatggcgcggtggcttgatcctgaggagtgggctggtcttgttaggtattggaaagatccgaagtcagagttaaagagtatcaaaagtaggcaagcatgatatcatgatccacagggccttggtatatctaaacaccggtctggccagacctcttacagagcccgggcccgaaaacatgtaagttattttactctcttactttgtcaattttattacttactcaaagaactaaccaagacttgtttctgttgtagtgtgaactcaccggagaaactactccagattttcttgtgctcttagatgagacacatagaaaacctgatggtagtttcattgatggaaaatcagaggagatctacaatgaagtgtcatctaggattcaagaggagacgtctcagctgtgttccgagaacacaacggagagcacagcttcaggcggtttatctgttcaggccaagaacaagatatatgcttcggtaaatttctctctctctctctcttctatatagtttcagctgtgttttgtcctcatttgtttgtgtctgttgatccggtgacttggctttgatgatgttagtaattttctgctttgtttgtgtgttttgtcaacacatttactatagcgacttggctttgtgtttgtcagtttttttctgcctttgtttgtgtgtgtagtcaacgcaattagaatgcattgtaacttggcattgtgttcaatgttttgtcatgaattggtttttgtttgttgtagttgtatttgtcttggcattgttacttagctgtatttgtcgatggtttcattatgtaattggatttgttattgtcttgatttgtttgtctcagttttggttacattatgtaatagtgacttgtttttgtttttggttttgagtttctcttaggtggctccaaagaagaaagggaggatatatggggctggttcattgcagctagaagccgcatcagctcacatcggtccttcagttcctcgagatgatccgggtgaactctctcaaaagctggctgccgctgaagctctcattgcaaaccaagcagagaagattagtagcttccatgtgtacttcgactaccttgcggagaaagatccagactttgctgccatctttcgagctggatcttctaggacagagcctgaaggctccaaccagccacctgagatgccaaatgccacacgaactacagctgctgggatcacaacaactgaagctgttgaagctgaaacagttagggctgaggaggcagttgagactgaggcaaacaacattggatcctctccatctcttgctttctaaaaaacttgcgacactctgtttttatttctctcatctaaaccctaaaacttgcaacactcttttgtatatttattttgtttgcttcataattttatttgaacaccaaagttcagtattaataatatgagtttaggctatcaattaagtttctaattcagtgttaataccaaaaattaatattagattaacctaagaaaataattaagaatataattaagctaaacagaacagtaatcacgtttatctaataattaagaacgttgcaaaaacctagcaagtccatcgcaaaccttgcgaggtatttgctactacgaactctgcaactcgcaactccctcgcaggtttgctacagaaatattaattgcaaatccctcgcaaattttgcgagggatttgctactacgaccgctgcaactcgcaactccctcgcaggtttgctacagaaacatgaattgcaaatccctcgcaaattttgcgaggaattagcaagacagctcatttgcaacgaatttgccacgttttatgtcccttgcaaattgcgagcgtttagcaagacatttattccgtcgcaaaaattgcgagggaattacgactgtttctgatttgcgacgcgcgttttgcgaggaagtgtcgttcgtcacagtttcctcgctaatagcgatttgcgagggattagctacggttgtgtcccttgcaaatgtcatgttttcttgtagtgtagccacgcggtgaacagcgggtctaaaatctagtttgctacacatagccc

SEQ ID NO: 35374 - DNA, 2011 bp, Arabidopsis thaliana landsberg
cctcttatgtctcttgtcattcctgtgttactctcttttcttcataaaacctaaagattcacgagatggccgtgaccttcctccgagccctccttcgcttccaatcatcggtcatcttcacctaattcttctgtctactttaacccacaagtcttttcagagactctcatcaaagtatggacctcttctccatctccgcatcttccacgtacctatagtcctcgcctcctcggcctcagtggcctacgatatcttcagggaccaagacgtgaatgtatcatttcggcattcgcctccgattgaggagtctctctttttggggtcgtatagcttcattagcgctccatatggagattactggaaattcatgaggaagctcatggttaccaagattcttggaccgcaggcactcgagcggtcacgaagattccgtgaagatgagcttgataggttttataaaactctgctcgacaaggcgatgaagaaggagagtgttgagattgttgaggaagcagcgaagctcaataacaacaccatctgcaagatgatcatggggaggagttgttctgaggagaccggtgaggcggagagaatcagaggcttggtgactgaatcaatggctttgacaaagaaaattttcttggcgaccatctttcacaaaccgcttaagaagctcgggatctcacttttcaaaaaggagataatgagtgtttcccgcaagttcgatgagctactagagaagattcttgtggaacacgaagagaaaatggaggagcatcatcaaggtactgatatgatggatgtgttgttggaagcttatcgagacgaaaacgctgagtataaaatcacaagaaaccatatcaagtccttgttcgtggaaacgcccttactaagaaacatatgtgttgtgaaatcgtggaataaaccttaagacgtaaacctttgtattaagcgtgttagtaatacaaaggcccgaaaacctccgatactctttagatatggaaaatactctaataacagtttgctactacaggaacttctcgttgcaggcactgacacctcggcgctagcaacacagtggacaatggcggagctcattaataaccctaccattcttgagagattgcgagaagaaatcgaatcggttgtagggaatacaaggttaattcaagaaactgatctatcaaacctcccttacttgcaatcggtagtcaaagaagggctaagattgcatccgccggcgtctatctcggtaaggatgtcccaagaaaggtgtgaactcggagggttctacataccggagaagacattacttgttgttaatacttatgctataatgagagatcctaatttctgggaagatcccgaggagtttaaacctgagaggtttataacatcttcaagatcagagcaagaggacgagataagagaggaagtcctaaaatacattcctttctcagccggaaggagaggctgtcctggatcgaatctagcttatgtctctctaggaaccgcgattggagtgatggcgcaatgctttgattggagaatcaaaggagagaaagtaaacatgaacgaggctgctggaacattggtgttgactatggctcagcctcttatgtgcactcctggtcctcgaaccctaaaccctttaccttcaagtctgcatgtacccatttcttgatttgggagatgctagcttatttttcgatgttttaatttacctcatgattagagatgattcccgttcattgtgatgttttatttgtattgcatatcataatttaataacttgattaaaccatagtacaatatatgtattgcaagctttattataggtgtatcttctttattgctattggaaaaaaaaaaatcttctatgttgccatattcgtcattattactcttatcacttccaataatctattttttttctttctctcttatcattattatcgtccttggtgccttgagacttgtggtgagaataaattaggaaacactccttgac

SEQ ID NO: 35375 - DNA, 3389 bp, Arabidopsis thaliana landsberg
ccatactccggttcttcatcttcctttcaagctctagaagaactgtttgaggaagctcaaaggaaaatagaagagcaggctgcatataatgagatgagagatgctgcgattgctgcccgagaagctgagtcatcccgagtcacagctgagcaaaaggacaagctcgagcaattgtctttagtcgagaagtatctccgccaaaccgatccgcagttcttggacttcatggcaagtcactctaccacaaccacagaacgtctaccaagtcctccacctaatgatccttagattatctttgcccaaactctacttgaacatatgtttatttgaataagttgtttgtgtaataaacaagataattgtatgtgtatttgtacttgattttctatatatacaagtcttttcatctttttagcatttcaaataaaaaaggagaaaacaagaaacaagaaaacaacaatcgataaccaacaaacaagaaacccaacaatcgatgaccaaattcttattcggacaaaacaagtagtcgctcagtagtcgtatttaggtagcaaattagacgtaaaatagtcgtctaatagtcacactaattaccgattattatccgactaagatacctagtcgcaatataatcgtccacgagacgtataatagtcgtaaaacattatacgactattatatgactacaagaattatttccttacattgatagaattagtcgtcaaatagtcgtcaaatcgtcggaaacaattatacgactataatacgaccacgtgtttcacacgcttcgtacaggacaattaatcgtgctatggtcgttaaatagtcgccaatatgatacgactatacagcgaccattgtttactgattgtgttattgtcgtaatatagtcgtcgatcaacgactaattcacgactatctcattcagcgactatgtaataatgactaacgtcgttagtcgctgattagtcgtattatcattttttacggctactatgcgactgtcgtgtaagtcgtttatcacctgttttcttgtagtgatcctaatggtggtgaacttcttgcaagggagtgctagcgtagagagatctagcgtggagtgcttgaacttgaaatagagttgatccgctggagcagacctatccaagtagcacttcctcttcaaatactccatatcgatgtaggttgctgtgtgagttggggtatgaagaggaactccagcggctattaggatgggcgtgatcactcctccagcacataagcttcctccatagccggattggtggattccggctgcatactccctaaaaccaatcaagtgatcaatcaacaccaccgaaagggacgtatcagccctatccccttccatctctatcccattccttgtgcgtcccaaaatgaagcataaggtgagatcaagcaacttcagctctccctcattaacatggccggttgtcttcttcgggaagaaggcacttgcaatgcaaaggtggagatacctaagcaccgggctccgtatcaacgaactcttggccctagatgacttgtaggggagtggaccggcgattgtcaaccatagatcaaggagctcgtccttgctgaagttttggcggattccatacttggtggggaacttgaaaatagcatccaactgcctaatgggaaccgagtattgaattccaaacaccatgaatgtgatgtaaccaactcccttatgcagctctctctccctttcttcagcatagaaatggagcttcaaagtggataggaattggcagctctcagttttgtatccttcatacttgtaggagaagaaggtctccagcttggccatctccatgaggtagtcaacatctctacatatccccaaagcttgcatggtaggtctatggggatatcttgtcccctcaaaactcagctccatgagatattggtagtgctcttctatggtaggttctttctttctcctcatggtgttccttcttctacttgtaggaactatcgggacctcttcatcaacttgcacatcttcctcagatgcttctttctctatctcaggcactccttcttctgcaactggctcggactcccagaccctcttgcctcttgctatttcctcttgagtagcggcagaacgacccacagaggactccggggccatactcggccattgtactcggcctgtcatccgagtaaaaccaggactcgcagctttctgattccttgactgattcttctcattaatcatctcaaaccctcttgctacggcttgaacagaggctctccttcttgattcttcgggattcatgatcttggggtgatttactgcaggtagtcaccacaaaataaccaaaggtaggtcaaagtagaagagaaattgatgtttaaaaatgaacaaagagtgtaagagaggctttgaaaaggtttgtaacaagagattttggcaaagtttctgagaaatctagagaagtgagagtaagaacttgaaatgtttggagagaaggagtaaaattcgaaatttttgagcaaaaagagagtgtgagtgacttagcttgttgagtgtggttttatagacaagaagatttgatcctagccctccaaacaccttagatcctcacccttcatttggtcaaggggacatgtctcactatttgcagcagaatctttgaagggctttggggagcaggatttgattggtggggcccagcaaattcgaatttgaattgtgttgacttcgcacgtgtgaactcggccgacatactcgacgcgcgtgtcgagtacagtgttgggcctgatgggcttctttttctgactcggcttcgggccgagtgctgcatcttgttgggcctttgaacagtgaggtccatactcgaccttgggccgagtggtgtgggccgagtactattcaatcttgggcctttggtcaattgaagcccacactcggcctgtagccgagtagtacggtcgagtgtggcctgaaattctctagaagtctttttccctgaaacacttaaacaaaaacatcaaaaataacaagaaagcaatatatataaggatagacatgggacttcctcccaagtgagcttgtttaaagtcactaagcttgactctcacaatgtttaggtagagaagagattgaggagaggaactgagaagtcctcatcctcacttgttgaatcctcaaagtttgaatcatactccgcattttctcttgatagctggagtgtggagtactcatttgatctttcctcgaagtaagcctccttctcatcagtactatagtcctcttctccaagatcggtttcctcaaagtattcatcgatctcaggacctgggtaacctttaatcatctccttaagctccaggatagcgtagttcagttcctccat

SEQ ID NO: 35376 - DNA, 5217 bp, Arabidopsis thaliana landsberg
  unsure (1)..(5217): unsure at all n locations
aatcttgcaaaataaatgtccagttgatatccttcactaactccgtacgttatgaacatccagctcagttcgcagattccgcttcagcgtatgttacgaatctccaggtaatcaatgcgtgttattaacttggaatctttccgttaacgaagcaatataaaagggtttctagataactggcctagtgatgggcttttccgctgggtcgggcctttctcaaagccctacacactccaaatgtctcaccaaattgcgggtttggttagcaccagatccgacatccacaatccctttaaaattcattagttctagaacgtgaatcaagcaatgcatcatcaatgaactcatttggctaaggtgaaggtcaagagacaaagatggtcccttaaagaataggttttagtaaaatgagatctctcaagaatgattcagctttagtataatgctaaaggtaagtccctaattatgcatacagagataagatcccatctacccaaagtataacaaatgaagctctaatggtaatccaatctccaatcccaaaataagaacttaactctaccctttgcattcatgaatcttttaaaccctttttcagatcattcttttcttttctcttaactttaagagaagctttctcaacactttgatacttctaacggatttggatttcttttaaaaactaaggttcatgtttttaatctttaaaactaagggctttttacccttcttctttaactgacaagaacctcattctttttttgacattcccaaaacctttactagactttttctaacttctttagcttacttcccctagaattcctttccctttcgttatcaacaatgaactcactattttatttcttttagaaacatcccaacccatacaataagcgcccacctagtcctatctagtcaggataacgcaaactagaactacatgagatactatctttgtcgttacaaacctaacactttctaccaagcttaatcgaaaatagacctcacaaacactcacaagtgatatatggcttgaaagaaggcttaggttagggtatggggaaactgctctaaagatgagagacagctatttggatcaacaagagtggtgaaatgaataagaagatccaaatattttaagggtgaccatgagtttaacaagcaatgcatagtatgataattaaaagtcaaatttatggttcaaattgatagggaatagcttcaaatcacagcgagtttcgactaaggaagatcaagtatatgaattcaaaagatggtgcggttttacttcaagatcaatcggttaagcactacacaactaacaacaagggcattgaaactatctagtgaacattgcaaatttacaaggctatgatcatcattatcccctatgcaagtgcaaaatgcaacaacctatatgataacattcttaaaacagccctattaatgcaaatgcaaactacatgacactctattttttttggaatcattttctgaaatttttcaaatttttatgggttttctatgccttagatgaatgcaaaaatttgaataagaaaacatgaaacaatgttagatacatcttgaaccctcccccaaacttaaattacacagtcccttgtgtaataaaaattcaaagaagaattcaagagaaataaccacacaaagcaagaaataaaagaaatgcaatgatatgtacagtgaaatggagtgatacctcaacatttagacgaagaggttctggacaaactcgtccaggcggtcttgtgtgtactcaggatcacgtgtggaggtgttggggttgttggcgttgtactcggttgaccggtcgagcatgtatcccgagtagtactcctctcggcttgggtcagcgttcaaaaccaactggttcactggaccgggtgggcggctgttgaaacggcgatctgagaaggtggagctcctcccgagctcgtaatttgaggctcttggcgggtcgaaacgagcgtcccttcgcggtgccacactcgttgagttacttctcctaaactcgggtcgaggtggtggtgannnnnnnnnnnnnnnnnnnnnnnnnnnnnnnaccgccatgccatccattgctctcttcatcttcctcaccttcttcttcaacccactgaacaacttcctctgaaacttgcccagacctttgagcattcccaacttcttgtgaacttgaccgggatctctctctggatcggactcagcataatcctcaaagaaaaactgctccgctgcagcttcgcacgaatcttcttgttcattcaactgttcagcttgactgaactcagcttgttcaaactcggcctggctatactcggcctgctaaaagttactcggccgagtataggcttcctgctcagcttcttcttcattccactctgctccttcttcttgagactcacttcctatgctcggctctgcttgtaggggcgcaaggacattgactaagatcgattgaggaggatcaaagtcaatgttgttcccaatccactacaagaaaacagacaaacaacgactacagaaagcaacaacagatgtagtcgtcgtttttggcgactaagtcacgaccgttttacgacacatatacgacaacatgaacattagtacgacacatatacgacaacctgaacattagtagtcaaatagtcgttattttacgactaaatatgttagtcggcaaatactcgtatagtaacgactatttaacgattatattattgaacggagacgtttatcgttacatagtcgcaaatggacgactacaatttccgactgcgacagttagtcgccaaatcggcgactaaaatacgacacatttctgtaatcgtaaaatagtcgcaactgagtcgcagagtagtcgcattaagttgttggaaaacgttttccgcattgccaagtaggtacacctaatttgtttgttgtagtcgtaaattagtcataaaaattcgtctatataataaacgttcacgacaactcttctttcaccaacaaatcaaaacaacaacaacatcaaagagaaaaaaaatatattagttactttattgtataatggagggaacgctacaattatggcggtactggcggtttctatcgagattggatgtacaagagatttgatgaagtgacggggaatttgtcagccgaatacgtcgcaggagttgagcaattcatgacattcgctaatagtcagccaatagtacagagtagtcgaggtaaatttcattgtccttgtagtgtatgcaagaatgaaaaacacatcatctcgggtagaagagttagtagtcatttgtttagtcatggatttatgcctgattattatgtttggtataagcatggagaagaaatgaatatgaatataggaacgagttacacgaataagacgtattttagtgagaatcatgaagaagtgggtaatattgtagaagatccatatgtggatatggtgaccgatgcatttaattttaacgtggggtatgatgataactatcgtcatgatgatagttatcagaatgtggaagaaccggtctgtaaccattcaataagttctacgacttgttagaaggtgcaaataatcctttgtacgatggttgtcgtgaagggcagtcgcaattatccttagcatctcgactcatgcacaacaaagcgaagtataatatgagtgaaaagttggtggactccgtttgcgaaatgtttacagattttttaccagaaggaaaccaggctaccacttcacattaccagaccgagaagttaatgcgcaatttaggacttccatatcatacgattgatgtttgtcagaacaattgtatgctattttggaaagaagacgaaaaagaagatcaatgtcgattttgtggcgcgaaaagatggaagcctaaggacgaccgtcgaagaaccaaagtaccatatagtcgtatgtggtatctacctattggggaccggttgaagagaatgtatcagagccataagacagctgcggcaatgcgatggcatgctgagcaccaatcaaaggagggagaaatgaatcatccttcagatgcagcggagtggagatatttccaagagttacatccccggtttgccgaagaaccccgtaacgtttatctcgggttgtgtactgatgggttcaatcaatttgggatgtctcgtaatcattcgttatggcctgtgatcttgactccatataatttaccccctggtatgtgcatgaatacaaagtacttatttcttaccattctcaattctagaccaaatcatcctcgaggtagtcttgatgtgttcctccaacctcttattgaggagttaaaagagttgtggtctactggagttgatgcgtacgatgtttcattaagtcagaattttaatctaaaagcagtactactctggacgattagggactttccggcgtatagcatgttatcaggatggactactcatggtaagttgtcttgtccagtttccatggaaagtacaaagtctttttatctacccaatggacggaagacatgctggtttgattgtcaccgtagatttcttcctcatggtcatccatcccgtaggaatagaaaagactttttgaaaggaagagatgcttctagcgagtatccaccggagtctttaacagaggagcaagtttattacgagcggttggctagtgtaaatccaccaagaacgaaagatgttggtgggaacggtcatgaaaagaagatgcgaggctatgggaaggaacataattgacacaaggaaagcatcttgtgggagttgtcttacaggaaggacctcaatcttcgacataatattgatgtgatgcatacagagaagaattttcttgacaacatcatgaacactctcttgcgtgttaagggtaaatcaaaagacaatatcatgtcaagaatggatattgagaaattttgttcacggccagacttacatattgatagtaatggtaaggctccatttccagcgtattgattaacagacgaagccaaacagagtttatttcaatgtgtgaaacatgatgttagattttcagattgttattctagcgatttggctagttgtgtagatctggagaatggaaagttttcaggcatgaagagtcatgattgtcttgtttttatggagcgacaacttccaattatctttgttgatctccttgaccggaatgtccaccttgccttatcaggtataatc

SEQ ID NO: 35377 - DNA, 3096 bp, Arabidopsis thaliana landsberg
gcaaatcttgttttcacctatcttttgttagtaaacaagaatatttaatttgagcctcacttggaacgtgataataatatacatcttatcatgattgcatattttgcggatagtttttgcatggggagattaaaggcttaatcaagccttgaatttccgaggggaggaatcatgttttatacttgcaaactatacaaccatctgcatcgataattggtgttaatacatgcaaggattatacactaaaacaaatcatttatgtccttacaaaaagagagtcgactgtgagtcacattctgtgacaaggaaaggtcaagaaccatcgcttttatcatcattctctttgctaacaacttacaaccacacaaacgcaagagttccattctcatggagaagaacatattatgcaaaataatgtatgtcgatcgatagagaaaacgatccacaattattgctccatctcaaaagcttctttagtacacgatacatgtatcatgtaaatagaaatatgaaagatacaatagacgacccattctcataaagatagcaacatttcatgttatgtaaagagtcttccttaggacacatgcattaaaactaaagattaccaacccacttactcctcactccaaccaaatatcaatcatctattttgggccttcactcataagtcaactctcatgccttcctctataaataccgtaccctacgcatcccttagttctacatcacataaaaacaatcatagcaaaaacatatatcctcaaattaattagatctcatctatctctaccctctacatggatcatgaggaaattccatccacgccctcaacgccggcgacaaccccggggactccaggagcgccgctctttggaggattcgaagggaagaggaatggacacaatggtagatacacaccaaagtcacttctcaaaagctgcaaatgtttcagtgttgacaatgaatgggctcttgaagatggaagactccctccggtcacttgctctctccctccccctaacgtttccctctaccgcaaggtacatatgtacacattctcattacaagtacactccatataaatcatgtttccaattcactgagcattgaaccaatacatatatgtgcttgtaaagttgggagcagagtttgttgggacattgatcctgatattcgccggaacagcgacggcgatcgtgaatcagaagacagatggagctgagacgcttattggttgcgccgcctcggctggtctggcggttatgatcgttatattatcgaccggtcacatctccggggcacatctcaatccggctgtaaccattgcctttgctgctctcaaacacttcccttggaaacacgtcagtactttaatcttatttgttttaacacatttttggatgttactgagagaaccacatgaaatctatagacatgcacatgcatgttgtattatgaattaaattttaacatgggtaataaaactatatataaaatctgatcatataaaaggggttctatataattgttatacaaaaaaaatgttggtgtctaaatttatgttaggtgccggtgtatatcggagctcaggtgatggcctccgtgagtgcggcgtttgcactgaaagcagtgtttgaaccaacgatgagcggtggcgtgacggtgccaacggtgggtctcagccaagctttcgccttggaattcattatcagcttcaacctcatgttcgttgtcacagccgtagccaccgacacgagagctgtaacttacataacaactaacttatgaacatgtgaagaatctttgaattttggtcgtgtctgaaaactaatcacaagattacaggtgggagagttggcgggaattgccgtaggagcaacggtcatgcttaacatactcatagctgggtaaataaaccactagagatgtatctaaactaaaccagatctcgtacatgtaatttatacgttttaatgatcatgatgttgtgtacaacagacctgcaacttctgcttcgatgaatcctgtaagaacactaggtccagccattgcagcaaacaattacagagctatttggatttaccttactgccccaatacttggagcgttaattggagcaggaacctacacgattgtgaagttgccagaggaagatgaagcacccaaagaaaggagaagcttcagaagatgaatgaaaaacttgaaaaccatgttactctgtttttgcatcacttatgtgtataatataatatctggggtcaatgatggtaataaaaatgcgaatgtcccttttatcaaaatttgaacagcgtttcatcaaacaaggttttttaaggaaaatatagtaagtagcaagcgattacaacgattactgcttataattcattttgctgatgagatcattgatcttatcttcgcggtttccggtatctcatccttcgctgaaaacttgtttcttccggtgcaaaacatcagccacaggcttgttgagtttcaagggtcccaagaatctcataacttctctgaaatgatctccgactcttgctatctcattcacaaggtcttctatgcccaagattttgtgttctcctagagcctaaggtaacaaaagtggaatcgattaagaacagcatggttattatctggaataagctcctatacttttaagagtaggaaattttacctgttcgattatattgttgtcggtaagaggaacaggatttccctcaatgattgtgcatccctttttgtatataaggtccttaacactcttatcattcgggtatcttcaagagtcgtaaacatcggttagctcataagagaatagagaaacagcatggaaatcgagtaacaaggaaatattgaaagaggattgattgtctctacgtacccataagtgacataaggctgcactttgagaagcttttggaacaaactgtcagttgctttggcaaatacaccagtaaagacgctctttagttgcaaattgttaagaatcctcttggtctttgggtgcatatcattcttgctggtcaccagaaagaaaaggcaaggataagaaacaggcagagataaagattaaaactccagggg

SEQ ID NO: 35378 - DNA, 837 bp, Arabidopsis thaliana landsberg
ccagcccgaaacacgctttggctgtacacagccactctccacttcttttcttttcttcttcttcctgtttctaacacttagacaagatattagtacacaaaaccaaagtactaaggcttagaaacgtacctttacttgtgatttgcactttgttcaaccatgggcacatttaagcacttgtgtttgcactcaatcaccaaaatacttagaaatggtccaaaggcacatttccctttcagtttgtttaacagatttttggacatagttatatagaagttgcaatcacaccagaccagacgttgcaattacaccagaccagcagttgcaattatattttttaacaaaatttctcagagttattcactacttgcaatcacataagagcaactcagcagttgcatccacactacaccagcagttgcaattacaacacaccatcggttgcaatcattttgtttacattttttaacagatatttgagtagaattatacagcagttgcaatcacacctaatgcgggattgcaatcacaccacaccagcagttgcaattacacctctttgtcctgacactaaaaccagccaactttgcatagtcaagataaaagaggtaggcttcttcccttgtatcaaatgtttgccgcaccctggggacaaacacatcaagtatgtttgcatcctgcagaacaacacgcaatcatgagtttgcaattagcggatacccatagttgcaatcaacaagcaacaaacgttgcaactggagtaacaacacagcatgcaatggtaatcaaggagtaaaaacagagatttaagtttgcaattagaggatactcacggca

SEQ ID NO: 35379 - DNA, 6507 bp, Arabidopsis thaliana landsberg
cttgtactaaagcaagatgaaacggttagggttgggagccgcagatcagtcagacctgcttagtaggatccggctggctcaggaacgggacaaggagataaaaagatgggcactaaacaacaagaccgagtaccaaacctcgaacaatggtacaatcgtggtgaacgatcgagtatgtgtgccgaacaaaagggcattaaaggaggagatcctaagagaggcacatcaatcgaagttctcaatccatcctgggttcaaccagatgtactgcgaccttaaaaggtactaccattgggtaggaatgaagaaagacgtggccagatgggtggccaagtgcccgacttgtcaactggtcaaggcggagcatcaagtaccaggtgggttgttacaaaacctacctataccggaatggaagtgggaccacataacgatggacttcgtcactggactgtcaacggggatcaagtccaaacacaatgcggtatgggtttgtggtagaccgattgactaagtctgcgcacttcatggcgatctcggataaggatggagcagaaatcattgccgagaagtatatagacaagatcgtgcggttacatgggattccggttagtatagtgtcggaccgagacacaagattcacgtcaaagttttggaaggcttttcaaaaggccttaggaactcgagtgaacctaagtactgcctatcacccacagtcggacggacagtccgaacgaacgattcaaaccctcgaggacatgagggcatgcttcttgaattggggaggaaactgggagaaatatctaaggttagtagagtttgcatacaataacagttttcaagctagtataggtatgtctccctatgaggcgttgtttggcagagcttgtagaacaccgttgtgttggacgccaatgggcgaacatcggttgttcggacctacaatcgtggaagaaaccacggagagaatgaagttcttaaaaatcaagttaatggaagccacagatcgacagaaaagctacgccaacaagcgtcgaaaggaattggcattccaagtaggagatttggtgtacttaaaggcgatgacctacaaaggggcgattcacctcaaggaaaaagttaagcccaaggtatgttggctcgtacaaggtgatccaacgagtaggggcggtggcatacaaacttgaccttcctccaaaactaaacgcgtttcacaacgtctttcatgtatcacaactacggaagtgtttaagtgatcaggaagatgtacctctcgggtaaaggagaacatgacggtggaagcatggccggtacggatcattgaccgaatgaagaaagggactcagggaaaatcaagggatttgttaaaatcttgtggaattatggaggccgtgaaaaatacacttgggaaaccaagaataagatgaaggccaattttctggagtggttcaaggagatgggtaaagatcaacttgatgcggattcggggacaaatccaattcaagggggggagacttgtaacgcccgcgatcctcaataggatcgttgtctaggacttggtcaaagagaagaaggtggagtctcggacaagtgagaaggagctgaccataagctcggacaaaggggaaatcatgcaggctaagctaggatcgtaaagaaatcacttgggtcagctcgcccaaagctcaagctcagctggaaggagtgacggttactcaggtcgagtgacagtccagctcgggcaactggacgagtgacggttgagctcgaggtagctggacgagtgacggttgagctcgaggtagctggtcgagtgacggactagctgggcggttatgggcgaacggttgcttgcccaactgggtggataagggcgaagagatacaaatcttcggaaaggtgcaactcttcggaagggcgcaactcttcggaaaggtgcaactcttcggaaaggtgcaaggaacggatgtgttgattcgggaagcatccattcgccccctataaggaagggcgcccaggaccattccactcaccacaacacaccgaaaacacaagaaaactcaccattaaaactctctccctcttgggagaataaatagtcttaggattcggtagccgggctgtggccggcaataaagaaggagggtcggattgacctaacctcgagaaggaaggtaagggatcctagactttgagtctaagggttctaggatgtgagttagtagtcggatccttgaacggatcgactagagggctgggtagtatccgggtcatgtagcatcctacacaagactcggtccgggtagggatcggctgaagtggggacgcggctcggcggaggaccggtgggtcttaactgacctgccgagaatcggccggactgatgcatgagcttcccctctctgaatcctctccatggatccgagtagtgtatggcatatagagcattgcatggacttgcatatgactaagtaaatgagattacttatggctctatgactttcaggaacgaatggtgatcgtgggaaggacttggcttaggcgcgagagactcaaggccgggatgatgggtggtgataattcggataatctagggatcgattatatgacttgtaatagcttatatgcaaactcataggttgtatcgaatcctttgcttaatcaataaagtatccgattgtttgtttactctattcgtctcatatattgaatcacggaatcatatggaacggattagacaaggaaagaacctcataaacggatagggccgagtcacttagtggcttgggtcgagagaactcgcccggactttaggcagtccggatcggggcctttcagatgttctagacagcagcaaatatgtaacaaaattataatgcgaaagggccaaagctctgtcttatttatataaaacaaatgttatagaacatatgagaaaacttacaggtgaactagtgccttctccatgctctaaatcctgcgtaatatatacacaatcatgttacggttatgtatttaaactagatattgacatgcggtacaccgcgggttgattattttcatttgaaatacatttatctttttaatttaatatcatctatatttatttgttatattttgaatttatcatcttaatttttatatctatttatttttgatattatattagtatttgtttggtctgattttgtttaattaaaaaaatctttttactatacgcattactatatagagtgtattttaacggtgcgttttatatagaatttcttttgctaaaataaaagtactataataaaaatgtatatatagatatagatatcactcgcggttaggagtgtcaaaatgagtcaaaattcatgggtcaactcaactcaactcaacccgtgaaccctaatgagttcagaattttgactcaaatgagttgatgagtcaaatgagttgatgagtcaattggtttgatgagtaaaatgagttggattgtaatggttaatggtttcaatggtttacccaattaacccatcaagttttgtaaaattgaattaaaccaactaaaatctctaaaccaatgccaatttaagtttaaccaacacaactaaaccaatctaataaaattaatatttttccaaatttcttaaatatacaagcgataaattgagaaaaagtaaactcgtaatttttccaccaacaaacataaactggtaattttcccgccaaaaaacataaacccgtgatttttccgcaaaaacgtaaacccgtgattgtcccgccaaaaacgaaaacccgtgattttcccgccaaaaaaaataaacccgtgattttcccgccaaaaacgtaaacccgtgattttcccgccaaaaacgtaaacccgtgattttcccgccaaaaacgtatatccgtgattttctcgctaaaaacgtaaacccgtaattttcccgccaaaaacgtaaatccgtaaacggtagaatctgtaaatattctaagtttgatgataatgaattaataattattaataatgataatttttattattgttttataataataattaattaaattattatttaaatgggttaacccatttaacaactcaacctatcaaattaaatgagttatgggttgacccaacccatttaacaaaatgagttggattaacccataactcatttaaccctaaactcatttgattatgagttgagttacctattttgacacccctaattatatataacaactttatctttaaatatccatatatttcttagatgatatttttgtgctcaaacgttagtaagttactaacatacatcatctggtaacaacgattgtatatggcaccgacgttggataaaatcaagggaaatttgtaagtataacctaaaaaaatttagtaatttggaaactaacacttcaaaaaccataaggtgatattgtgtatattatatgtaataaatacaattataccatcttcttcttctttcttctgcatgaacatcttctctcttctttctttttttcttccactaccaccacaaccaccactacctttaaagccattgtcgccggaaaatcgtatccgaagccaccatcgccgaaaaatcgtcaccggagccatcatcaccggaaaatcgtcaccgaagccatcgtcaccattgtactattctattttgctgctagatttttgaaaattgaaacttgagatgatttcatttcgtttaatgatttttgtttgggttccatgtatagtatcttagggtttagttttcttaaatcaatatatatttgtaattatctttttgtcaccggcaccgccattgtagtcaccatcgccactgacaccgccattgttgccgtcaccatcaccaccggcaccgccactgttgtcgtcaccatcgccaccggcaccgccactgttgtcttactatcgccatcggcaccgtcactgttatcatcactattaccatcggcaccgccactgttgtcgtcatcatcaccatcggtactgtcattgttactattaccatcatcgccatcttcgccaccatcacgctagccaacacttttctcttttatgtatgtccataaaccgaaaagagtgtcaaggatcacgtcactcttcttctcttttcacgcgcgtgttctcatgttttaatgaggagttacttaactttttatccctctctagtgttatttacttagttttatatatcaaagtgctatattcttaaatagattatcaaacatggtcatttctgcaaatcacccatgttataatgacaacaaacaatttagttttgtaaataataatgtgtatgacgtggcagttgtgagtcattgattatcgagaagcctcttctctagtcagagggtccaacgtgaaaaataaatgttccccttaaattaaattaaatgcgaaagacggatctttcaattgaagattctttctttgaattcgagattgaacccgacccggatccgaatccgaatccaaatccaacgccagctctcaacccacatcggtgcttcaattcgcaattgccgtcatcaatctctgttgttttaccggaagaaacatctaaacaatcattcgaaaaattcgaactttttattcccctcgatatacgatttgattttgtatgattttgatccctggatcagagatttcgtcagagtttgtggaatttggtttaatcgacgagaagcaataatggaaattgggtttctcgagagtgaaggatgatcagagaagaagacttgaactttcaaaggattaatctcaacaatcatgtggctttcctttttttaagacccaaatatcgattctccttagctgaattcaggttttaatttgataacaatgtttcaaatttagtggataaggattagaggttcatctagttttacatttatttgaatcatcaagacttgttgcaggcttgagacaacatcatcaccacaatggattaagagatataaacactttcagattatccattaagattcaaccataaacacttgtccatttgaccataagcatttgttcatagaaaacaaaagaaagttaccaaaacacatgaaaaaatgatacaatattctgttaacataagcagatttaagtagaccattactcttattttttaaaacaagataagctaattaaacaatcattaccttatcttttaaagctaatttttaatgaaaagagacatgtagagtaaaaaaacaaaacagagttgtgtggtaatgatattggcagccatgtaactaatgtgaagtttataacactaaggtgaaattatgaacacagagtttagcatttgatatataaaaggagtttaggctacacacctagataaagaactggttaatcccaagagagttggagtaacagtaatatcagaattgttgatcatcacttcctctttcaaagcaatatttgtgagtctcatccatcatttttttgcataggaacaacaaagctaaaacaacaaaactccaaaaccccaagaacaa

SEQ ID NO: 35380 - DNA, 1787 bp, Arabidopsis thaliana landsberg
agctgtgattgtttttacgtaaaaaccacgtttgcttttccgttggcgtttataatgctgcaaacgcaactaccaattaggcctgaatgataatctgctatcatggtcttgaaactactcgcaaaccaaacattgaattatgttttgtgagagaaattgaaataaagatggaaatgtagagaatacttgtcgaagtagaaggcgaacggagccataacaacggtggcaactccgtgacggtagacggaaagaacgtaaatgctcatgcctttgtttaggacatcctttgtaagaatatccattcctgcataccctatttgcaacaataccattaaaatgaatggtagtgccttcttcatacatgccatctctgcaagatcatttagaggatttcaacaaaaaatagaggaaagaggctgaaaataatcgatggaagagataagggggagagagaaagaaaaaaaagtaagtggaaacattagaaaaaaaaaattcaatggcacaaatagtaaataaacaaagattttgagagttagaaaatcttctacatagtgttgcacagtaaaacatgcctattttctaatttaaatattgaaactgcccaaattcctaattaagttttaagaaaacagtctattttgaaaatttcccaaatatattatcacataatatgtcaatatgtgtgtaattttgtattatttgtttgttatatactttgaggcaagatgccaaatcctacctgaaatgctagtgctgtggactcacctatttaacttgacctaagtcgaacgcacgttgtatcaatattctctcattttctctatctaactagtagtaacgttatggaagtaaacagttggttcttaatagcacaagtacttcgtttgtccgtctgtagaacaaaaggcgacgatgtcagaagaaacttagatgtgactttgtacccacaaaaaaaaaacagatgtgacagaaattttaagaggacaagattttcacgtttttctaaagattctcgatcgacccgaaacaataatggacaatgagtaagaaattatgaaaaatgtttgagtaacagtttttaaacatatgaagttttcaattcttaatcgtttgttatgtggttgtgaattacagtaaattaattaaattaatacggatcggtagaaactctcagttacgtaaaataatattatgttgccacgtcaaggattagacagaagatttgcttaaatctctagctgatgcccacatgtacgtggtagggtatgcatatctaatattaattgagaaatcagtaaatccaaataattaaattaaaaaaatcgataacaaatcttttaaatgattattatataaatatagataattcagtttgttaccacttgaatggataacagatctttcaagtgctagaaatggatcagaaacacccataaaactagaccgataaactcttaattgatcaattaaaccccaaaactgagctgtgtaaacaaattcaaataggaaatcatgtaagaaaaaggtagacgaagtccaatgagagatttatcaaatataattcggaggacattcagcgcaagaatgaagtacgtcaacaaccaaccggcgttgaaaagtgtttcgctgttttgctcttcaatcgtatttgagagacttttttttggataaagtcaagtgcttgatatagaaacggcgtctgaatacttaaactagcagcaaaacaaagaagtgctaataggtgagaaattaaatctttggggaagtggataggaggaaacaaatgt

SEQ ID NO: 35381 - DNA, 2215 bp, Arabidopsis thaliana landsberg
  unsure (1)..(2215): unsure at all n locations
cggagagtccggtgtaccaccgacggtccggtgaattatagccatacgccgccaaacttttcccgagagtggccagttcaccggagttcagcctggtgtccggtgcaccaccggacagtccggtgtgccagactaagcagagttttggctgcactgagctaagactttttgcaattcttttctcgctgtttctagcacttagacagaatatgttagtactcaaaacaatgtactaagtctagaaacgtaccttgttacatgatttgcacttcttgcttgtttggcacctaagaacttaaagattatgtgttgggcacttaatcaccaaaacattatagaaatggcccaaaggacatttcctttcaatctcccctttttggtgatttatgccaacacctcaaaaagcaaccaaaataagggcaatatcaatgcaaatgaggaccaaattgtttttgactctaatttggcatatttggatcattctttgccaccacttggtttgtatttgcaaatcaaatcctttttcctatctctaagtcaaacacacttgtttgggcaaatcaagatatattccaatggaaaaattgatcaagtaccaaaaactccccctttttcccataatcaaaaattctcccccataagagaccaaattttgcaataagagtattttggacaaatcaaaagttctaactctattgttttcaaaattcacaagtggtagctgatccatttgctttggnnnnnnnnnnnnnnnnnnnnnnnnnnngcaccaaaacgggatcaatcttggcccttaaacccattgtctcaccaaaatcttcaaataagaataaaaggcaataagagtatggagatgaacttggagtaagttaccctctcatcagagtgcagtggaagtctttcatggtccaagtccatctttccctttcaatccacctttgagactaaatcaagcaagctcaaacacatggttagtctcaaagggtcaagttgtagcacatctccccctaaatatgtgcatcacttgcaaatggacttgtgaggtccggggagtgcttgtacaacttgagcaccacaaataaacaacaaaatgcataaggaacatgatcaaggcataaaaacacatgtatgctataaatcaatccaagttccgcgaatctaagacatttagctcactacgcagtctgcaaaaggtcttctcatctagaggcttggtaaagatatcggctagctggttctcggtgctaacatgaaacacttcgatatctcccttttgctggtggtctctcaaaaagtgatgccagatgtcaatgtgctttgtgcggctgtgctcaacaggattttccgctattcagatagcactctcattgtcacataggagtgggactttgctcagattgtagccaaaagtcccggaggtttgcctcatccaaagtagttgcgcacaacactgtcctgcggcaatgtactcggcctcagcggtggatagggcaacgaaagtttgtttcttagagttccatgacaccagggaccttcctaagaattggcacgtccctgatgtactcttcctatcgaccttacatccagcatagtcggaatctgagtatccaatcaagtcaaagttagacccctatggataccagatcccaaagcaaggcgtaggacttaaatatcgaagaattcgcttcaccgccactaagtgacattctcttaggatcagattgaaatctagcacacatgcatacgctaagcataatatccggtctactagcacataaataaagtaaagaccctatcatagaccggtatgccttttgatcaacggacttacctcctttgttgaggtcggtgtgtccgtcggttcccatttgtaacacccctggtgttattataactaaaacttgagcatgacatcataagcattggcattgcatatgtttgatacatctagagtgcattcactacgcaaaaatttcaaacaagttgtattgtttaagtgtttttgcaaatagaaccttggataggaaacttaaccctaaatagggattaaaggggtaaaacttaacccaagttgagaaaacctaaagactttagggaaatcgttataaaatatccccaaaaataaagttgaatcacatttatacccctgggataccagaaaccctaattggaaccctcgaaaaccctaaaattaaaccctaggggcctatgtgca

SEQ ID NO: 35382 - DNA, 2045 bp, Arabidopsis thaliana landsberg
ttgtttctctgttttgtatattactataattcatatcctctgtttctgcagaagaaagagaagagacgttggttatttagaaaatctacgaatcatgactctccgatgaagatctccggcgccggaaaagacgctccggcactgaaatccacagaaacaacgacgatcatcaacccaaccgctttatcctctgttacagaacagaggtacgacgcatctacaccgccggccaccgtctccgccgcatcggaaactcatcctccttcgacaacgaaggagttaccaaatcttacaagacgtacttataccgcaagagaagattacgcagctgttgtaattcaaactggtttcagaggctatttggtgagcaaaattctcccttaactacatttgattagttagtaattaaacaggttttggatttaactttgaattatataggcaagaagagcattaagagcattgaaagggcttgtgaagttacaagcactagttagaggtcacaatgtgaggaagcaagcaaagatgactttaaggtgtatgcaagctctagttcgagtccaatctcgtgtgcttgaccaacgcaaacgcttgtctcatgacggtagtcgcaaatccgcgttcagtgactctcacgctgtttttgaatctcgctatcttcaagatttgtcagatcgacaatccatggttagtatagcctcctaggccttgcctaaactatagcataatcaattgatatgttttttagttatagacatgttttgctttttagtttattcataaggttaagctgtttttagcatgcctatctagttcaaatggtgcattcacataggtgtgccttgattatttctttactcttaggtatacatattttgtatatttttcaatctttaagcaattctgtttttgttaattgtaaattgcgtttgtaatttcatatggtggctaacgtcttttggaattatggttatttatttgttgtagtcaagagaaggaagcagcgccgcggaagattgggatgaccgaccacacacgatagacgcagtgaaagtgatgctacaacggagacgggacacagcattgagacatgacaagactaatttgtcacaagctttctctcaaaaggtaaaattaattaaaccggcatatagtctgttatatatattgagcttgttgataacatcgtttcgtttcaatggaaagatgtggaggacggttggtaaccaatccacggaaggacaccacgaggtagaacttgaagaggaaaggccaaaatggcttgaccggtggatggctactagaccgtgggataaacgagctagtagtggagcttcggttgaccaaagggtttcagttaaaaccgttgaaatcgacacttctcagccttactcaagaacaggagcaggaagcccgagtcgtggccaaagacctagttccccatcaagaactagccaccattaccaatcccgcaataatttctcagccactccatctccggctaagtctagaccaatacttattcggtcagctagtccacggtgccagagagacccgagggaagaccgtgaccgagcagcttatagttatacatcaaacacaccaagcttgagatccaattatagtttcacagctaggagtggatgtagcattagtaccacaatggttaataatgcatcattgttgcctaattacatggcgagtacagagtcagctaaagcgaggatccggtctcatagtgcaccgaggcaacggccctcaactcccgagagggaccgtgcgggtttggtcaagaaacggctctcgtatccggtaccaccgccagcggagtatgaggacaataatagcttaaggagtccaagctttaagagtgtggctggttcacattttggtggaatgttagagcagcaatcgaattactcttcatgttgcactgagtctaacggtgttgagatctctccagcttctactagtgactttaggaattggcttagatgattggtggtgctgccaaatcaactgtcaagatctttaatcatcaaaca

SEQ ID NO: 35383 - DNA, 1298 bp, Arabidopsis thaliana landsberg
ctcaagattaggataacctatatgagcaacaaaatatggagaggaattctgtaaacagtccgaattagctttcaatgtatagtttgtacttcaattttggtgacgcctactaaacagtaaacacaccataaatcgacacaaactacctgtaagcttttactgactatcaaattaattcaaatagatttgaaccgcaaatcagaatgatgtaagtaagctagaactcaaaacgaataaaacaaatcatagaagttgacttctgcatgatatacaaaacttggttgaagtccaaaacaataaattcagcctatcaaaataaatggcctagtatgagtagcccaatgcatcaaatgggcttttcaacattgggatatgcgactgggttggtggcatgcccatctgtgtaaaacctatattatcctaatctctgagaaacataaaatagtattttcatcagaagttgaaattatagccgttgtaagctcatataatggacgaatatagtaatattgagaatcactaaaagtctctgttccgtcgcttttattgtccaattgcagtgactcagattctctgctcaactctccgctcctccaccataaaagagataaacaaaaagcctactaatacttaaaaagcctactaatctactatatgattagtttttgattactagtaattgtgtcgccaaaatcaacatgttaatagtaaacagaggatgtgatgagtttacgattagagggtgttgattgttttaataagaaactgatcgaccgttatgactggatcgccttatagaggtattatcatctgggtcgcatgtgatcgtctcactcgttttcgggatgatcaaaggtaacttccgcagttccgatgtttacttttctctaaccaaaattgtataaaaatgaataaaatacattgaatcctacaaagcgatgactcattcttgcagtatctccgtaaaacgctgtcgtttcataaatatcactgtccaccaccacaaagaccacctatctcattcgctgatgaaatttccgttatcttacaaacaaatgaaatttatcaaaattgttttctctcacttgtgttaatcagacaactatattattgcccagaatcatacaagcgacatagtactaggaatattttcgcagaagaaatatccaaagttgatgatttatctgagtaaactaacaattataaaagttattaatcaaaaatgaaaaaaagaagtaaagaatgatattttcctttataattatgagagcaccaatgtcatgtcggtaaaactcccc

SEQ ID NO: 35384 - DNA, 2408 bp, Arabidopsis thaliana landsberg
tatgcaaactcataagttgtattgaatcctttgcttaattaataaagatcagattgtttgtttactctattcgttccatacattgaatcatagaatcgtatgaaatagatttcactagagaatgaacctcataatcggttagggtcaagccacttagtgatttgggtcgggagatctcgcccggacttaggcaggacggatcggggcctttcaaggtctctacaaactgaaagaaaactcaacaaacaattttttggtgtccataataacaagttcatttagatatatccatccggaaacctttttactgatctatatccattctatatatcatttccataataacaagagattcgattaaccagaatctcgatgctacgtagatgaaatgagttttacccatgagagagagagcaaaactcaaatcaaaccgccattgttgaagaagaagaattttcttagagaactgaatctcaaatttatttcaaaacaaaaatttaaattgcaaaataaatcttaatcttaaagaaaccaatggctcatactctccaattaagataaatttttatttggcttgagattgaaattgaaaaccaaaaattatattactagagacaaaaagagcttccttgttcactttgttcatagttttacaaaagctttgaaaatatcttctcatttcaagttcaagttcgattcttctatagagtaacctcgatccctcaacatctgaagcaccgtgcgacgcaccttgaaaagcctcgtgatttcatcatccatgtccgccattccttccaaagttttgattttttgttcttttgccggcgaggaagaatgagattagtgaggttttagggtttatggcactcataaataatggtgatatagcatgttattatatttaatggtttggatcttcagttatatgagatgaatttcttaaatacgatacgatgaatttctttaggtaatatagactgagactgagatacttgtccatgatcatatatatctcagaccttgagccataaaattgccttaaaaatcaaaagagacgagaaacaaagtgtaaataatctcactaaaaaaacatgggaaagggtttttcgctatttatcacaaaaggaacaaaactgagaggaaaagagataacaaacaatgtctactattgtctatagcctatcttttcctcatttgttactattactttacgccatatacaacaacatgtggattacatatatgtataagattatagtccttattcatatcttgtacattgtctttgcttcagttatgcgttgtgtccatttctttcttgtctctttttgccgccattgttgaagaagaaaaagtttcttaaagaactgaatctcaaatttatgtcaaaacaaagatttaaattgcaaaataaatcacaatcttaaagaaaccaagggcttgtactctccaattaagataatttcttctttggcttgagattgaaattaaaaaccaaaaatcaaattaccagagccacccatttgctcaagacggtggaggagcccgtgatggagttggtggcggataccgcagtggaggcggtaatgaagacggagatggtggcggaaatggaggacgcgatggtggttacgagagatatagcagaggttacagatctggtggaggttgtgctggaaaaggatacggtggtggtggtcgtgagggaggtggctaaggaggaggtgaaactggaagttacggaggaagcggagtggaggttggtaatcaaagatagtcttgtttattgtcaccgttagattgttgagagatagagaagatgatgataaactctataagattcaaatttgaatttgaattttgaatattgaggttgtcctataatatctgattttgattctagaacaacagagagatgaagaagagaagttttcgtaagaaagatgacgaagaaaagaaaaaatgttgctaaagagaaagagaaaataggtttgagggtaaattagacaatttaacaaggcaaagtgtcttctcctttgaaaatgctcaaaacgacaaatatttttgtaaaagtgtccgacagtgtaatattctgtaaacggataccatgaatggactctttgccatgagtcaatcagttatttcgcttattactgatgacgacttcgagaaagttacaaaacattatagtagaaatataagtttgcatgtagattttgtcaaaagataggcatttgaataacacacaaaagatgagattggagttattactccggtaatcgataccttcatcaaatttaccaagtctctcttatgtggagcaaattatcatgttcccttgatgcgtcttgctagtctgggaagcaaacattcaatacgtacattatttggtagctttaattctattt

SEQ ID NO: 35385 - DNA, 2582 bp, Arabidopsis thaliana landsberg
tccctgtgcctgctccatgctcttgaaaaataaattcaaaatattacgtacttgtcatttatattcgaataattaacatatagtactttatatttcaattaacttaaccatacctgtggacgtatttggtacagtactgttcgactgtgacttagcattttgacgctttttccaaatagctgcaaacgctgacgcgagaactgcaaaggcggaggcgaacgtaacgccaagaatgagtggtaatttgttattcttcttccctccactgctttttgccccacctaaagtcgtcatataaaggcgtcacgacatgcacaaaagaaaaacttttctaaaccttatctaaaatttgaaaattaattgagatatatctaaatttagtaatttattaaatgtgctgagataaagtggcaaagaatgatccaatcaaatgattaaatttcatatcctcactgtttaatttttatgtatatgaacttaaaaaaaaaaaaaaaaaaaaaaaatcagtataatctctgctagaaaataatagataccatttactaaaataaattaacagaaaatatatatatatttaatattgtatataaaaacctagtgttgttaaagggtactaaatatctatgttatccatgtaggttagaggtatatccgatatctttagactttaggtacatagtgtaccattttttatttcccgaaaattctatttggtgtgctaattttcaatttgtgataactaaaaatcattaaaaaaattttaaaaaacaccaaagttaaataacttaataacaataaagagaaatgtatatagagatttgagtaaaaaccttttcccaaattttttgcttgtttcgctcctccagaaccttcattcattacattataaaatgaaaataattagtatcatccaaagcatttcatactttagatttaatcaagttgattttttctttctttgcattgagatcattccttcctaattattgtccactaaactcaacatcaatttttcatgttcgagtttggttatttatttataacttgacaaattatcgttatttaattacttgaattaactatttatagtttttatgtattggtccaataataaattaactaaccttccgaatcatccgtactaccgccgccttggtctccaccgccgcctccactgtctggactggtattacttatcgagtacagctccaatccgttgatgaggggtggcaaaacggagtcatccgttgactgaaagactatctgggacgccgatgtggccactacatctctcaaaatgaattgagttgctttcccaaaaaaccggtacgatgggacgcgaacccacttgagtgttgtccaagaaaacgttgaacgatcgtctctgggttcgacctagactttgaggctctgagaagtaaagaaccaagtatactggtactccggttaggggtagagtctggtctgagagtactaagccgactcctgataatgcctttgacataacaatctctggtggcttgttcgacgccccggtgatgtctattgatggggctgaggtcgttagatcggtcagtgtggagtcttgggatcctaacgctaaccataccctaccgtaggggtctaacgggtagctaaatatatatcaagaaaccaacaatatgaaaatatattaattacgcaataatatcacattgaaagaaagttgtcctttctaattgatacaattctaaaaatgcaaattgacgttatacaaacttttatatatgaattaataaattttgtctagacgtagggtaaaaactatatgcctaatgaaatattagcaatggattgcagatttaaaggtttaaagaaaattaaagtcaacgaaaagacatcatataaaacttttaatactatgattattagatgcatatactgataaaaaaattctagtaaaagctttgtgtatcagtataccttataagctctttggcaccgtatgcaattctgtcgtggagaatgagaccttcgttaggaccaagatcgtcgtacatgccagtgtccaaactataaacttcaatggacgatataaatgggttgtcggacggagacgtacgtaagagacagacgctgatattcttattctccggaacatatatcacctccgagaaatagaacgtttcttcatcatttagcaacgactcagtaattacaatagaatcacggtgtttcccgtcataaatcacatcaaaagatggcggcgagaacttcgcgtcgtagttctcatagtaaaacttcgtcctcacgagggttttctggccttttgtcaccggaatgttggtgtagcagttggtttgaccagttgggaagtaccggagagtgttgattggctttttgacaacgtccggaatcttcatgggctcgccgttggtgacgaagcctttatctccgacccatgttacattgttggagtccaccgtagatccggatgatccacagtcgatgcttatacctaacgataggccaaaccaaataaaaaaaaacgttgagtagacttgaaataaaatttcattgggtcatcaaattaaagtattaat

SEQ ID NO: 35386 - DNA, 4488 bp, Arabidopsis thaliana landsberg
  unsure (1)..(4488): unsure at all n locations
cctacttgagtatgtttatgattctgagcctaaaaaaggacgtagaccggatcctgctttcttcgcttgtgttttatctccaactcggtatgattcgcttatctagtttcttctagtgtttactttgtttgctcattcttattattggtttcgattcttctgtttgattctatctccagagaacttgcaatccagattgctgaacagtttgaagctcttggtgctgatataagtcttaggtgtgctgtggtaagctcatgtttacagcaatttatgtcttcctgctaacaagtattgtatggatttaaaccgaaaatgttacctaatttttgtgccagcttgttggaggtatagacaggatgcaacaaactattgctcttgggaaacggcctcatgttattgtacgctttctgttctaattgttttagcctcagcctcagcacttatccgaatctagtactaagtatggtatgttgtttcataggttgcaacacctggtcgtctttgggatcatatgtctgatacaaaaggcttttctctgaaatcattgaaatatctggtaaatttatgcttatatttgttggtcttctacgtttcggtgtaatgtgttcttagttcgtatcattttggtatttactttacattattcaacaggttcttgatgaagcagatagactgttgaatgaagattttgagaaatctcttaaccagattttggaagagatccctcgtgagcggaaaacatttcttttttcagcgactatgactaaaaaggtaggaaccttgcttgagagtgttgtcattttgatcgatcaaagtgtcactctataatcttttggagtggaagattaaaaaggaacaacgggttaatctcactgaatttgttttggctttttaggttcgaaaacttcaaagggcatgtttgaggaatcctgtgaaggtatggagacactaaatgactggaattattcttgtcacagctatcatattttgaggttataaccgttgttaatttgttggttttcttcagattgaagctgcctccaaatattccactgtcgatactcttaagcagcagtatcggtttgttgccgctaaatacaaggtaccttatttacatcacagagcggggtagatagatagtagcaatcacataagagagttttatcttttttgactataatggccctaatttcatcactgtgacaggattgctatctggtatacattctgagtgaaatgcctgaatcaacatctatgattttcacccgaacatgtgatggtactcgctttctggctttggtgcttcggagccttggttttagagctattcctatcagtggtcaaatgactcaggtaaatgatatgctcctatctctgaacattgctcgaccttttctctcaaaattttctcatttttttttaaatgttcacagtcaaagagactgggagctttaaataagttcaaagcaggggaatgtaatatcttggtttgtaccgatgtggctagtagagggctcgatatcccatcagttgatgtggttatcaattatgatattcccacaaattcaaaggttagcccttgttctgtcttcagatgaatagtttttttgtttcttgtgtctcatgaatccatgatcttgagaaccggcattgattttccaaatctggcttataggattacatccatagagtaggaagaaccgctcgtgctggacgttctggtgttgggatatcacttgtaaaccagtatgagctcgaatggtatatacaaatagaaaaactcattggtaagtaaaaaaactattggatacatttttattgtttgattctatcatggagacagacatgactatttgttgacattcaggcaagaaactacctgaatatcccgctgaggaagatgaagtcttgtcattgttggagagagttgcagaagcgaaaaagctatctgcaatggtatttttactctgcatttgtagttctaggtttattcgtttttgcgtataactttgatttatagagaactgaaatatgttttctggcaatttttgtttagaatatgaaagaatcaggaggtaggaagagaaggggagaagatgatgaagaaagtgagaggttcttgggaggtaacaaggacagaggcaacaaggaaagaggtggtaacaaagacaagaagtcttctaagaagttcaaacgataaaatagctctgtttttactgttttccgataactcaccaaagttttgaattgaagttttccatatgaactagggaaatttaatccattttgtactcgtaatttgtatgttcttttctttttgctttgtttctcaatgacagattatacaatttaagttgaaagatgtttaaaagctctggtgtctgttcttggtggctcctgcagctctttgttttatctctaatttacagttctatgctttcgagttccctaatgcattcaacgaattagataaactggtcatgttcacttctgctcacgttaacttcaaagcgaagagtaagaacatctttgcgtagagaacacaactctatgatggattccttatgaaattgaatgtttgtttatgaagagtacattaccccaaagaaagattgaaagatgaaaaccaaaaaagagaggaaaaaaagcaagaatattgaaaaactagaccgacaaaaaagccaataccacatcaactcaagtagtaggcaaaaagaaagacgcaaagcaaaaattagaactactctcttgtagaggaccgttaaaagcaaagtcaagatgaaccaccgcctggagatccaccacgacctccttatccgcggcctcctcttccacctcctccgttttgaggaaccctttggtaactttctcctccatttcgtgggtttgagctctttggtctaccagaaaactcacctcctcctcttccatagcctcctcttcccccaccaccgcgtcctcctttgaagctttcatttcggaaacttcctcttccggaaaagtaccttcccctgctacctccattgttgcctcctcctgcaaaaaaaaagattagccacatcttaaatacacaaaaactcttcatcaaccatctttttcttgattcttgatgaggtctctcatgtttgttacctcgactatttgttttcttctcctctacaacagcttgacgatctccaattgtaactggtgaggcctacatgtaccaacacaaagagtcggactttctaattcaaccgaaacatataccagacacctgagctcgaaaagacttaggagaattttcaaggctatatatggttttacctcgagggcactttgnnnnnnnnnnnnnnnnnnnnnnnnnnnnnnnnnnnnnnnnnnnnnnnnnnnnngcgagtcacaaatacgtgtaagggaccaataagcaaagggtttttggaggagattgtagatttatatatcaaaccttgttgcttctgacttgaatcccctcatgcttgattgcaccaaagttcttgaacacctcttcaagttgtgttggtgtggagtcaaacggcaaatttcgaacataaatcgaatgaccatcatctgtaacaacaaatagacaaaacaaaaatcaataaccaagggaaatgcgcgtattcaaacagcaaaatgaaaagaatttacagaccttccacatcaacatggctactattcggaacattctcatgagctgaagcctcgggtcttgctgcaggctcagcaggaggcgcggtcagcttctggttgactggagctggccttggcttgtttctagcaacgtgtgttgttggtgctggactgcttttcatctgcttgagctgttgaggcacacaaatgacttcataagttttactaacaacagaaaaacaatcttgagaaacaacaaaagaattaagttagtgagcggtttcaactcacgattgaagcataagaatgcttaggagcatctccttgaggcactgataagatttcattatgacttatttgagtgggaggttcaataggctcaacgtcaacaacaactccttcatctttatcagaaggatcatacacttccgccacattgtcaagatcttcttcctcgatagaagcaactggctcgggttctacctcgggctcgtgactaacaacaacacgttctgacaagaagtaagccgatgttaatattctaacttgaaataaataagtgctatgtgtggtaggaaacaaaaaaaaaaaacatggaactttcatcctacctggttcaataggagcctgaacatccctagtggttccattgatggggacagagcgggcttgtgcagtcacctctttatagtcatgttatagcaccccgtggtttagtcctaagtatcgtatgttctgtgtagccaataaaaaagattgtgtaaagttcttcctcacattatcgttcacggttagagatcgtgtaaccagctcaatagcgcttctctcatgagactcctagcacagcagttt

SEQ ID NO: 35387 - DNA, 1962 bp, Arabidopsis thaliana landsberg
tctgtcatggtatctttgttaatgatatggaatctttttagtataaaataacgaaaattttcactggccttatttgtttttacatgcaaagtgaaggtgttaagaaaaccataaaaaaaagctgcaactttgctactcgaaacacgagcagaggacatcaccctatgtgacatgattccccaacaatacatcacaagtcttgtctcttgacgttcacactcaattccttatcactttcacctctgataaacatctattgttttctatacaaacttttttttttcttttggaataatagcatttgtaaattcaaattatatgatttatatctattagccatgaaaacacaaagtttgagatcctttaagaaaaaaacagaaaatctgctaacaaatcaacaaaacttgagcaaagaaaataaaagaataaaaattaaacgtttctccaataagaaatgaaaagggagaaactccaaaacggcatgtagttagctgggggttgcgcgttctggccattatgaccatttatggcccatatttaaatgggctttcaggaaaacaacgttaatggacctagacagtgaacttatgggatttaaatgtgtgtatggtaagaagagttgaagggtggcgtcatatcatgtgaccccagcacaccgtaatggtcttctcatacggcccagtgggcattaaagagatttaccaaacactgaacagaaaaaaaacacaagggctggcatggtgaagtactaatcagcctcctggaaaaagtggaaaacgtgttcatttattatgctgaaaggtctagtgcattgaagactactagtaaagatgctaatgatgggttaaaacccattgggtacccaaaacccacataaaattttaagccaatagatctactttttgtgggaaaaaaacataggcttaaaatgggctgggtacccaaataaataaaacccatatgggtttatctcattgggttatgggtaccaacgggttttttttggtcttttttcgagtgaatcaatattttctcgtcaatttttttcacattcttccgccaaaaacgaaatccaacattttcccaccaaaaaacgcgattcaacagtttctcgccaaaacgcaatttaacattttcccgccaaaacgacattcaacaattttcccgccaaaaatgcgattcgacattttcccgccaaaaacgcgattcgacattttcccccaaaaaacgcgattcaacatttttccgccaaaaacgtgattcaacattttcccaccaaatatatacaatgtagaatacagaaaataaatacaatttaaaatatatttgtataacatttgggtacccacgggtagttctggattatatgggtttttctgggttttatccacaagtactaaaacccattcgagtttttttaaattggaatttttatgggcggtttttttatgggtttgggttgggttagggtcttcttacatttgtgcctcaaaacacttttttcttcagaaatgtacaatcgtgtgggagataagagtagtgggatgggaggtttcgtatggagcggagtttgtgccggagaacaaagaagggtatacagtgatcattcagaaaccgaggaagatgactgcgaaaaatgaactggtggtgtctcatagcttcaaagttggagaagttggcaggattttgctaactgttgataacccgacttcgaccaagaaaatgcttatctacaggttcaaggttaagcctttagcttgtgagtaacaaaagccgcatctttcgtctgagtgtttcttagtttagaacttgatcatatgattgttgattgcgttttgtttttctctcttttaccgacttatatgtttgtgtggttctgtttgctaaattcttttgttttatatttgattttgctctcttattttttattttttcagtttgctttcaaatttcactgatgaa

SEQ ID NO: 35388 - DNA, 2357 bp, Arabidopsis thaliana landsberg
ctcagtaatttttctacttcggctttcacggcttttgctcgctcccgacccaattttcttcttttctgcttaataggtttgaacgtcgggtcgatgttgagctcgtgtgacacgatgtcaacacttactccaggcaaaacttctggggcccaggcgaacgtattgacattttccctgaggaaagcggtgagctcagctgttaattcttctcctagatctccgccgatttctacgcatcgctcgggttttttgtcgtcaaggcagatggagattaccggatcgggagttggtgttgtagattcccgagcctcctcgatctttagttgctataactgctcagaaattgctttttcttcagctcggccaagcttggccttcttatgattcgcgtcggccgtcgattcagtgacggggttcctgagtttgtgtgctgccatgaagaagattcgagcatttttctgatttccccagatggttttcacgctgtcgcttgtgggaaatttcaggcatagatgatacgtcgaagcgacagctcggaattgattttaccatggtgtgctgatgattgcgttgtaaacggtcggctggtcgggaagagaaaaatcgacgatttttgttacccctttggctcggactggtaacttgatggtcccgagagtcatagtggtttcccagaaaatccgagcacaggtcgtggggttggtacaatttgggtcatctcgattttcatttctcgcagcgttgtcagaaaaatgatgtccagtgtgcttccggtgtcgactaggactcgttcgacgttgaaatcaccgatggtcagtgtaatgactaaagggtcatgtgcggacggtttaagccgttggtatcgctttcgtgaaaagttacttcgtcatttcgtccgttaaatggccgcgtccagttatgatttgcgtcggccttcctttgatatgctttgattgatgccgccgtgtcttgataaaatccgaaatctcctaaaattgtgaagatccttccccgagcagcttctggttcatcgtcatctgcttcacgattacctcggtctcttttgggtccttcgaggttcgtcgcgggggccgcctgctcgggattggccacagcattgacctgctcggttttggccttttccgcttctaagtcttcgatggttaggcctccaccgatctctccggctaggaatttagttgccaactttgccccgaagctacgacatctggaagtatgatgggcgtaactcttatgcaactcacagtattcctactcgtttcctgcgggttgatctttcgtcgaggtgtaggattctcgtccgcaccctcgaccgcggcctcgtccttgacctcggggtgtatcagcttggcaattgtgggctttagacaaatttcgtccttcatggtgaacgaatgtcccgccttgagcgccctttttgttgttcagagcgctgagttgggatttatcgctgcgacgcgtctgcttaggcggctcgtgactttttgatagtagttccatttttttctcatgggaaacgtaatccgaggcgcggtgcaaggcatctcggatgtttgtggtttggacaagtttaactctttttggaattctgacttgtaccacagcgccttcttcagagcagagagagccgctacgtcgttgaatcctccgactttggctagggtagatcggaattttgcgaggaaatctcgaagtggctcctttggctgctaagataatgaccacagatcggcgtctgacgtgcaaggatcgattagcaccgaatattgctctaggaagagcgtcgatagctcctgaaaactgtccacgaaatacagagaccggcgtctctttcgtcgggtttgaatttggctcgggccacagaaattatgaatgacttcaaatgtcctttcgggtcggaggatccattgaagtattcgaacctttgctttcctggaagcctaaagtaggattttggttttaaagtttggaatctatggtttagggtttagggttaagagtttatggtatagggtttacggtttcgggtttaggatctagggttctggggttaggggttaggggttgaatttaaggttttgggatttagggtgtagagtttaggtttagtgtttaggatcaaatatagtatgatacttagagaagcaagaagaatcttggttagcgtttcggaatgaaatatgactaaatgtcatgtgtatgattgaatatataaaactagaacctcaacgagatcccgaaaagtaaagtagtgcttccttgttatacgattcaagaccaaatactcataagatctttgactttaccatcaaagctttgagaatcaagaagtggct

SEQ ID NO: 35389 - DNA, 5199 bp, Arabidopsis thaliana landsberg
  unsure (1)..(5199): unsure at all n locations
tttctagtctttttcatattattacatgtttcgggattcatttggagataatggagcattctagaggaaaacagagaacttatgctgcagaagatatctggggactaaaaaccacgtaggtgtcgagcgacaccaataccggacggcatcttatagacgcaacttattgaagttttgaagatttcccaattcggcccagaacctttccttatttctaaagaaggcccatcacgttttaggaacttatatattgatttttatggtcattgtttagatctaagtattattctctattctgtactttggggcaaacccctatggagactccctttagagaatattcttttacactattttctcttcttaatttcatcattgatttcttattcaatcatgttttgtttttctatgatcatgcttgactagttctcttgttgggtttagggatgctcattagggatttggttgaattagtaggtcaaaaaccctgttaggataatatatttagaattcttcatgattgttcttaatgttagttttagagtaactaactaaaacttgattttaggataataggtatacccaccataggtatctattactggaactatcttagatgagcctagtatttagatgcgtgctagcgtccattacttaggtgaacttatcaaacctgattataatgcttgcttagttcttgagatttacaagagagttggaatcaatactattaagcatagtgagtagcacgacacaccaccggttactttatattagtgatttatgttctagaatggttcgataatattcctaatttactgctaaatctactattctgatatctcctgagagttttcctaaacccgacatcttaatcatctgaatctaaaaccaacttttaattgctttcttgtcttttacttttataatattttctgcttagctttattcgaaactgttagtctaatgtgtgatccgagaactttgtggaattcagtccctaagtgctataacaacctctttatttgagagaatagtcattagggtaatttgactcatatcaaatttggcgtcgttgccgaagttctcttcgatttaccagtagattaggtgtagaatttaggctaagcttttcttttcttttgttacttgcgtgttttttttcttttttttcttgtgtttcaggagtttaagaaattcaaacgcaactcacgatgttgatagtagtacctgatgctgttggagtgttacgcgacagagctggtcagacatacaatgaaaagggtcagaaaatagatgaacagggaaacctgataccagaaatcgccgatggtgttgatcgacgacaacttggaaagcaataaaggttagttttctcaacaacttttataatgatgcaaggtccgaggagctgagaatgaagatctctaccttctctcaagaagcagctgaagcatttaaagccgcttggatcagattcagaggatatcagagagattgcccgcatcattgtttcagtgaggttcagttgttaggtatcttccttagaggagttgattgaaagctagtaatgggaatttcatgtcaagatatccagaggatgcaacaatgttgattgaaagcttatcttctagcattagtaccaacaacgttgacattacaaggaaaacgcaagttcagtatgttgcacatgttgacagttttgccactttagagaagatggatcaacatggatatatgagctacaatcagcaatctacacatcagaaaccggttcagcaatctacaagcttcactccgacttatgcttcttcaacccaagcccactgataataggtttttagtcaattgtcctaaaacaccaatcatgtcgttgtagtattttaggtgtcaatccaaatgggtgtgatgcaaacagatgagatgtgatcagaagtcactaagtcaagccaagcaataacagttttggggtttctaacagtcctagtgaacatgcagaaaacagaaacaataacagaattactaaaatcactcgaccacaacaggctgatgccagaagtaggatgtggccgagtaacaggcaggatatgaaacatatatactcgactgcacagtctgttgccagacactgggtgtggtcgagtaacttgatcgagtgattgcaaaaacaaagaaacaagcaatgagaacgattaagtgataacgataaaacagagaaatcagatagacgagaaattcctaaggatggggtaatcgaatagagtggtatcctagcctatccgaatgattaacaggcgcaatcaagctatccctagacaacaggttcaacaacaaatcaattcactcccgtgatagaaatcctcaagcaaagctagcccagactaattcccattaacggaatctaactatgcaagcaataagaatagactgataaagtcaataaaggctctaaacggccaaatccttgggatagagacgagtatctcaggaactagtggatcaagcattccatcgaacaccttctgggtgcgggaatgcttgggatcgaattccagttgattagaaagaaataagcagtaaacgcaactagtcttgaagggattcaatcaattctaaaacttgaccattctacaaactaaggattccacaactactctatcccatccctaagaattctaagtcactactcagacaacatgctcaaagatataaacgcagataaatgataatattgcataagtaaagagataaagagtagaaaaaaaggatgacagatgaaaccaaatgcggaatctgaataacttggaaaaatctcgaattacaggttgcagaagcaaaagcggcgcagtagagtaaaacagaaaataaaactgaagcaaaaactcaatgtcgactagatgtcaggacagaaccctaagacatctatttatacaaaacgaaataaaatgatagtagacgggccaataacctaatcgcttggcccatagagtgataatgggccagatgggcttcgtgatccgatggaggtccaggccgcttccaaacactttgtcttctcctcttctcttccttgtgctcagcttgtctggttgagtgcggatttgagctcccctgtgaagatgtgatcgagtgtccggtcgagataatggtgatggtggtgagtgaagacactcgacctgggggtcgagtagtgtcatcgagtggcctgagctgaggttactcaacctggtggacgagtggatgggaagaatggctccaaagtcactcgacctggtggtcgagtggatgggaagaatggctccaaagtcactcgacctgggggtcgagtatgtcttctggttctggctcgtttcttccaatttgcttgcaaacagctccaaataacctgaaaacaactcataaatgaaatatgtatgcaaaactctcctaatcatgcaaagtatgcaagaatgatgagaaatgatataacacagtgatgaatgatacgaaactggactcaaaacgatgatgaatggacactgaaaacatgcaaattatagacatatcaatagcgttgacaaaattaaaaggtcgccgctcacgacccctttcttcattcactgtagtcagatttatcttacatcttaagtttcaaaaacactatatgacataggataattctgcagccatacgtcattcatcaaaacacgatcaagtttcttcataatcaacccatgatccctcttattactccaagtaaatagcggaccgtgagaatccatgtccgaaagagtgcagtattgaattacgtcttggaaatccctcattctagaagttacaacaggctggttctccaattgtgaatgcttgtccatatttaggatttcattaaaatctccaaatataatccacgctttattactaataattggagagtcgatgtgatctcgcaactcactccataaattctttctctcttctgcaaaatttgaggcatacacaaaagaacaaaaaaactcattctcttgatcctctagttttactgaacacgtaattacttggccgcttttcaaaacggagttaatctgacatcgtttctccatagaacccaaatacgccctcttcggttggattcataatttgtaacaatagccctgtctttaaataacttacttcctaacctttcagctttactctccttcactcttgtctctattagacacccaaacttctgctccttaacccacttcttaataacggaatgcttatttgatttgtttaaaccgcggacattccagaagcacgacattatcaatttttttggtggcgcttcttactctgagggcgacctcttatttgagtataagcaacggaaactgtcttatgtgctgtttttgatcctctaggtagattctatctaggaatcaacctgtgatttagagtgcatcgacttagataaaagaggtatctcatttgttatcgttgtatcagatgactcctcttctattgtttcnnnnnnnnnnnnnnnnnnnnnnnnnttatcaacgtgattttccccctctttcatagatatgtctgcatcttcttccctcttctccttaacctcttcaactaaaccgccaagagcagagtaggaattagaaaggatggagacttctccaaactttggtatatctattgttttcccgggggtacgagtagactttgatggtctggaccactcttcttctgttgcattatcttgattgtttcccccgataggtaaatttatccttgcttggacctcttccaaaattttttccaccataactttctcaatagcctgtttgctcttgatactcttctgttatttgttcgctatccacctcattcatatcggaaactttactgtgagacaagttcgagtccagtgctaagcacgtgttttgaaagtgtccccatttcttgcaacaattacatcttggtggcagccaaggatataaatacttgatcaccacatctaactctccttcttcctcaccactaaaagagtattcagtcagtaagtcttttgtaagatttgcctccactaaaatttgtgcttcatcgaaactcgaacatgtttctgtttttggatgaagtttgacaggtttgccaacgaaattccaaccctttatccgtaaacatagaaggctggacattctttagtgttacccataagttgatttgatttcattttta

SEQ ID NO: 35390 - DNA, 889 bp, Arabidopsis thaliana landsberg
caagaaatctagtcaaatttgactacaaaccgtaaaccaagcttcgtcttacttctcaaagctttgatggtgtagccgaggtccttatgatatttgattttggatcttctaatagggaaaaacaactttagcttccttaaaccctaaaccctaaaccctcaaccctaaatcctcaaccctaaccctaaaatctaaatcctaaaccctaaccttaaaccctaaacctgaaatcctaatttatattccgagatctagttgtagttctagttcggatactcaatgatacacaaagaatctagttaaatttgacaacaaaaaacgctaacaagcttcttcttgattctcaaagctttgatgttgtggccgaagttcttttgagtttttggttttgaatcgtataatagggaaacacttgtttatctttcaggataagttttaatactcaatcttaaagaggacatctagtcatatatgaccgagtagaagcttcaagatctcaagagaccactcgacccccaggtcgagtagaagacatcacaacttcacctcaccactcgaccacgaggtcgagcgtcttcatctccatcacctgaccatcactcgatcacatcactcgaccacgaggtcgagtgtcttcaccttcattgccagaccactacacgacctcatcactctacctggaagtcgagtatcaccatcaccaccactcgactgcatagttactacctggcaacagactgtgcagtcgagtatcgctgatatactttctatctgatactcgacctatcactcaaataccatagctattgaaaataaaacttcaagctcttcatggatggttccatgcttatgtaggtacttacaaataccatagctattgtgcttatgc

SEQ ID NO: 35391 - DNA, 2038 bp, Arabidopsis thaliana landsberg
  unsure (1)..(2038): unsure at all n locations
ttctatgttgttcggtgcatctgtcggactccagagcgactagaggcgtgctgcgtatttgttcttgacgcctatgggtgacgtgataattgcagtcgtgcctgtcccgcatggcaccatgcgctgtcatagtggatggtccacaccttctctgagggctcttcttgctactgtgtcagccctgtccagtcgacgatgaagtctgccaggnnnnnnnnnnnnnnnnnnnnnntgggctcgaaggtgatatggtacccggagatttcggctgtcgatttggcaattcagatggacgcctccgggtttctgaatagttcgcccaatcccctgtccgaggtgacccgcaccttaaacgcctcgaaatagtggcgcaacttgcacgatgccatgacgactgcgtaggagattttttccatctcggtcatgttgcacttggaggccgtgaggaccttggagacgtagtagactggacactgtcgggtcgtgccctccctgtcttgctcttggacttgagctgcgctgactgcatgtggcaaggcggcgatgtaaagcagcagaggcagcgaggggtctggactggtgagaatggccaagtctgacaggtgatgcttgagtgaggcgaaggctgccgcctgttcgggtccccatgcaaagtctttcgcgccgcacagtgtcttaaggaaaagtagactccgctcggtggactttgagatgaatctgttcagagcggctaatctgcctgtcagacactggacgtcccttgttgtctgcgagggtgtcatgttgatgattgcctaaatcttggttgggttggcctcgatcccgcggtgcgaccccaggtaacccagtatcttcccctggcagaccctgaagacgcacttctcggggttgaggcgaagtcgtgcgtccctcatgtttgtgaatgtctctgcgaggtcagccaggtgatccgccttatttttgctggcgacgacgatgttgtccacatacgtgaagatgttccggcctacttggctctcgagcaccgtcttggtgaggcgagagaaggttgacccagcgttcttgagtccgtccggcatcttgatgaagcagtacgtgccgaaggatgtaatgaaactggtactggtcttgtcttcctctttcatatatatttggtgatagccagagaagcagtcgaggagtgacatgacttcgcatccggccgcactatcgatgatcttgtcgatctgcggcaacgggaagttgtcctttgggcaggccttgttgagactggtgaagtcgatgcacattcgccacttcctgctctttttctgcaccatcacaacgttggagagccacgtggggtaaccaccggctcgatgaatttggcttccaggaggcggtgcacctcgtgcttggcggcctctgtcttctcgtcggacattttgcgaagccgctgttttttcggtctcaccgaaggtcgattcccaagctgtgctcaattatggatcggctgaccccgaccaggtcgagggctgaccaggcgaagacatctttgttcttggacaggcagtagaggagtttctcctcttcatgcgaagtgaggtcttcgctgatagtgactgtctgcttgggcgtggcctgatcgagggggacagtcttggtcccgtcttggctctgcagctgtgccttgtcgtgctgtttatcggttgggctggcgggcacggggacctcgcgctggcccgtgaggcagtgcacgtttctctgaccgggcacgaagtcccgctctatgttgcgcgccgtctgttggttgccgtagaccgtaatgacgcctagcggacctggtatcttcatacataggtacagtccgtgaatggcggcttcgaacttattgatggagccccgacccatgatggtgttgtatggatataccatagccacgatatcgaaagtcacttgctcacttcgggcattgggtgctacaccgaaggagaggggcaactctattttgccgacgggaaaggtgcccttgccgccgaagccatacaacgggttgtcc

SEQ ID NO: 35392 - DNA, 1819 bp, Arabidopsis thaliana landsberg
tctcgcgcatattccatttctcaacagaaccctagatatttgacgtaatgcattttccgacccaatatgacttcagtaatatttccacatatccccttcgacttttctatgtttttatttctgcccccacattttacgaattccactgatcggagcaataccattgctcattgtccgcaaacaacttgcaagcttcctctccactaaacagatcttcatgctcttccattttcacgaattggctaaaacaatccatcgtcgacatttctacagtcgtggccgccactgcgcccgctgcttcaaccgtattgggactatactcttcgttcaaaaccgcgcttgagtcgctgctatcggcaggatcttctctgaagttttccgtgcgtggaaaaatgctaaacatttcgaatgcgagctccgatgtcggagcttccgtaggaatatgcggtggtggcgatggagaacggtggcttagctctaagacttcattattagccatcaccgtctgatttgcttccactacttttaaagcgccgttctcttctatacctttaaacccttccacgttaagttttgctttcagctctttaatctgcataaatgtcatgttttataaatatcaatactctttataatctaccaaacaaaaggattatctctgaatttgtttaaatttagctattattatcccagattatataataaattaataaacatgaaacttttagtatattaatctcaaaattcaaaaaaaaattctgtttgtgtttggtttatcatttgtaattagcttaaaatgatattgtttaacaaatgatattagcttaaaatgcataagtttgtgacatttttatacactaaagaaaaatcaacgtaattaaaggcaattcaaacacagacgatcaaaactttagtctaacggtcagaattcaaattgaaatttcaaaataaacaaattgaaacgatgttattaatgttctatacgttcgtttatttgattgaccgaatcattgatggatttagttacaataatggctaagatggttgtttgggtgtgcctagacgtttaaatttattgacaaatctaaaagtcacaaagactatacctgtccaaggagtgaatcgttatcgcgttgaagctagtcgcggttgcgtttgagtgcatcaaagtctgacttaagaacaccgtaatctttctcaagctgttttgtcttccaccgagcacgacggttttgaaaccaaacagcaacttgacgaggttgaagaccaagttcttgagctaacttaactttcctctcaggctcaagcttattctctaactcaaaattcttctccaaagctttcacttggttaatgcttaaccttctcttcttctccgacaagcccacgtgtcctctttcttctactatagcttcttcttcttcctcgtatccttcaagcatcgactgaaactctctcccaccgtatctcctcggactctgctcatctgtaattccataagaagaacaattagcaaacaaagatgagattaattaaaggacttgtttagaaaattagctaagtacctgtggaagttgtaggacataaagagatgagaccacccactgaatctgaactacttaatctcttcatcatcaacaatctttaattactttcgaaatttttaataacttctcaatttaatgcatagtacttgatgatctttactctcttaaacccatcaagaaaagagaaaactttgaaggaagagagacagagaaatggagagaaattaaagacaatggagattctttttatacagagagagagaggagagaga

SEQ ID NO: 35393 - DNA, 1179 bp, Arabidopsis thaliana landsberg
  unsure (1)..(1179): unsure at all n locations
gattcaagaaaagggaaaacgccctctatgctaaaattaaaagaaaagccttaagtttgtcaaagtttaaaaccaaacccgctagactcttaaatcgtttcaaagagaaccccttagaactagaaccaaaagagagaaagaatgagaaaaagggtagagttaggacatctatgggactgggatcatcttttgagcttaatgaatgggagtctgttcttgtatgtgtccaatgacttttacctttagcattctgctgaagctcaatcttttctctgagagtcccctgttactcgaccaatcacaagagggaccatttttgtctcatagcctaagcccgaaaccaagtgagttcataaccattgcattgcttgatccacttttcgtgcttaatgaatgttaaaggaattggttgatgagaatgcttgaatagattaaagcaagttgttaggttgcattctgacgagtatggctaacgtttttgagtaaaggtctatcatcttgcaacctagaattagctacctggacatagagtttacccgttttatatgcatgctttggtttttgcatccccaccttcaaacctctccttcaacttaagattttttgtttgcttgagggcaagcaagatataagtttgggagagttgttaacactgtattttactcattttaggtgtatgtttatcatcatttaactgtgcatttgctcattgtatcatatcattttgcatcattttagcttattatgcatacttaggcatctaggatcatctcgcatacgcattgcatgccaaggtgtgttatcaggtgcaaaaggagcttaaaaggactctactcaatccattcactcgatccgggcagctacagaagaggcatcattctactcgacctctttactcgatccaggatgctacaaaggaggctgcagtttacttgaccctcttactcgatcaaggcaacctcagaagaaagcagcagactaatctactcgcccctcctactcgaaccactactcgatcnnnnnnnnnnnnnnnnnnnnnnnnnnnnnnnnnnncttgttgagctatcaaagcgtttaggaatcctgctcattccccactcaaccagacatctgaccatacggataggagaggataaagcatctactcgaccaattgatcactcagagcatatacacaaa

SEQ ID NO: 35394 - DNA, 338 bp, Arabidopsis thaliana landsberg
ctactatactagctttggtttctggaataatactctcacctttctgctctctcgtactctcctcgctctctggaatgctttcaagaccgatgaactgactgttctcaaccttttgctcctttgtactcacctcagtctctgggatactctcaagactaaagaacggattgttcctcacacgaggactattcatcggactacctggaccaacccattcctcaacatacttagcagacaaaggtgtccatttcgtaagcaacgatgaatcatcctgttcagcagcccaaacagtaatgagaacaaatccaccaggcttaacaacacgaacaagttcgtca

SEQ ID NO: 35395 - DNA, 4345 bp, Arabidopsis thaliana landsberg
  unsure (1)..(4345): unsure at all n locations
ctcgccccttatcatcgcgaatcgtccgagctcgccctccaccaactccatcttggtgagtaaggtgacatcattcccctcatgagagatcttgagggtgtcccaaatttgcttggcattgtccaagccgctcaccttgtgatactcgtccctgcacaaagaggctagcaacacagtagtagcttgtgcatttttatggatatgttcattaataaacgaaggactatttgagctatcaaatttcattccactttccacaatctcccaaatgcttggatggagagaaaataggtgtgtacgcattttgtgactccaaaatccgtagtcctctccatcaaagtgaggaggcttgccaagtggaatggggagcaaatgagcatttgagctgtgcgcaatgcgcgaataatcaaaagaaaagtttgagttaaccgtcttttgtttgtcgtagtcgtcgtccttgtgggaagaagtagactcgtcgctgtcgtagtagacgatctccttgatacgtcttgtcttcttcttcttcccatctttacgtctgtggcccgagccagagttgttggatttgtcatcttttggctcgttgacaaaggactccttttccttgtcgttgatcacgattcccttccccttaggatccatctcttcgggcggttagtccctttcttgaagagaacggctccgataccaattgagagcacctagagggggggtgaataggtgatcctgtaaaacttaagcttatagccacaaaaacttgttaagtgttagcacaataaatgccaagtggctagaaaggagtctcaacaaaacacaataccacaagagatcaatcacagagatgacacagtggtttatcccgtggttcggccaagaccaacgcttgcctactccacgttgtggcgtcccaacggacgagggttgcaatcaacccctctcaagcggtccaaagacccacttgaataccacggtgttttgcttgctttttctcaatcccgtttgtgaggaatctccacaacttggagcctctcgcccttacaattgaagttcacaaagaaacacagagcaagggggaatgagcaacgcacacaagacttcaaaagatcagagcaacaacacgcacacaagtcgcaacaagagctcgcaacacaactcaaagagttcgcaactcaacaagagctctagatgctatcacaatgaaacgaatgcttgagatcgatgtcttggtgcttaggaatgttgtaggaatgcttggttgtctcctccatgcgcctaggggtcccttttatagccccaaggcagctaggagccgttgagaacaaatctggaaggccatccttgccttctgtcgtcgggcgcaccggacagtccggtgcacaccggacagtgtccgtgcccgatttccttccttaaatagcgaacgtgaccgttggcgaccttggagccgttggcgcaccggacatgtccggtgcccccttctagccgttggctcggccacgtgtcccgtgcagatcgcgcggccgaccgttggcgcaccggacagtccggtgcaccaccggacactatccggtgaattttagccgtacgccgtcggcaaattcccgagagcggccacttcgcctgaggcagcctggcgcaccggacactgtccgtcgcccagactgaaacagcctcttggctgtatacagcaactcttctcttttcttcttctttctgtttctaacacttagacaagtatattagtacaccaaaccaatgtactaaggcttagaaacatacctttactcttgatttgcactttgtccatccatgagcataaattcacatttaagcacttgtgttggcactcaatcaccaaaatacttagaaatggcccaagggcacatttccctttcaacaagaccggcgtcccatctggctcgctccgccagacaagtaatgatggcgccccgcacgctctatgacgacggcggctctcatcccccttatggaagcaagaggacgttagcaaggactcgacagctccgacagctgtccttccgccaggctccagcgctcctccgacggccacgacaccacacaaaccaggtgccaaaacctctccggctgccacgatggcatgtacttagggcgctagtctcatccgttagacacgttagcactctgctacaccgcctcattgtacacctggatcctctccttacgcctataaaaggaaggtccagggctttcgtacgaggaggtggccgcacgggagaacgggcttgcggacagtctctctctctcactctccctcgcgaacgcttgtaacccctactgcaagcgcacccgacctgggcgcaggacaacatggaggccgcgggttcccctttgctgttttctccccccttcgtgctccgtctcgtgccgacccatctgggctggggcacgcggcgacaatttactcgtcggtccagggaccccccggggtcgaaacgccgacaacacgacaacgcaaaaacgatggaaagtgatgctttatagaagtactagtataatacttatgcgttgcaacatcatactgaaagagaaatagacttacaccttttcctaattgattttggtggttgaattgccaaacacaaataattggactaactagtttgctctagattataagttatataggtgccaaaggttcacactaagccaataaaaagaccaagaaaagggttcaaataaagagagcaagggataactgaaggctgccctggtctggcgcaccggactgtccggtgtgccaccggacagtgtccggtgcaccagggaactccaagctaaacttcgcaccttcgggaaaacgcagaggcgactccgctataattcaccggactgtccggtgtacaccggacagtgtccgtgctctaagaggacacggctctggaacttggcagcctcgggaattcgcaacggctgctccgctataattcaccggacatgtctggtgtacaccggactgtccggtgtaactccggagcaacggctacttcgcgccaacggtcacctgcaacagcaattaatgcgcgccagagcgcgcagaagtcaggcacgcgcgtagtggcgcaccggacactctacagtacatgtccggtgcgcaccggacatccaggcgggcccagaagacagagctccaacggtcggaacccaacggctttggtgacgtggctggcgcaccggacatgtccggtgtgcaccggactgtccggtgcaccatgcgacagacagcccccacaaaacggctagtttggtggttggggttataaatacccccaaccaccccaccattcaagtcatccaagttttcaaccttcccactacttacaagagctaggcattcaatacaagacacacccaagtgatcaaatcctctcccaattccacaaaggctttagtgattagcgagagtgatttgttgtgttcttttgagctcttgcgcttggattgctttctttctcatcctttcttgagatcaaactcacttgtaattgaggcaagagacaccaatcgtgtggtgatccttgtgggaactttgtgtatccaagtgattgagaagaaaaactcactcagtccgagggaccgtttgagagagggaaagggttgaaagagacctggtctttgtgaccacctcaacggggagtaggtttgcaagaaccgaacctcggtaaaacaaatccgcatgtcacactcttcattcgcttgcgatttgttttacgccctctctctcggactcgtttctatttctaacgctaacccggcttgtagttgtgattaattttgtaaattntagtttcgccctattcaccccctccctctctagggactttcaattggatcaaagcctgggcttcattagagcctaaccgctcaaagtgatgcgggagaacacgccaagaaggagatgtataccggcgacaagcctgctacaagccacgggaaggcttcatcggaagagtcccgcaacaaaaagaaagggaaggagaagaaagcctcctcccacaagtcgcatcggagtggcgataagaaaatgaaaatgaggaaggtggtctactacgagaccgacacttcatcaccttccacctctggctccgacgcgccctccataacttctaaggccatgagcgcaagaagtttagtaagattcccttacactatccttgtacttctagacatactctattactttccgttccattaggcaaaccaccaacctttgacggtgaagattatgctaggtggagtgatttaatgaaatttcatctaacctcactccacaaaagtatatggaatgttgttgagtttggag

SEQ ID NO: 35396 - DNA, 534 bp, Arabidopsis thaliana landsberg
tgacgttttctttttctatttagttgtcttagtcttgatagttaacatgcaaaatgacatggattgatagtaaggtagagaactagcatccggtctctgataagcttgtttctagaagtgagtactgcgtagaagctgtatctgtgtctgaggattactagaatatgctatggactgttcttaggaaaaatctgtgatgtgattttggttattgagagctctccttctatgccttttatgtggtagcttattaaatggaaaaacctggaacctaaacacactctgcagggtcttcttactctatcttgcttcttttattagggctgtccgtgttgcaccattttccaataggttagctcatgcagttcctgcacacattcaagggctcagatgcttagcaaactttgaagcattgagatttgcagaacccatacggcttcttgcagagaaaatggtcgataggatggttacaaagagtgttgagagtgtaggacaatatgtttctgttcatctccgctttgaaatggtttataa

SEQ ID NO: 35397 - DNA, 1467 bp, Arabidopsis thaliana landsberg
  unsure (1)..(1467): unsure at all n locations
agtggatagcaacgctgtcgcagatgcgattttgtcaactccacaggtaccagtttcattattggaaccaaccattcgatttaacaaggaatcaccagctgtttgtaaggatttccactctagttctggcgttgatgctttattgattcatccagaagagaaattacaaatattatgtgtttaagaagtgtatatgttgtctccaaagtcagcatgtgtcactaaccagcaaaagacataccaagtgctcgatataatgtcaccacagaaagaaagactgaaatcaaagaagaagagnagatgtttgaaagcttggatgttcaaatacaagcctgagaagagaagaattaggaagctacacaatttcggctggttacatacttggagcaaaaggttgagttggaggaagaacaagagtgaaaaactacattttttttcagatatgaagttgcttgggaagatcaaagagtatgactccttgagaagagaaattacagcaattaagaagattcaaatatggggacaacaaatgaatgcatgtccaattcgagctggacctatgtttcactggaaattgttctttgggagcaagctggtcaaatcatgctattgtgttcctttagaagttagtttgcaggagcgtgcaacatgtgagctgatttggtcattggtgcagggagacgttcctagagttcaacataagatgtttcaaacgtatgatcactcaagaggagatttgccacatgagctacaaactgttgcaggaataggttttcctccggtgaagtttctcgcagaggcaacaccatttcaccattggattccaacgtggataaatagacctgattcacctttgaattttgacattgatggttcatggtcgggatttgttattgttaggttgaatgtgagttctctacaaaagggaagagaggttcaatggcaggaggagaaatcaattgtagttggtgtcacaagtatgaggaggaactgttataagtcattgaacttcaagtataaacacacaacaatgggaattgatttaaagcaactaacnnnnnnnnnnnnnnnnnnnntacttgaacagaaggagttgcagctcacgtttgcaggatatgaatgtctcttagcatgtgtttctgtcacgtttcgttgcacaatcttctgtggtggctctgatatagaatggtctttcatgatggtttttgcgttttcagctttattagagaggaagagaagaagatttttaacgacttggttgctcaagtttgataagaagccatgcgttcaaggggaagtgattgcttatgaaggaaaaattgtcggattttacacaacaattggggccagagacatctatttttcgatgtggcattgttggagaaagaagaaactgcatgtcattaacctacaacaattggccacagttttgcacagctatgagaaagcaaaactagaagacttcag

SEQ ID NO: 35398 - DNA, 7609 bp, Arabidopsis thaliana landsberg
gattttataagaatcctacctaactctaatcctataaagttgggattttatttgacattaagacttgaggttttttagaaacgaaaatttgataatacataaaacttttccaaagcaaaccgttcacaaacgcttatttgcgggtaacaagatgaacaaaagaatattcagactaattggttggttacaagatgccttgaagaaggggtttcccttgaaacttgtcgaccttggagctcagaaatgtgaagcttttgtggagacgagctcttttcatatccagatcccctaacttcgcagccatctccgtcattctagctctccactccttcatcttcttctccttctctgccagttctttcacctgtttctcagttttttgtctcgcaagtaacacatctctctcccactcctctttctccactacgctcatcttgtgttcatcgtagtgttttaccgcctctacaatctcctccaggacaggcttgagccatcctgctttgattttcacggactcaacgtctttaacaatcgctaccatttccaccacgcggctctccttgagatacttcaggggagttgtttggagttcgaataccaccgaggcaagcatgtcgaggtagtaggatcgtgtagcgagcgattgtagtttggaaccagacgcaatgtcaccgtgcttctggagtatgtgttgtagagtggtcgagacgctagctctgaccttgtactgtcccacagaaacgtaagactcagatagaatagactgcatctcgtcccttatttcattattggtaattattcctttcatacgagagatctcagcgagactgaagctctgtgattcatctggcagctccggtggctcgttgtttgctttatgctgttcctcttgttcgctgcttccagatttcgatgtagtttcagcgtaaattgaaacagtgtgttcgtcgtgatcatccacaaatgaaaatttatcgtcgtctgtgcttgcagaatcatccatttcatcacaatgttctttctgtttgttaggtgtttcatatcctcggtgattaagctgaggtaagaggcaaaaactgtcattagcatgtgtagaaatatatatctatatatatatatatatatatatatatatatatatatatatgaagatgtgaaagtagagagtagagagcagtaccgtaataagtctagagggtggcctttcttgaggtgacaaaatcagttctggaaagagtagaactgattcctcgttcttctcaatgtacactgactcagctttgctcccaagataattgtaggcatgagatgatctttgacccatttcttgtgagattttttccctgtgatcaggtgaccttcctccatagactgcagttttgggcctactttcatgtattcttggctttgtttccacagtcctcggctggtgttctggcgtcctaggcctagtttcaactgtccgaggcattttaagagcagcgttgtcaagggatctgtgggacatgggctgagtttggggaatcctagggctgggttcaggcgtcttggaccgctgttttggagtccttgaggatggttcgaagtaagtaggttgaggctctggggtcttggaccttggtccgggggatctatccatgaactcaggtgacctccctctatgttgtgcagtcctcggcctagtttctggtgtttgaggcctccttcctgttgcagcagactcatgtataggtgtcctcggcctagtgtcagggatggtggatcggtgttcaggagtcctcggcctagtttctggtgtttggggcctcctttctgttgcagcagactcatgtatgggtgtcctcggcctattatcataggtggcatatcggtgatcaggagtccttggtctagtttctggtgtttgaggccttcttcctgttgccgcagactcatgtatgggtgtccttggcctagtatcaggggtagtggatcggcgttcaggagtcctcggcctagtttctagtgaaaaagcgtcctcttggtgtgcagatcggtgttgcggtgtgcgtggcctatgctgaggcgtcctaagagggtgttcaggggtcttaggctgagttccaaaaggccttggtgatacatcatcatcctcatctccacgctgatcagcctggcttaaacaaataccaacagaagagtgagtttcagcagccaagtgagcaagtttagctattctttgatttaagaaataatccttaccctccttgcaaagtagtctccccctagagtaaagagcgagagaaggcgagactggcagcgaatcgacattgcttgaaggctcgatcttgcgtccctgtagcggggaaaggcgacttaagaagttgccattggtgtgatcataagaggatggtgaactctctgctgagtcaaccttcttcttggcgaaatagctggccagaggtgatctgcttccacgagccggactagctggaggagtctgatccctgctgggagttctcttaccaaaccctgacacaagacaaaaacatcagagactcttcttgatgacagaagactttgacccaataacagaatcagaagcatatttgtttcataccaaagagtttcttctccttcttgtggacatctggagagtttactctctcaaaacagatagcagtacactcatggaaaggattgcctgcgttggagcaacctggaactacttttccagacactaattccatctcacaaacttaaaacaaaactctatgataagatctcaaacctgaccattccaaaaagaaaaaaaaaagcgtcagatccattgacccagcaaaacaagtagatatcatcacacaagaagagagtcaacggtttctatatatggaaactacaataaaatgattcatgttttctctttgcttaattatgtttcgtctacaaacacagagaattgacaatcttctattggtttttctttctttaggtactaatcaataacggattgtgatgttgataaaattgcaaaaactcacataaacagcttactaaaagcttttgctagataaaaaaggggtcaagagagaatagagattgatgatacctgtgttaaaattattgttgaggaagaagaagaaagaagcaaagccagttgaagaaatgagatgaatgatttatctcatcttgtctgtacatagagagatagcgaatgaagcttataggtgtatatataataataatatcttattgggttctaacatgggttgactttgaccgcaataaaaaaatgagtcattttatagtttcagccgagacttcgtcaattggctatttctttttcttttcttttagtattttatgtatttgtcaaagttagaatggatcgaagaggtttcagtctaactaagcagaagaaaagaatcaaagattttagaagatctctaacttcattgtgttctcattactccattatcatttgcttcctcctttcttcttctttttttttttggttgtatttaaatgctctatttgaatctcagttacaaagtttaattgaaaaacatttatttttatattttatcatttcttaaattcttgggagaatttttaacaacaaaaaattgaatatctttttaacaaaaaaaaaaaactagtatcactcacgtaatttagcttttgttgaacatttgacgcgtttccctaattatataggtggtagaaaggaatagacaacatatgccctttcgaaggcccagtttcttccgtcagcccaaatacaaaaaccaggtagtaatcgaaatcaaagcagtagtaaaagtgaccttaccaactgtttttcaatgaaaacggtcaagagaggaccacaaaatggttttccagagtcagaatcacaaatattgaatcatatactatagtttttttttgttaaaatgtgaagtatttataccattttcaaagtttcaacagaaattataaaaaatataaatagcagaaaaataacaaaaatctacagaaaaaacaaataatgacaaaacatcaaaggaggaaaacgtatgtatagagcggaaataaaagaagaaacaccgattccgagatgccaaactcaaaaatttgtgtaatttccacaactctaaagagcaaacccaattagaggcccgtcctcaaaaccttcgtatcaatcagcgcgtacagtttctccgtaaattaacgcaaaaacacgacgacaacagctgactataattgttggggatgattttatgcttaccaattcaactatcacacgttgacatggacaacgtttagaatagataggaggatttttaaaaaatgagcatgaacctcctccctccctcttttccaacaaacaaagacttctccgagtgactatgcttggataagcattatccatgggggtttactccactaaaccggtttaattaaatttccaaaaggtcgggttcagtcaacgagaacagaaaggccgtcgaatttaaggaccttgctctcaaagagctccagattcttcttcactctcacatctttcatctccagctgccccagccgtcccgccaactccgtcactctctctctacattccttcgtttccttctctctccgccgcagctcctccctcatctcctccatctcttttttccccgccgtcatttccctatcgcactcctccctcacaatcttcgccgtgtcgtacttcccgtagtactccaccgcctccgctagctccgtcaccgctgttttgagccacgatacatcgattttcaccgaatccatgtccttcacgaccgccgcgatctccgccacccgcgtcttcgtcagatctctcaacgccgttgatttcagttccattactgctgcggctagggattcgagataaaacgacctcgttgaggtagattgtaactttgacgaggcggcgatgtcaccgtgtttgtcaatgatcgcttcgagcgtggcggcgatgctcatccgtaccttgtaattggcgacggagacgtaagtctcggatatcgctaattgtatctcttcctttccgtagctttgaagtccgcgcattctggcgatctcctgcatcgtgaagttctgtgactcgtccggcagctccggcggctcgaattgcctgtcttgctcgtaagtctctaccgatgtgatctgatacttgtagtgaaccggctgcacaaaccaaagcaatttgaatttaagcatttccttcacactttggtaaatagagacccgcgagagaaaaaaacgaaccgtgctgcttcctgagactcccctggaacgacgtccagtggcaatttctggaaagaggtaggtggaattgttgtcgtcttcgtcgtcactggatgagtagaatggcggtggtggagagtagcttgtgtgttgatgaacaggactcattggagggctgttacgcggtgtgatatcggcatctgcctcgtacatcccctcgaaatgatcttttgcgttgttgtagctctgagtctgcaactaagtagagtcaatatatcagagagtgagtgattaacaaaggcgttaaatcatcagagaatgaatgattgaatccactaacccttgcgtgtggagagcggcttcgggatggatgaaatgggctcgaaggagcgctgttccgcgaagttacattgccctcagcttcatatctttctctactgtagtctcttccacgttcatgctgcaatttcaaaagatttggtttttagtcgaggacagagactaaatgacaagtatgtaaaacaacattgagtaggattagtacggtgttgtagggagctggagagccgcttctggaggggtgaaatgggctcacattggcatctgcctcatacattctctcgtacagctctttggttatctcgctagacctcttacgacgatcaggctgcactccactcacagacaaaactttgttactggttccaaatcagcagattgtaaaaaaagaacagaagtgatttggtaccgtgcgggttctggcagatcgaaaagggctcccagaaccgttgctccttggagtcacatcctcatcaggctctctaggacgctcaggctggagtttggaacaaagaatgaaaaccatgggaattgaaagaaactgtaaatctcatcacaaggagttgagagtaccgtgctatatctgtagactggaggccgttggtgggaattggggatgcgttcagaggcttgctgttgtggtttccagtgagtggtttgttcatcggagatgggaaacgcgtactctgattccgatcttttcatgccgaaatgagttgtcggctgagaccgaccctcagcaagataaggagggctcgacgggttgctcttgctcgcacttttgtgaccaaacaatcctgtagacaccagttcagtttagccaccatctaacctaaataagttttctatttgtcatcatcatcatataacaataagtagaactgacctgctcttttgccatgtctcttctctcttgaatggaagaaatccatccccggatcggtatgcaaacctgcgtgtacaccggacaattcgatcagccagagtccattgtataatagaatcatgtgcatataaaaaagtacctgggatccaactaccaaattcttaattaggagttttgttatgaactgccgtctgagaagatcaagagaagacaaaggtctccaacaattactcttatattattatgctagaaacgacatggtgtggtcatgcaagttaataacctgaaaatgacaatcacgacaaatattaaatttgtgtcagttgtataattgatttgatgatggaggcttctatccaactgtagcagccactgacactgacttggtcaattttggcaactctctttgaaaaatatgaagaccaaactactaagaaaaattaacatttacacgaccataaacgtcataacgaatcaatccttcggctactaaaaaggtgacaactttattttttaataggcgcaaatgttgacaattattgtttataagaatactaacgggctttgaaatggaccgaaataggcccaagaggggtttaaatgaagataaaccctaagctgaacaaaccttctttcctcatgtgcgtcggcttcgcttctggaagattctgaaaatcaccgatttcgatggcgactcggctcaaggagattgtgaagaagtacggaaaagtcgcgcttggagtccatttctcggtctccggcgtctcaattagtggattctacatcgcgatcaagaacaacgtcgatgtcgaatcgctcttggagaaataccaaatcccatggttctccagcaaggaaaaccctaaccctagcctcgatttaaagctggaagagcaaggttccgttacgagcgataacaagacgaaacagcttgcgaaatcggccggcggagccctagcgttggcggttttgtgcaataaggcgctttttccgatcagagttccgatcacgatggcgttgactcctccaatcgctagattcctcaggcagaggaagatcctcaaaaccggccaatgactatttctctctacattttcacatttggggtcttgtctatgttttctcaccatctgtattggttccatgcgtttt

SEQ ID NO: 35399 - DNA, 1908 bp, Arabidopsis thaliana landsberg
catgagacaagtcaaaacttttaagaagcaacacctgttagatttcctgtggcgtttctgcaagcatagcagagaatatcagcaaaaggtgttggcacgcatggagttcattgatcttatccagatctgtggcttgttccgatgacagatccctccacgcttgataatatgacctgaggagaaggattcaggtcaagatttggagtgataaacaatgcaaaactttggaatgatgagcaatagcggaatcgtttaccatctccagcccggaatagcctcaggaggactactaattttagaacacagagatttgatgagcttgtaatcgccatcagactctgaaaagaagaaagaaattttttagcttcagatttgtagatgtcgacatcggactctgatgtagatgcagcttaacacctaagaacaagcctggataattatatagtttccacagatcatttttcttaatataacgccaaatgaaaaagacaagcaaaaatcttgattccaatatcaaaacccaaacctaatctagtcaagagtctcaattctcaatcaaagctaagtaattcggaaaacaagagttgtgtatgtcggtgaaaagcagcatacctccagtcccgaggtcattgtgaagaagcatgagagaaagtgcaaatacaacagagggaagaagaaacatgtagtttgtactcaggaactgttggaggtgcacaattacttcccctattatgtgctctgaattttgcatgctgtcttcgagattccttttcttaaagtattctaacgatgtcagcaaagtttctggttttgttttacttaagaatgttgggtccgaatcactggctttagaataagacttcccaagaataactgaagccgacagccagcgtagaaactttgctaccatagtctcctcttgtggaccttcaatgagtatttttgtatcttcatgagactcactaggtttagatccctttttaaagtcactctttaatgctgtggaggttccccacaaaagaaaccttctcagcttgtccacgtcctgaaaagatatcatatgatacaaacactttaagctcttcaaacaaaattggagggatgctcaatagtcagagaaagggagagagataccatgcataatatgtcaactggcggggtgctcattaatatagtaataagcccactctctgcactagcttcgacttgaggagaaccaaaattagcaacaccctcaaagagttggaatattccctcgattgtgatggtgaaatgtggctggtacatgtttcgtttctgtgaaatctttagagtagcagatagtatcttgcaaatcaaatcaactgaagtaccattttcttgcattgatactaatccatcacccaaaagtgtgtataaacgagatgatatttccattagcccttctagggcagatctttgcgaccactctgtatcgtttctggaggcgagtgcatcagttatgacctgatacaacgatatcacatagcaaattcaattgaggagtacagtattctacacaaaggactcttgatgcaaaccagacaaacaaatatggttgattattgaggaatactgtacacacctccaagacaactacgaagcgcgaatcttcatctccagtgggctttgtagtcaacattgagaaaaatgacgaacaccatgacaacagaccacagttttcaactagatgtcgggccatcttatgcaatttgacggactttctcacaacctgaaaagtgaatgaaagacagatttttgtctgtgttggtctacgagcacaaatgtgaagtaaagataccccattatatattctcagaactggaacttaatattataaataatgaaaagacaactgcataaggtgcaaagataaacacaaagtggcat

SEQ ID NO: 35400 - DNA, 1290 bp, Arabidopsis thaliana landsberg
  unsure (1)..(1290): unsure at all n locations
tgaaccgccgttctccggtcttgcgccgcgtgtcccaaccttgccgtcgcattaccgtgactccctctagcttcccgtcgaccatcggaattactgccacgacattgcacacgtattcaccgcacccgcgttcgtcttcacctccggccgccgcacgnnnnnnnnnnnnnnnnnnnnnnnnnnnnnnnnnnnnnnnaaattaagcccactgttagcttcgcaatatcatcacacactacatcagccagtattgcctccagtcttgcaaccgagagctcgaatttgggatttcccccaaaccagtcgaagaacaccgtgaaacaaacctccccgtggccagcccctttccaggtcagttcatcgctttctctcccttgtttgagcactctggatactcggtgatgcttactgagccttcaattgagactaggagacccccactcgtcgggaacacgatcaaacgatcatggtcttcgcggttctcgtgggcaggcttgtatagggcaccaattgtgtaattaacttgggggaattactcggggtagcttggatttggtgtccgccgctcgggtgcgccggtcatcacctcaatcggccggtgcagtggctcgccggagttcctccgtgcgctgccgtcgtcgaggacgtatcgggtaaagaaatagaaggggaagggtctttctgtgatttgtcagtgacttgcgaaaacagtgaacgaccctgttctggtttagtcaaaacgccgagggcctctgcgcaaaatctccctcgcacggcgggcgcgccccgttttctctgaggcttgggccgtctgggccagaatcggcccagttctgtttatccctttttctttttctttttcaggaaaactttagaaatgtgtagaaaaatgtagagaaatgctaaaattggaaaccaattttcctaggtttgttattttctctagaatttagtaaaaataagtttgtgatttttagtggaagaaagaaattttagggtagttaaagtagttaaaagtcttggttatagatttttagaaaataattggtaagtcctaaaatgcccaaaatttttatatgagtgtgatacattatttagaagccttgggtagagtttgaattgatttggaccttgtttgatcaccaaaccccaaaacacccccctgccctatgaactcctttactgactccggaaaccctaagttcccggaactccgtgaaggaaagttgtattcaagacataaataacaagtttatgctatctttgcatcctacatgagcatcccatggc

SEQ ID NO: 35401 - DNA, 1459 bp, Arabidopsis thaliana landsberg
ccgatcgccgcatagtcccggtatgcacattgtgccctttggtaaagcctccttgaaggtccttttgttgcatggtaatttggatatttgggtttcttgtgctaataatctaccaaacttagatttgtttcataagacattgggtgttgtgtttggtggcatgaccaatatgatcgaaggccagttgagcaagaagatcactagtgatccttacgtgtccatatcagtcgctggtgctgtcataggaagaacatatgtcattagcaacagcgaaaatcctgtctggcagcagcatttttatgtccctgtagctcatcacgctgccgaggtccattttgttgttaaggacagtgatgccgtcggttcacagcttataggaattgttacaatccctgttgaacaaatttactcaggtgcaagaattgaagggacttactccattcgagacagcaatgggaagccttgtaaaccaggggcaaacttatcattatcgattcagtatactcctatggacaaactcagcgtttatcatcatggagttggggcaggtcctgattaccaaggggtacctggaacatattttcctcttagaaaaggcggaactgtgagattgtatcaagatgcacatgtcccagaagggatgctccctggtataagactggacaatggaatgtcttatgaacatgggaagtgttggcatgatatgtttgatgccatacgtcaggcgcggcgtttgatttatatcacaggttggtcagtgtggcacaaagttaagttgattcgtgataaattaggtcctgcatccgaatgtactcttggggagcttctaagatcaaagtcccaagaaggagtgagagtcctccttttgatatgggatgacccaacttcacgtagcattttgggttataaaacagtaagtacacacacccttgactgtcctttcttttcgtttctattttttttatatcttctgatttggatatcgcatctatttaatatttagtgtgtgcaattcggaatatatttagattttcatgaaatgatagctttggtaatttagtattacattggaaaagcctgattcatgttgtaactacaacttcattttgagatatgtaccttatctatttggtatggcttgtcatctctcatattaattttaacttttgactcagcttctcagcttgaacaggatggggttatggcaacccatgatgaggaaacacgccgtttttttaagcattcctcagttcaagtcctgctttgcccccgaaatgctggaaagcgacatagttgggtcaagcagagggtagagtaccactttcttttccctttatatttatacgaaactaggaatggatcctcagtgttcatttttgacttaaaagtggttggggcaatctacacacatcctcaaaaaaacgtaatagtagatgctgatgctggtggtagcagaagg

SEQ ID NO: 35402 - DNA, 1781 bp, Arabidopsis thaliana landsberg
  unsure (1)..(1781): unsure at all n locations
atcctgtaagcagaagagaaaagaaacccaaaggtaaaaagtatgaaatgtaacaaaataatcattttggagccttttgcacaatgtgttttctctcacgctaatagaaaaatccaaaagttcccatgaacaattcgaatccaaagtttaaaaaccaaaagaaaaaaaaaatctgtaacataaaaaattttaacaattagagttacaaacagagcacacaacatcaagaaatcatggaagaagaaggagagaaacctaaagaatagtgatcgagaatcaacgatctctggttattgctatggagacgaaaccaaatctttttttatcatccatgttgtatctttgcagctaccaatctgatcttatcttatgtaagaatttttaaagtaaaaataaacttctcttttttgtgtttgtgatgctaacgacgaaaaaaacaaaacaagaaactcactgtgatgaagaaagttggtttctttctctacttgatatcgaaataacaactcttcaaactctgcaacggaaatggctgttcttcttgatctacaattctcacttctcttcgtcgatttctttctatgcttcaatacctgaaaacgttaatcaatctaattacttttcaacaggcaaaaataaatgtagcagatgagatgcaaaaggaaaaaagtttgacatcgatgagtgtacctctatgtgtttgtctatttccgacattgtagtttccggagtatccttctgaggcattggctgatgggtctgagcctacattgtcaataccaaagccataagagcgagacaagccgtctaactcattagaagactgatgatgaggcattgactgctgccatgttgagtcgctataaactgagctgcctctatacaattcccctatagagccatcaaaaccgtttgtattacccgcgaatgataaccccgaaagtccagaaccagccccatagcttcttccatagccattgttatcgctcaccacagaagaaagtccccagtttcctctgttgttaccaaccgaaactcccaagttccaacctggaccagaggaatcgcttctgtttccccacaagtctctgttgctcgggttgtaagcagagtctcctctgttgtacccaattggagagttgaaacggnnnggtgaagcactcgcgaagnancggnggccagggatccggctatacccaagagngnnnccatcaaagtttgaattcaaattcagttcttgattcaatccgagcccgaagctagagaaagcatttctaccgctaccaataggactaaaccggccagcagagcctatattattattattataaccaggaggaaaactattgaagtagctattagcagaagacctattagggactactccatagttgttaccatacccaataagtgggcttctgttaggagtagtcgaggagagctcctttggaacagctcgcttaacctcaaccattttaccatttagttcatggaatgtcttgagcaataccttttcaaccgcctcctcggaatcgtaggttataaacccgaaacctctaggcctttgtgtgttgtgatcatacatgacaaccacatccgtagttgtaccaaactgctcaaaatacgtcttgaaatcactctctgtaaccgaagaaggtaatcctccaacaaatatcttccttgtgcgacctggaccaccgggagaaccttggatgctactgctgttgcttctatttaccatgttttggtcatctctgggaacagctttctgagcttcaactgcg

SEQ ID NO: 35403 - DNA, 2515 bp, Arabidopsis thaliana landsberg
  unsure (1)..(2515): unsure at all n locations
cccacagattcttcaatgcggtgtagtgcacttcgacctaaggacttggttgtcgaattggaatttcccgtcccaatccagaggaatcttgaagcacacgtaaccgcctcgagggcacttcaacctaaggacttgaaaaaagtcaaccgtggcgtgacaaagaagcatgccgtcgatccggtggtatgcgcacctttaccagaaacagatattcaatttttagtaacgagaaagttatatatcctaattaaatcaaaggattttgtttttacattaacctgctaagaagcacaaggtctcggtttgtaagaccttgctctctgaactttgctttcaaagttgcgatagagtcttgagcgtctggcaacttctcagcgttttttacattcgagatccgaccatcgtttcgacctgtcggaacctcgtagaaggatcctttcgcctattgtatacaaatttgatgttagataacccgtcaatgtacgtataataaagaacattgagcattttttaaaattatatttgtggggtatattactgttataatggcgtctctggcagctatagcgatgatgtccgcacaccgctcagtatgggggcaagaccgctctacggcagattttaccttgcttatactgttggagcctccaacgccggctaagaacctactcaggtagtttgaaaagcaacacagtggaacaagccccccacagtgaataacatttccgcaatttttgaatatattttgcgtatattttgcatagattttaccttaagttgacatgtctaaccaaaccaacctacctttgaagttagcacaatatcatcattttgttgatccagcttacaaagaattgtgtgtgaccattaattttgataacaaatacttatataataactttctatttacggaaatatttgaaaaatcactatatttttatttggaaacatcttgataagaaacaaactaggatttattcaaatcttttttattttccgattccaatatggtgggattgaatatctaatagattaatagacgtatatgcaatgctacaataattggtataaatatatcttttcataattcaaatttgtttattttgttaaaccaacaaactcaaattgttatacttaactatgtatgagatcttggaaactagtttgtagcactgcataaacgtctaatctctccttcagcaccgattttcactccgatagcacccatctttatcatggctttagtgaaatccgcagcaaaattagcctttgaactttgattagtttctaagtatgaatcaatgattttcttcatattattgtcttggtataaaacagagtccgatagaatgacacctctgccatttttgatgttttggaagatttggttatcaaacacaaattggctatcccagtccaacggaatcctgacattaacatcaccgccttggggacactttgacctcaggatttgaaaaaattccgggtttatcgtaggatcttgagcatctaaacgtggtatgacaaagaagcaagccgttgtaccaatagtatgtgcacctttaacaaaaataaaattcgagtaagcaagatagtgtttttttttgtcttttcaaaatagtatttaatcaagttgttgagattatgataaataccagcactaagaagtacaagatcttgatctgaaagccctttttctctaaattttgatttcaaagtatttatggaatcttgaacatctggcaagttcttagcatgatcaacatttgcaatcagaccgtctctccgaccggttggaacttcataaaatggtccttttgcctaataagttaatatttaacatcaaaggatcttatttaacccaacacatatacatcgtacgtgtattaaaaaaaaagttctataaagaagtattaaagtgttacctcagcaatagcgtctctagcagcaagagcaacgatgtcagcgcaagacacaacgcccggacaaaaacgttcaagctctgatttggcttcgtctataacatcgaaaccagccacccccgcgttacccgcagcaaacctttcgtcatcgttcccaccatgcttgattagtattgacccatcacaaccctacaacatacaaccaaaccaatttatgtcactagctagttataaaaaaagagattttacttcgtttttntttggcccttgcattggacctcgacaaagcaatcgtggaactggagacggagtaagacagcagccttccctgggtcgttggtcaccgcctgttgaacaacatcacgaacgattgactctgctgatggacatgtttccgagtagaatccaaactgaagttgtgccgctgaataacctaattgatcatgaaaatataacaaaactagaaataatgcaatagtgatcattttgggatcaaacaaacgaattgatatatcttctcgtattctacggctcatttttgatgattgtttaagataagttgcaaagtttttatatatgctcggattatattt

SEQ ID NO: 35404 - DNA, 7230 bp, Arabidopsis thaliana landsberg
tcgtaccccacgagtctctctatctgtacaaagatacgtgattccgaattcgccgcgaccgagtctcgtcctaagatgtacttgtcgctgatctgagattgatggctcataggaatcacacgtaacggtgcgtgagttcttaaaccatcgggatcgtcgtatgggtttcgttgccgtccccgtggaggtttcttcttctggtttggttttgagttgtctgggtcaaacttgacgcaggcgatacaattacccatggctgagtttttgaaactcagcagaagaataatgaagaaagtagtttaaagaagttttcgttggtgcaaaatccggcgacggcgtagagttttccggcgaaccggtgagttgcagagaagaggaaacacgggttcagctgaagaaagtttcgaccttttcgtaaaattgatcaaaatgattataattttttttatttatatcaaaaagaaaataagttaaagcgacttgatctatctcccctatatacttaaacaaattaattacatagaaactgtaattttgagccattttctaacctataatttataaaaattgtaaaatattttcagtgattaacagttaattaattgtattattattacagaacaagttttagtctctggtgttgtaactaaaagagtaagtaattaaaataactattaaaaaaattatagccttagatctgttgataggtggtaaaatgaagggtagagatgtagcttacgtggaaggggagagtttgatgaagttgttgactgtagaagtggatacggtgacattgtcaaaaaagtgtgacgttggtttcatttgatttggtatcccaaaatattttgttttgtttcaattcagtaattattattgtcttcttgtcttatattgtacgcccgtgaaccggaaaatcgattagggtttgtttttaaatcatccggtttaattggttgggttaattggaaaccctaaagtgtgcctataaaagaaggaaactcgaaattagggctttagttagccacttttcgttttataaaggagaaaaagagagaaaaggagaaggagcagaatcgttagggtttgggagaaatcagtttcgtcatatcaaatcgtggtaaaagtttcgtgagacacattttctcagacgcgaattaggaccagcgaagattgaaactgagatcgtggtctcgtctgttttccgatcggcacgagatttggtgggcagctttgtgacgtctgcagctaggatttcaccggagcgattgaatagttaacggacgtttctggactgtttcagacgcaagattagtttttatcgaagaaaaccagttttatcgagaaatagaaattttaggttgagacaagcaagcggtgatcgaatgggattggatgcagacacaacaaggtttagtgtagtatttaaaatacttagtcatttatttttagcagaataggtaatgatcattgtctgcgtacaatggtaggagaatgctcggtacgggcatgtaccgtgagtgagcagaaagagtggtcgtggacgggccatgtcgtgagctgcttgtgcagctacttgtgtaaggataaggatgggcgttttgataaggataagtattagtttggataaagataaacatggttttggataaggataagcatgagaatggataaggttatggataagccaagccctatccattactttgcttgcactccaagtaacgtaacttgctctccaagtttcccaaacctataaatacccacgagatttcacttgtagttcattaccatcccacaccaaaacctttagcttaaaccgttagatagctagttagttcgtcggagtccgagtcgggtagaagttggtcgagtcgagagtcgtagtcgggtaataaggtaagtagttccgcccttagtcttttattctttttagaatatttttcttaattttctttttggtccgacgcttagatccatcattaatacgcgttggagatagctcggtcggatcaaaattattaggcggtcaagggtagaattttaatctctcgacattaaggccaaggtgagtaccgtagcgtgtgtagtagcactcgacaaggttttatttttggggttatgatagttaggcatgaggttgcatttttatacttagtataatttatgcatttattgttgatagtcggatctacgtttttccgtaagatcggcttggttgttgattagatcttgcattcatgcttcatttattttgggatgaagtattttgtgtgcttaggttagacattagtttagccattatgttgcttgattgtttgattgtggtaggatttattatcgtatttctttgcggtaattgttgtttgtttgtttgtttgttcgtaatttttaatccgaattaaattgttagcaagcatgttaggttgtttgattgttgattgattgattgttgttggttaatcttgtttcggcttgattaacctttgtgtgttagttgcttgatagtaggtattattacgagtagtattaggttacattagactcgtaataagtaatgtggttagtcatttttgtgactaaggtgtgacgatgtcatgattatcccaatggcttggaatggttcgctaccacccgggactacctgacggggtagtaaaacttttaccgtaagggagttggtctcttttacacggtttggagtggggaagggatgtaatcgttttagactttgtgtctagcggtcggagacattgccttgtgggaaatcagcatcgtatagtatagggcccgtaggatgaagagacgttagcatgctagttttagaattagtagtttccgctgcatatactctgtaaagagtattcattgcttgtttgtttgtgttgtgtgatttcttgtcgagtatactcaatcgagtatactcgtattgattgtttgattggcgattgggattgggattttttgttatttgttagaaacccggactcactgagtaatattagattactcaagattctactttttgtcttacaggtaaccttagttggggacaccttaagggaagcacggacgttggggaaccggtgtagagtttgttatctttgtaaaatgagatttgtaaattgactcgattttatcattaggctcgggatcccattccactgtaagtgttttcatgttttagtaaataaaggagaaattttttaaaatccttgtgtacttctgatattagtcttgtccggactaacacaacttacggatatgggacgctgtgaaaagccttaggccgtgtttgtgaggaacgatgttcgtagatgagctgaccttggtaccggatgtgttctgggaactcggtcggatcgtctactggcatctcaagtaacgcttccggattcgttcttagtcctagaacggttcgggggtgttacaaggggtcttctatttctgcaaaagttgcattgaatctagagatcgtttcttcttctcttgcacttttacttcggttatctgggacatgcttgctagaggtttgttcaagcgggagtatacaagtgattggtctcagctcatcaatacagtcttagccccgtgaagtaatcgagttgacaggttcctcatgcgatacttctttcaagccaccgtcaataaagtttggagagaaagaaacagaaggtgtcatgatgaaaaaccaaattcccgagctatgcttattcaatagatccataaggaaatatgaaatcaattattcaccattcgaaggatgagaccgacgatacgacgctagatatcaaggttggctctaaagtcaagcttaatcacaatacatctcaaataatttctgtttttcaatttgtttctatcaaacacacgaagcactagagtaataactttataattttctagctatagaggaataactatcagcaaaattgaatatatgtgtttatatttcatataaaaataaatcacaaaacatgtagcagaaaaaaaaagtcaaagccgcatagtagtaaactcgtttgaaactgaatcctaaaagtgtggttgaggttcaatacttatagattaatgtctaaaaaatacccgtcttttttgtgataagatattattaaaggctcaaacgagcaaatcttcggggaaattgtttacataagtgatatgtagcggttatgtacaaattttccgtgccaaataatccgtcttgacctttgcattacgagagattaaagataaagaaaaataagaaaattcttctgtgttgctttgaaactcctcaaaaaatgttcaaaagactggccattcaattggggaagacaccatctttcccaggtctgaacagtctgcaaaaagaattacttcttggttgtcggcattgatatgtcctggtttttactgatttctaacatagtttcagaatggttttagagtctttccagtcttttcgtatgttttgagtcatttcagttacacttacacatctgggaactatggagcacaatgaggaattttggaagcttttcagcaatgaagatcttaaaagacgtttttcagaagttggtgtcgatcgacaccacacctgtgtcgatcgacaccacacctgtgtcgatcgacactcttattgctgcctagggaattctcgttttctaccaagtctttgcgaggccatgaagtcttccatatttgcaaagtagtccctccacgtttttagtcacgaatatacctaattgtttggtcattgttagacctaagttttgttttagagattgttacacattttgagagaagaatccaatccttttagagaggattctgaactcccttacttgcattcttaaatcatcaatgcaaactatttagattatgacttagtaatcaccttgttgggtttagggagtctcaatagggatttagatggattagtagatcgaaaaccccttaggattatttttagagttcttcatcttgattattcttattgctagttttagattgatcatctagaacttgatattagataataggtatgtccgccataggtacttgttattagaactatcatagatgagccgaggcatttaagaaagaacaggtagtctcatagaagggctcttgtttagatactaggtgaacttatcaagcttattaacaatgcatgccttagcataggatttctcgacttctttggttatctagctttaagtatagagagtttcgcggaacgccaccggctactctagaatcatagtttgagttcgagaacggtgcgttaacaatcctaatattagctagatctacgatttatctatctcccgagaccattacttagacccgacgcttaaataacttgaatctacaactcatttacttgcttatttgtcttttacattcaattacttcatctagcttattaaacaacatcataagtctattgtgtgaaaatcgagagttcactggaattcgacccttaagtgctaacgacgatctgttattttgagggagtaagcttaaggcagtttgagctatatcaaatttagcggcgttgccgaagttctattttagttcaccattagactaggtgtcattttaagtctagatattacttttctaccacctattgacgtgtttctttgtcttttggtctcttgtatttcaggtaccttcagattgagaatcacgttcccatggcagactttcacggttatgtcgaccaacaccatcagggtgtcgatctacaccctctgcagaaccagactgctacaataggcgattttaacagaattgacctcttctacacaaaccgatcagcattcaagctacctccattagaaagagatgactttgctatacaccctgcctattatgatattgtatcaagaggaaagtttagaggagctcccgacgaatcaccattagatcatttggaagtcttcgtagacatcgtttcctctattaaagcagacgggttaccatgctgatgaccttctttgcaaactcttcccccactctctcgcgagcagaggaacatcatggttgcgtcaactggaaccaggttcctaaaccaattggactgatacaaagaatgcattcatgaatcacttcttcaatgaatccgtgacagaggcaattcgtttgcaaatttcttcgttcacccaagctccagcagagtcccttagagcatcttggctccgattcaggtcttatgagcgtgaatgtccccaacatggtttccaagagagccaactaatcaaaatattctacaaaggaatagacaagccataacagattcaactcgatgcagcaacctcttgtaacatcatgacaagaaccactagtgaagcgttactcctaatcaccaatgctttaattggtcattcgacgcagcagaggtgtacctcagtcgagaagacaaaaacaaaaacacatagtcagtaactgaactgaaaattgaaaaagaacttgatctaagcaagtctgaaatctcaaatttaacaaacaaacacccaattggcaacgacgccaaattgataataggtttttagtcaattatcctaaaacaccaatcatatcgttgtagtattttaggttgtcaatccaaatgggtgtgatgctaacaatcaagatgtgatcagaagtcactaagttaagccaagcaataacaggttttggtgtgttctagcagttctaagtgaacatgcagaaaacagaaaatcaaacagaaatagtaaaacactcgaccaacacagctctttgcagagcattgggtaaggtcgagtgataggtcgagtaatagacagaaaatgaaacagggatactcgactgcacagtctgttgccagacaactgggtggtcgagtatcaggtcgagtaacagtaaagaaatgcagaaactaagcaacagatgacaagatgcagtaaacaacagtagagtaaacaaagaattcaatcaggtaaagaattcccgaggatggggtaatcgagtagcttcgttttctcagtttacaggtgattgacatgctcaataaattatccctagacaacaagttcttaaccaaatctaagtgccaccgcaagagagaccctcaagttaacctagtcccagactcaatcaccattgacgagagctaacctaacaggcattacgaatcaacaagttaaagccaacacgctcttgttaaccaataccttggtacagggccacgaatctctggaattagtggttcagacatttcat

SEQ ID NO: 35405 - DNA, 1574 bp, Arabidopsis thaliana landsberg
cacagcagacatgtcactaggagcccacgcgatagttgacagcacaactgtacgcccctttcttataatttgagcacgctgctctatctgatgggacgaggtagccccggtgagagccgacctcaacaccaaagtctccacagtagccggtatgtcggaagtgacatgacgacaccgtaccggatgaacaaatccacacacacgggaggacgacgtagggcccacgatgacaggagaaagtcgtgtcatatgaatcaggcctagatgctgaaccatgggaccagctgcgtgtcatcgtgggaacgtcaaccacgaactcgccacaggaacaagagagatgggcggcaccataccggaaacactaccttgcgccacccgaaggatgggaacccgccacgtcaaccgaagaccctcgctctctccctctctctctaagagacaccaatgtaagacctatcccttaagatataaaaggaaacacccttcttctcctctcacgcaagcacatcaattgtaacacgcttcaaacaatactacggtcagcactacactggactagggcttcgacctgaaccagtataacccagtgtctcatttctttgctcgaatctctttgtcggggaccataattaggggtaccctcaagacgcctaattctcagctggtaacccccatcagcataaagctgcagaggcctgatgggtgcgattaagtcagggatcagtccatacgagcgactcgatcacgcctcgcccgagcctagcctcgggcaagggcagccgaccctgagggatttctgtctcgccctaggcccccctttaacggcggacacatctccggctcgcccgaggccttgccttcgctaagaagcaaccctgactaaatcgccgtaccgaccgaccgagtcgcaggagcatttaacgcaaaggtggcctgacacctttatcctgacgcgcgccccccggcagagccgaagtgaccgccgtcacttcgccgctccactgaccggtctgacagaaggatagcgccgcctgcgccactccgactgcagtgccacttgacagagtgagactgacaggcagtcaggccttgccagaggcaccataggaaactccgctctgcccgacccagggctcggactcgggctaagtcccggaagacggcgaacttccctccgcccgacccagggctcggactcgggctaagtcccggaagacgacgaactcccgtccgcccgacccagggctcggactcgggctaagtcccggaagacggcgaactcccgtccgcccgacccagggctcggactcgggctaagtcccggaagacggcgaactccgtccgcccgacccagggctcggactcgggctaagtcccggaagacggcgaactccgctccacccgacccagggctcgtgtgacaccccagtgtcacctagggtttctctcaaatgccaaaccaagaatcattattttatgggagcttaagtaagcatgagcatcaaaataactcaagtaataaagaattcacccaagtacgtgcttaaaaagtatcatgatcaaacaatggagac

SEQ ID NO: 35406 - DNA, 3189 bp, Arabidopsis thaliana landsberg
gaacaatgccgacacagctcaattgcttctccatgtttcaactggtgagtcttttgttatggatgattatatctttgtattaggatcctgtaagacagtattatcttattatagtactatcaaaaaattgttaattattttaactaactcaagttggtaattacaaaaaatattatttaatatgtaatgcttataaatttatggaaattttaataaaaatttctgtgttaaaattattcaactgtttatattctatgatatagttcttgaaatttaatatcttacttctatcttttttattttagcttatgtttgcggagaaaaaccaggtctcctacctgaaaaaccgttcgtcatggaagagatttgtaatgagaatggtcttcaattggatataaatctcgaaagggagctgatgaaacaaagattgaaagaactcaatgaacaaggttgttcagaagaagacactactttctacatgaaagaactcggcatggaaaggtgttgttgatgattgaaatatccttacatgctactactcatcagaatggaatgaaatatagtttggtattatgttaatgattaattagggcaaagcttcatggatggccaaacacatatgttttcaccaaatcgatgggagagatgcttcttggtaaccataaagaaaatattcctctcgtcattatccgtcccacgatgatcactagcactctttttgaaccatttcctggttggattgaaggactaaagtaaatctatcatcaattacgatttttagttttgattcaaaaatttaaacatactttgtcgttagtctaaggcagaactttcatttatgattgaataactcaagatttctaactaacctctctagatttttcctagctacaatttttctcacagtagtgatacatttgtatgtagaactgtcgacagcgtgattattgcatatggaaagggagtgctcaagtgttttcttgtcgatgtaaactcggtttgcgatatggtaagttgctaccatgactaaagatttgtattttcctaacagtcacatatcttaaataggggtgggcatttcgaattgggtttggttcggttcaatttatttaggtctagtaaaactctaactaaaatcaaccgaaattagtttgggttggtttgtgtttggataagtttatgttcggttctttttggttttattttggttcaaaaaatcaattatcgtaaaaaagcaagattctttagttcattgttgtttgaactttgaatttgataatatattaaagtaagcaacaagtttaagttgtaagtttaaaatgaataattcaaataaaccatgaaaagaattacatatttagttatttacaatattattaatataattagttaatcaaataaacacactaagttatcggttcagttttgttttaaaccgcacctaaccgacccatttggattgagaaaaaaacataaccgaatggtttgattctaaactttggtttggtttgggttggtttggtttggttcagttcgattaggttaaaatgttcacctctaatcttaagtatagatttctcatcctccttatttatgagtttattatttaaatataataatattaactaaaattaaataaaactcaaactcttataggtatcctaattatttttattgggtatgatatgaaaaacagataccagcggatatggtggcaaacgcgatgatcacagctgcagccacacatgctggaggttcaatggttcacatggtgtaccaagttggttcatctcaccaaaacccaataacatatggagagatccgtgaaattttgttttgttactttaccaaaaactcgttgcgcagtcgcaatggctcgctgataactgtctcaaaaatgaagctgataccaactatggctttgttcagcctctacatgaccatacgttacaaactacctctccaggtactaataagaatgagagggattttaaattactttagtatatttacgctaattatgatcaaacttataattactttctaacgaagaaaactaaatgtttttttcatagataatattttggtaatgtatagtgttatgatattaattctttcttttttcctccatcagttattaaaattggttcatataatatatccttcaagggaaggagacaaatacaaaaacaaaaaccgcaagatcgatatggtgatgagattggtaaagctttacgagccttacgtactcttcaagggcatgtacgtagaatatccctattatttttctagtgtgaaattttaactctctattagtcacaaaattaaatttcaaaggatggtttatatatttacataaatcaatttgtttttccagattcaacgataggaatactaaaaacttatgcgccaagcagaaagaagaggacaccagaaattcagaaaatttgatgtttgatttcgaccctaaaatcattaaatggaaagattatcttataaatgtacacattcctggcctcatcactcacgtgcttaagaagtaaaacacatacaaattttcttttctttttcaaatgtatcaccaataagttaagaccgtatttatttgtactgcaaccgtaatgatgcatatattttgtaactacgtatgtgttgttctcatataatcttattgtttcaaattaaataaatgtttttgtttgagttatgatttaacattttatatcgggaagacgagaaatcctaaatcgccaaggcttcgataagacgttggttcaccccctcttagctttcttgaacagaaactttaaataaaatattgattcattgaacggaaaatggaaaatgtcttcttcttttaattgaatggaacacttgtgctgcaagcaacaattttaaaccggtgatcgcagctgtgcaaagctaccgaggagcagtataaaatgctctgcgatcaccggtttgaagtatagaacgctaccgaggagcttcgcaacatatcgcacaacaggactcctgatatgtgttatcttcgttgtgcacgacttatatgttccagtagctatcgtgttccaaaagtcatcagcaactttgggaactcaaccggttctcctttcgtaaatccatacatgtcgcagatctcaaacaatgtcttgctgtactgctgtttgttgagagagaatgtaagtt

SEQ ID NO: 35407 - DNA, 1429 bp, Arabidopsis thaliana landsberg
gagagtttataggagacatcataagcatgagcttgtggataatcagtgtagctctacgcttgttaaacatatcaacgctcctgttcatattgtaagcttctcccttcttcttcttccttcatgcgctctgattttctctgtttaagttaatcggttcttcttattgttgattcaatccagaatttgaaatctctctctattttcatcgattgttgatcttactgatgaagaatcgattggtttctaattatagaaagcttacatagcatttgtgtaatcccaatctgagtttgtttgatctggttttgctttattggaaaaaaaagctccaaaaaacgcttatggattagtttgaatctctctggtgaataggtgtggtcacttgtgagaagatttgatcagccacagaagtataagccgtttatcagtagatgtgtggtgaaaggaaacatggagattggtacagtaagagaagttgatgtgaaatctggactaccagcaactagaagcactgagagattggagttacttgatgacaatgagcatattctcagtatcagaatcgttggtggtgatcatagacttaaggtaatcaatgaatcaaaaaggttcgttttctgtttacagtgaatcaaagacttatatgttctatattgtttttggatttagaggtattcttcaatcatctctcttcaccccgagactatagaaggaagaataggaacacttgtgatggagtcttttgttgtggatgttcctcaaggcaacaccaaagatgatacatgttacttcgtggaatcactcataaagtgtaacctcaaatccttggcttgtgtctctgaaagattggctgctcaagacattaccaattccatcgcaactttctgtaacgcttccaatggatacagagagaagaatcatacagaaaccaacctttgaagatttggctagattagtcccacgaacaaactcagtgaaggaaatttagattcatagaagcacgtgtgatcatgcttctctgctgctttactcagatcagctccatgggccattttcgagcatgcagtcaaagttttgatgtaatttgttttctggtgtttgttggacagtgtctgtatttacgcaccattgttagaaaaaacagagctaggtagtatctatattatcaccaagagtcgttgcaggaacattttccgtctctgaaatgatgaacccttgccccttcttgtaaaacaatctcacggtttctcaaaaccgatatgtatttggctacggtgtggctatcagaacatatattcgtgtttttgaccactcttataggagctaagcctttcttcttgataaggccatacgtcattgctaacttctctgtatgtcccataagcagcttctctttctctgaatcacttatgtcttggtgaactgttag

SEQ ID NO: 35408 - DNA, 942 bp, Arabidopsis thaliana landsberg
gttcttcctgtatatgtatctatataatacacggccatttgtgttttcaatcatttttatcttcaaatggcatagggtacaatcgtgtatcattggttctagaattgcatacaaaagattttttgaggattaaatggaaagtgttttctcgttttcaaaagtataataatcttagagctttgttaaggaatctgtgctatttcaagaaggatcttgtgaagagactgaggtttagaaaagaaagggcaatgatcacttcctttgatcttaaaaactgcttcgggactattctctcgaaccagtttctcttgaacgtccggtgaaagagccaagtcatcgagcgtctgaatatagaatctccgacctttcccatatctttctgcactaagtgacaacttctccatcatgggacctaatggtacaggccgcatcgagatcattgacaatgcaatgtcctgaaacaattttaagaaagaaaaattgatcacttgttgcattaggcctatccataaaaacagaacttgaaccactctagattggggctgttactgatcactgagcttgattattctaagagtttaccttatgtggtgattgattgaaatacaagcctttcatatgtggcttctcaaacatgaaccccgtaggaggcttgtctttaccgttcccatagatcaagaactgcgactctttcatgaaccgctctgcggaaccaagctgcaatgaaaacagtgtccaatgtgtgaggggaaacacagaaaaaaattcttaagagatgaaaatacattcaagaagcatgtgtcaaggaaactttgctagtgttacctcatcagcgacgacatcgaagggtctttgtccatcagtaaccatagttgcacaaatgaatatagcttttgagagtttctctggaaaccgctctaacgcataggaaacacatgcccc

SEQ ID NO: 35409 - DNA, 2208 bp, Arabidopsis thaliana landsberg
  unsure (1)..(2208): unsure at all n locations
tatgtttaactgtacagtccacatcgtagaattactaaacatctagtaatgaaacaaatactaaaggccgacggattaataatatccatcttagccaaacaaatataatttatgaacttcatatttttcgtacgttacggtgaacgagattcgtgtagtcgttagtacattgaagaannnnnnnnnnnnnnnnnnnnnnnnnnnnnnnattgatgtgggggaattaaatccttctaattgtccatatatttatagcccgtgggagtaattgggctgggctcttagttgctgatgtaaacgggtaagaaaaacccgacccgacaccgagcaaccagctcctcaaaggaaaagcaaaaacactgaaacaaacaaaatcaagttctacttttttttgtttgcatagaatcgagatcatctatggcggtgattagtccagctacacgtttcgcaccgccgctgaaccggccttttcaccgccgatcaatacttgcctcgtttcattcttcctctaggaacttcctcttcctcggaaaacccactccgagctcgacgatcgtttccgtccggtgccagaaacctgtttccgacggggttagctctatggaatccatgaatcacgttgcatcttcagtttcgtcttcgatcgatttcctaacgttgtgtcatcgtctcaaggtatgtgttgaaccatatagactactaccgattccgaaatcaaaacaatggattgagttaacaacacttgagagtggctctcaatttttgaattggagatctgcatagttatattcattggtcaacattgtcaagtagtgaacttttccttcttgtgtagacaacaaagagaaaagggtggattaatcaggggataaatggacctgaatcaattgctgatcatatgtaccgtatggctctaatggcacttatagctggtgatcttactggagttgacagagaaaggttcggttttgcctcaaaatgtttttcctttatttagatgatagagaaaggctactgtatattgattgtacaatgcattttggaaggcctggtgtatacatatgatttgtttaggtttttgataaacgagcttgtagagctccgtgagggctgatgtatgtacgtttctcttcctaaagtgattggttctatcagaatgcgggtatctaaggagaaaccgatagatcgttgatgggctagttagttattgtgcactttatcttctagagaagtggcnnnnnnnnnnnnnnnnnnngtagtgaaaatgttcctggagttgaatgaaatatatgagcagctagtcagaattacaaaacatgtgctcttaaagatttaggtatgatttgaatcagacacgttcagaaagttgaatgaaggataagatagggagaccatccgtgaacaattgatttttaagtgtgaattccaaattttctggctattgcttactggatttttctgtcttccttctttcttggcatcttaaacaggtgtataaaaatggcacttgtgcatgatatcgctgaaggtaaataaacatttgatcctacttttcaattgtgaggttcgctatatttcctatattcactagttagttaagtttcattcaaaaaatactgggtggtttggaggatacaaacttgtatagatttataccctgagtagggtagtatatgtaatagatacacttggattcgtatatgaaaatttaatttgctgtggagatggaactaaacatgtgttgagagctgattactttggtttctttctctcaattcatatatactcttcttctgcaacttaacgcgtagaaattttcaaagcctcaccactttactggcttccgaatagctattgttggagatattaccccatctgatggtgtgcctaaggaagaaaagagtaggagggagacagcagctttaaaagaaatgtgtgaggttcttggtggaggcctcagaggtatatacgcctttgccactgtcatcttctattgttttggtttccaaaacacttatttataagcctaatgtcaacgtgcagcggaggagatcacagaactttggctggagtatgagaacaatgcttctttagaagcaaattttgtaaacgactctgataaggtggctaatgggtttcgagtttgcaacaatccatggcgttaattccttgtttctgttaagagtcaaaactactcacacaagggtt

SEQ ID NO: 35410 - DNA, 3005 bp, Arabidopsis thaliana landsberg
  unsure (1)..(3005): unsure at all n locations
tcatggagcagattcttttcccagatgtgtgctttgtcgcccaaggagaatggaaagaaacggagcttgaatccgtcttcactaacaccattgatttttgttaggttgcagagcctatcaaattcatccaagtggttgagtggatcctccatnnnnnnnnnnnnnnnnnnnnncccctaaatcatcaagatgagaccactcttaatctcgaaattgttgttctggatagcaggaggtacaattcctttcctctgacggtggtcctgtggtgcatctccatcaccaatgtttgcagggccattctgttgattttgttcgtcagccatttcgagtggttgctgaggtataaggttgactgtgtttctcctttctctgagttcacgaactaggcggtcgatgttatcgctgaaaaggaggttctggttagctgttgatcgagtttgaatatagcagcggtgtacctggatcaagaagacaacaagaaaaacacacagttagcaaccagattgaaaattgaaaaagaacttgatctaagcaattctgagatctcaaatatagcaaactttcacccaattggcaactgcgccaaattgataataggtttttatgcaattatcctaaaacaccaatcatgtcattgtagtattttagtgtcaatccaaatgggtgtgatgcaaacagatgagatgtgatcagaagtcactaagtcaagccaagcaataacagttttggggtttctaacagtcctaagcgaacatgcagaaaacagaagcaatagcagaattactaaaaccactcgaccacaacaggctgatgccagaaggaggatgtggtcgagtaacaggtcgagtaacagacaggaaacaagacaatcttactcgactgcacagtctgttgccagacacttggtgtggtcgagtaagatggtcgagtgattgtaaaaactaagaaacaggcaatgagaacgattaagcgataacgataaaacagagaaataagatagacgagaaattcctaaggatggggtaatcgagtagagtggtatcctaggctattcgaatggttaacaagcgcaatcaagctatccctagacaacaggttcaacaacagatcaattcactcccgtgaatagaaatcctcaagcaaagctagcccaaactaattcccattaccagaatctaactatgcaggcaataagaacagcctgataaagtcaataaacgctctaaacggccaatcccttgggatagagacgcatatctcaggaatgcttgggatcgaattccagttgatcagaaagaaataagcagtaaacgcaactagtcctaaagggattcaatcaattctaaatcttaaccattctatagactgcgaattccacaggtactctatcccatccctaagaattctaagtcactactcagacgacatgctcaaagacataaacgtagataaatgataatattgcataagtaaagagataaagagtagagaaacaggatgacagatgaaatcaaatgcagaatctgaataacttggaaaaatctcgaattataggttgcagaagcaaaagcggcgcaacagagtaaaacagaaaataaaactgaagcaaaaactcaatgtcgactagatgtcccaggaaagaaccctaagacatctatttatacaaaaagaaataaaatgatagtagacgggccaataacctaatcgcctggcccatagagtaataatgggccgagatgggcttcgtgatgcgatggaggtccaggccgcttccaaacacttcgtcttctcctcttctcttccttgtgctcagcttgtctggttgagtgcggatttgagtagactatgaagatgtgatcgagtgtccagtcgagtgatgatgttgatggtgagtgacgatactcgaccagggggtcgagtaaagtggtagagtgaacggccgagtgtggtcaggtggtgtggcgaagtgatactcgaccagggggtcaagtggcgtcatcgagtggcctgagctgaagttactcgacctgggggtcgagcagatgggaagaatggctccaaagtcactcgaccagggggtcgagtatggtgctggatgcacgcgacctggtggtcgagtatgtcttctggttcaggctcgtttcttccaaattgctcgcaaacagctccaaattacctgaaaacaactcagaaatgcaatatgtatgcaaaactatcctaatcatgcaaagtatgcaataatgatgtgaaatgatataaaacagtgatgaatgatctgaaactagactcaaaacgatgatgaatggacactgaaaacatgcaaatgatagacatatcaattcccccaaacttaatctctgcttgccctcaagcaaataagaagacatagttgaaggagaggtttgaaggtggggactcagaaccaaagcatcatgtagagcaaataaaatcaatgtccaagttggtagttctaagatgcgatatgattgaattttactcaaaaacgttagccatgccttgttattaatcaattcgtctcttatactcgacctacacatgctttcgaatctactaatccctttaacattcattagttctggaacgtgaatcaagcaatgcatcatcaatgaactcatttgggtaaggtaaaggtcaagagacaaagatggtcccctacagaataggcttcaataatagggaatctcttaaaaaatgattgagctttagtagaatgctaaaggtaagtcaaaagttatgcatacagagataagatcccatctacccagagtataacaatgaagctctaatggtaatcccaactctagtcccaaataagaccttaactctaccctttgcattcatgaatctttttaaaccctttttcatatcattcttttctttctcttaactctaggagaagctttctcaacactttgatacatctagcggatttgggtttctttaacaactaaggttcctgttttcaatctttaaaaccaaag

SEQ ID NO: 35411 - DNA, 2071 bp, Arabidopsis thaliana landsberg
tatatatatatctaataatgtcgggatagtgtgaactttcgtctacaacaaaacctgatcattaagctatacaagttattgcttttgaaaaagaaagagtacttatttatcttctgatgatttatagagcagaaagatggacaatcataatcggcgacttattcatatactattttttttttgcaggtggactactggactgtacaatatgcgcctctccatttttcatattaacctcaataatattatacagtttacttattatttcggaaccgttacaataaaagttatatatccagtagtgaattataatttttatttacctcgaccttcctttttttggtagaacttatttaccttcttcaccttatgtggtttctgaattatatttccaatgcttatgtgttcatgactattgatttttgggacggacttagcaaacactaaactagtacactgcttaagactggccttcaacgagtaatattggaccggactccgattgagcaaactaacgcgtctcacactcaaatgcattgaaataactagcttgaaggcttgaacatattgtttgcaattgcaagtgtagttttggttttagaatgttttgttggcacaacgttggagatttgaatacaatgaaaatgagattcaatttaaagcatatctgtctctctttttcttttggaagagattaaaggcttatttaaagcatatatgttacggattaaaaagattgtgtgtagctaatttttgtgttgtacccgttaccgcatatttttgttttaagcttggcacatacatatatatatatatatatgttgattacccatgcatatcaaagcggataagggatactgttaactttttggactatccttgttgcaaattttgcaatggtcaaagagaatttgcttagttgctatatcttcaaatgccaagcaacttccactcgtttgtgtatctccgatttaagactcaacacactcctatacaaaatataatatatgcttatatcattcaagtatattataatgaacccactaaaagataaagataaactacatgtaacttaataaacaaggaaaaatatattatttaagtaatcattctcctataaattcattaccctcaactcaccacctctcacaaactcaaaaaacaatttgtgccttctttttatattgtctccataaccaccagataatatcaatattcttcaaagcaatggaccaagaacaaacaccacatagcccaacccgccatagtcgctcacccccatcctccgcctccggttccacctcagcagaaccggttcggtcgcgatggtcacctaaaccggaacaaatactcatacttgagtcgatcttccacagtggtatggttaacctcccaaagaagagacggtaaggataagaaagatgctcgagaaatttggcgcggtgggagatgcaaatgtcttctattggttcaaaaccggcggtcaaggtcctgtcggagaagcgacagtacaggctgcagctgcagcagcggccgcaaccaccaacacttgtgaccagactatgatggtgagcaacagcttaccacatcatagtgggagtgatttggggtttggaggttgtagcacttcttctaattacttatttgggggtcatctcaagttccttccttttttcttggtctctcttcttctccttcttcttgttcaagctcctcttccacttcttcttcagctagctcttcttcttcttatggtggtggatgtgataatcaaagcaatagtggcatggagaacctcttaacaatgtctggccaaatgagttaccatgaagctactcatcatcattatcaaaatcatagctcaaatgtcacatcgattttgtgcccatctgatcaaaactccaattttcactaccaacaaggtaaacaaaagtaaaaacatattttgcatgactctttttttctttgtaagcgaaagtggtttatcctctaaaccctctttctttccccaaaaagtctctaaaactaactattttttaattgtaaaggtttttttagagtaggaaaaaaa

SEQ ID NO: 35412 - DNA, 663 bp, Arabidopsis thaliana landsberg
ctttagtggcgaacctaaaaagtgttgagtggaatggaagaattcaaggcctccaaatctctagggcaagcccatctacctctcatctattgttcacagatgatagtctctttttttgtaaagcagaaccttcccaaggccaagaaatcataaatattctccgcctttatggcgaggcttcaggtcaacagttaaatactgctaagtcttcggttatgtttggtcatgaagtggacaattctacccgaaatactatatatgcaaccctctacatacataaggagggaggtttgggaacttatctgggccttctagagaaaatccatgggtcaaaagcccaagtctttcgtctgtgagagatagatacaaactcgaatgaattcttggtcatcaaaattcctttcaaaagggggaaaagaagtcctaattaaatcacaagcacaagctcttccgacatatgtaatgtcttgtttttctattgcctaaagcaatatgctccaaactaaccagtgcgattgccaacttctggtggattaataaagctgagagttgaggaatacactgtatagcttgggaccaaatctatatgccatctatcggatggagggttaggatttaagtctacgtcagattatattcttgtcctatggactaaccaacctt

SEQ ID NO: 35413 - DNA, 3436 bp, Arabidopsis thaliana landsberg
tgatgaccctttgcgttcattgcccagatttgatcttgaaggtttgcaagctcccaattgaccgtgctcggctctggtcgaggattagaattcgggagtctgatggcgggacctaatggagccggcgtccgagctactgtctcatctgagactgcaggaagacctgccgacggagattggatgactggattttgtgttgacgttgctccgacgtcaaccggtggcgaaggagattgctgaccagaagcttcctgcgaattctggacgcttgggctcgcggcgccctgaaaattgagtcgtgttcgagctcctgtagtccgtgccgttcctgcagaaagagaatcaacccgctcggcatacgcattgtgtgctgacctgatctcggcgagctgatcggaaagcgtcgttacggcgagctgctgtctgtcggttttctcagaaagttgctgaagcagctgcttgatgtcgtcgagagtggaagcttggccgccggaactctgatcgtcggtgttgctcatggtggattgatcgttgctctgaagtaaaagactaaagccccctccttctagcgccaaattgtggatgtcggaatgcgcaattaaaatcttatggttgtttttacgaggatctttagtcttgttaaacgaacaatgatcgaatcgagaagagaagaatgtgtttgtgaattttgtgtatagtattagtatttcatgaatcgtccccattacaattgtcatcaactcgtatttatactcaatacatcggatcaaacgtattaaactatttgctgatttcacgccgcggatctcgccttatttacgtcgtacgttacgaatcttcaactcgggactttaatgcgcagtttaagtcgcgatccttccgtttctgtattaatgtcggatcaccctttaagcggccaggctcatgctgggctatgaattgggcccaattcatcttgaagcccatagaatgcggattgggccgaagtgggccgaatccgacatccacaatttgccccccaagtcctcgaagtgatccagatcggggacttaagaaattccgaatcgtacagttccaagaatcacggaacgtcaactcgagagcgaatatcctcgacgtgagaaaaggaaactgaatcgcgcgattaccgagactttcctcaaatagagtgtgacgcttcgggatcctagggttttagttttcccgctcatccgttccattatataaactgacgatctcttcgccttctgcccaacgattataagtaaacggactcccctctcgcttcaggtaaccgtctctaatcctcctttgatcttcgttctcgctttcaatttttgataggatttagagaacctctgaattctgttaggactagagaacgcttttagggtttagccagcggtttttaggacggaaatccttactaatttctcagattttcaattcagaaaaacgaggattttcagttctcgccaccgcccgttcaccgttctccggtaaaattccgccgcgacctgaactcgccgtcgctatttgtcgcagatcgccggattctggcgaaaaaatcttcaaagtgttcttcgtttctgaggaagatcttcagcagaccttcaaagtgttcttcaacagagaactctcctcagatcttcttttattcgttttggtgacgtcgcgctgtttgtcatgcctccgagacagatctcacgggaagtgttctcgattgacggtcagtttggaaaatacatgacttcgctgtcaactccgagcagacttacgctgttaagaggagctcaccagatccctcaccaaataaagttgatttctcctggtacaaagacttcccctgaatctccacctccgggacacacttgcgccttcgaaattttcttttcagaatgtgggcttttctttccacttcccgacatcctgatcgatcttatgcacgagttcgggatcgccctccctcaactatgtccgaacgtaattcggacagtgttatgtcttcttactctggcggaagaagatggtttccgactcgcgctgtccgacttccttcagttatatgcagtgaagaaaagtcggactaacaacacttttttcctatcacctcggaaaggttttcgagtcttcgaagacttcccagaaaaagatgaacactggagaaagtcttacttcttctttcctgtgaatgaactcacttacgaggagaagtctgatttatttgtatctgactggacaactcgggcgggtagttagcttggcttaggataccattttgaactaactctttcatcaataaccccgacttcagcgatttaaccctttccttgctttcgtttttgcagtgaaggttaccattcctcccgtttctcgcacatttgcatctcacttctcgaacttttgccgtcatgaccttggttgggaagctcttacttcggatcgaatccgagcatctggcaaacgacttcggacccgtcctgaccttgctatctcttcacctcccttttctcctcgtatattttgcaaagctgagatgtctggaccatcgtaccgagctgaaaagaagcgtgagagggaaagagctgatcaagaaaaggccaggatcctgtctgacagggtcgtgatgtcggggacccttgaagacagcaaactccgagctgcagagaaagccaagcatccgatgaccgacagtaaggccaaatctcgtcaagagcctggaaagaccccgtcttccgccacaaaaagttccggagctccgacctccgaagcagggagccttgccaaaaagcctcagagcaaagattcggcgacgcgggaagccgaaaagaaaaggaagaaacctgaagacgactcccgcccttcgcctcgctcatctcgttcccgacttgaggagaagaatactggtacggggaaaaataaagaagacccgaaagaggttcctccaaacctcgtagttctttcgtctcgggaatctgaagctctcaggtcggaacctcgcagcactcctcccccaggtaacgtattattattccgaattgacatgacagggtatactatggcatctcacattgttatgcttttgccgtagctcccccgtcttcctttgccgacatcatgaggactctcgtggcccccggttctgccatcgcccccttcgacgaaatgagggaggtgaacaaggataactaccttcgcttcgctgggaaactcggcaaggtaaaagcctcatttgatttaccaggaaatccgacgtaaaaccgagactaacgtcacctttgattttgcagctaatcttggaattcaactccgtcttctgcagccacgaagatcagctttctgacaaggatagcgaacttgacagctttaggcgaaatgaaaacgagaacgctcatacggtggagagggccagcacggtgctgaagcggatgaaaga

SEQ ID NO: 35414 - DNA, 1117 bp, Arabidopsis thaliana landsberg
tgccccgcgcccgagcaagccaacggccgcgctcagcttcgcaccggccacggcgcccgcgaccgtttcacttctgcgattaatggacttcatttcctccgtttcttcctccccattattctttttggtaaccaacgcattgacggcatttgaagaccgacgacgccctcatgaactccctggccgactctccctctcccctccctctctctataaattggacgtcgagctctctctccattctcccctacccaagctcgcctctctcactagctctcctcgctcgtcgtcgctactgcactgctcgtcgccggaggttgccgttcgtcgccagagttcaccagagctcgccattcatcgtcggagccacgcacccgccatccgaagaccgaatccctgctcttcttcacccggccgaaaccccgtcgagccctccccgtcacatgcacgaacccaaggttgatgacgacccaaattaatttgtgtattttataaaagtactttttgatttgattcatgaattttataattattgtgttttaatatgagcatgtggtgattcggaattcatgtgtatgtgtgctatggatttttggtagatgtatgcgataaattagtgcactgtgattattcatattatttgtttacgatgacttttagaaagtgaaagtatgacgaaaattagtagacacatgttggtgataaaaacactagataggtaattttatagttagttttgttcacaaggaatgttggaaattatttggaggattataatcataaattcattttaatagataatagaagcttttcttaacatggaattagttaatggtatagaattcatggcaatataaatattataggttattagatgattcatctccgattgttattagtgatactttcttttaggaagaaaagagaaaactaaaagaataccactggtcgtaatgaaaatagatttttactagcaaaaatcaaagtgttcatgattgtagcacttaaattcttagaattagtaaaatactcgtttatgtcaaaataaccacggtttatattataaaaagcccaattggtgatttatattgatttttagaatattaatggtagtaga

SEQ ID NO: 35415 - DNA, 926 bp, Arabidopsis thaliana landsberg
agtgcagttactgtatatatccgctctccttcttccttccagtgaacttgaatgaaggctgtgatcgacgtgttgatgtgatgcatttcatcattgttagtacaaggagaaagaaagatcgtgtctggattctcacaaacccttttttgttatttcggtgtttcagaagcactacaggtaaacgcataaattttcgtgtacctggctattttcgtcggtcggcccacgaaaatacatagttatttttgtcgggcccgagggccgacgaaaatttagcttattttcgtgggccagtacatattttcgtcggcctgcccacgaaaataggaaagatattttcgtgggctccgaggctgacgaaaataagctttattttcgtcggtcatagccagaccgacgaacataagtcaattattttcgtcggccttctcccggccgacgaaaataaggcattaactgcccactattttcgtcggcctcagtgaggccgacgaaaataaaggcagttatcttccatccctgccttatctctcgtatctcacgcgccgtctctctctcacgcattccgctgccgccgaagccgccgccgcagcagccgtgccggcgcccgcccgcccgaaggccgcgcgtgcgcgcctgccaccgcgccggtgccgcaccctcgccgcgccgagcagccgagccgccgcaccctcgccgcgccgcctacacacgccgagagtccgcaccctcgccgcgtcgcgcgccctcgacgattgccctcagcgcaccgcgtgctctcgctgtgcgcccttcgccgcgccgcgccacgccaagccacctccccacgccgcgcccactccgaacagccgtcccacgccgcggccccctccaccttgccacggtaatggttttacttaatttatagtaattagttagctaattta

SEQ ID NO: 35416 - DNA, 1262 bp, Arabidopsis thaliana landsberg
tgatctagcatcaatatatattcatatagcagacgcttcaaaatacaatgaactcacccactaatgaaatatgggaagatatttaagtattgacttcagtgctgttataacattgatgtttctctaccgtagataaatacatataagactagagaaagtctccatcaataaaatgcttagcatgagcattttctaatgcaatatatttatacgccttaaactggataaaataaaacaattgccttctcgccaacctcatcttcttctcgtgtttctctaaatacgaggagacttcatatgagaatgaaactacaactcaacccatgctgtcccagttgttctagaaaacaaaacccatggtacctgagcataatcttcatatgatagtcttaaaagattccaaactttaattgtgtgatgaaccccctaaatatcattggtcgaccatcatattgttaattttggtgtgtgacataatgagttaagcaaatataatagtagaactccaaacatctaaataaaattttaacataagaataaagtaacttactttttgtgacaaatgaatacatgcaagaaaatctctatgccaaccttttagttcaacaaagtcgatattttcatgccacttacaagtatcgttgtcatttagcgtcaactcaaaaagttgaggtgtagtataagaaaaattggccaaaagtcaccggtacaagtttttgaggtagtgaacctccatcagttagatattgacatagattagtcttttaaaagtatatattttgtacaaaaaatgtttgtaaatttgatgtaagaaaagaataatcaaactctaaaagaaaagatacaaattataatgaatacatggataataaagaaaaaagtcacataaaactgatatacaaaaatcatgggttttggttttgattccttgttctttcatttgaaaatttctcaattataagaaatttatatcaattatgatagttgccattttttaatagtgcattctttatctaaaatatcagttactctaacacatcaaaactaaacaccaacgaactcatgttgtaggatacgaggtcaacttaccccagttatatttgatatgtaattatatgaacagtcaataatagattagtgactgagtgagactactgagcattaggttttggttcagtttggttaaggagaaacccaattacatgcggttgggtatttatttatttggaaacattattatgtaattgcgataatgttttggc

SEQ ID NO: 35417 - DNA, 3891 bp, Arabidopsis thaliana landsberg
tatttttaagaaaattattagcattgactttgagtttggcttgtagagcaccatattcctcacatccttatcacctacaagtcaacttgttccaacttttaaaaaatcaatttgaaacatgttctgttgtatagtatttgattatttaattctaaagagtaaaatatgaagattggatgaaagtagtgaataataaatacaagtcaccgtatctgtacacatactttctttcacgtttgaagaaacgaagtacaaagaataacaacaacaacaacaacaaaaaggtgcagagtattgaactttagttacaaaagaatcaatttttctctactttggtgaactggttaaataacataataaatttacagatatttctatatagaaggaaaaaattctaacaaaaagaaaaacctcaactttgttgggccttggcgtgcaagttagatgattgttctctcaagcgtcttcaacgaagaccctgaagatgaaatccctgaatcgtcgtgagtattgcttcggatcaacggctgagatcgatgtcggatcatactgcattggattgtaggcatgttcaagcttcttgcttatgtcgtagccttggagaatgtctataataccgaaatacactatcacatcgtaaaattcaccagttggatccccaacaagctgattctcacagtcacttcttctcgctgttctttcaactcttgcaggcatgtttatacccaattttattgatgctagcctgcaaaaatcatcaaagaaccacacttgtgttataaaacattccttacagttttcgatataaacattgaatttttggttctttacttgctggcatcgagaagaaaccggtccatttctgctcgggagagacgagtttctgaatttcctgcttgtagatgatgaagttgcttcgatcaagatttaagttggaagttttgaaaactgagttaaagatttgacaagattttaccggtaggggttcgagcgccggaagtaggagtggcagagtccttgatagcagcttctcgaaagtgaagaccaaccaagagactataatccataatcctctcttgttcaaggaattcacagtctctgtccacttgcctgttaaaaaccaaacactcgaatttgggtttactaatgaaagaagtgaaaagagatatataacaaagagttttattacaagtagtgaatcattcacctgcagaattcttggaaccagttcttttgcaatcggaatgcaaaatttagatcaagatctttaagcgtcgtgtttggatcgatttcggactctggtttagtagtaagacggccatgagaggatcctttgaggtcaaaccgcctatggatggagtgaccagtacagaaaagattacccattatcacaaatcgaacctgcaggcgcaagtattctatcatcagtacatccaaaattgaaaatgctaatcacaacaatgcagagacatgaatacaaaaaaggcattgacctttttctgtgcagtgccagttaatttcacgcaatgaagaccgaagaacttggtaactagagtgttttcacacgccctgacatgattgtagtaagccggaagcatccttataagaacctttcaagggaaaaacaaaacagatgagtgaatcttaataagcagaattttgcagttaaaattcagctcttactttggtttctgccttcttcatagtcttgatcatgtagcggtcatcgttggtcaagtagaaaaagcttccacttttccctggagatgatagctccctaagagcatcattcccacaaatcgataacatataatctgctgcgtccacactaaatagtttccgcagagtcctacacgagaaacacaacattttcatcggttttcttaataccacaagagaagaaatcaaaagtacggagtttcgaacctgaaaaccacaggacaataatccttccatttaaactcacaagactggtgtggaggagtgtatttagacccttcagatggaaacttcgtccaaagtttctcctttggatcaaaagctgaagccttcaaatcaagagaagtagctggtgctggtcttccaacagaatgtcttcccaacaaaaacaacactcaacattcaaacagagcaaaacaagcaaacacaaatcgataacacactgagagtttcggttacctaattccaagctgcaagttaagcatgagttcataattattatgacctttagagatagtcgctccttgtttcttagcaggttgtattctcaaaggccctagtgatgatctagtactctcagcattatcatctacctgaagataaccagaaccattactcctcaattccatttcaccattacttactcttccatcaacagatctcctcctcggcctctcactgttcttcgtcctgttcccactactactctgctcagaagcaccgtaccaaaccggcatcttctgagacggcaaaaccgggattctctgacaagtacaaaccacacattcactcaaatcaacataaaacacttgttgtggttgccaatcaaaattcccggaagaagtcgaagggtaataagtcccgttctgttctttaggatctttactccaaactccaacgtagaaactcccatccgaccatcggaaagttccattgcctttaggagctccgtcttcccaagacccatcgtaacggttccgttgctccatatcatcgtcccgttaccattcatcaaaccattcttccattgtccaatgtaatgattctcgttcttccattgatacctcccatgtccatcttgtaaacctcttctccattctccatcgtagcaatctccgttgacgtaacttttcgttccttgcccatgtctcagattcattacccatgatcctctatataaatctccagaggaatcaatgtaagtacctgagtcaaaacaaaataaaaatcaaaactttagcaaaatcagatgcaacattttggggaatttttgttaattatacctttgccgtccatgtagccgtttttgaaatcgccttcgtaggtggcaccactaggccaactaaaacgacctttgcccatggttttgcctcggtgccaatctccgacatacatacaaccatcggtccaaaggtatttgccatgaccgtgagggagattgtctcgccattgtcctgtgtagaaatcaccgcttggtaatgctttctcggcgtggtaactctctcccgttggtctgctgtaatcgtcggcgtcatctgcgtgtgctaccgacatttctctcttcttctttcttccaaatttcacttttttttcctttctttctctgtctcttttctcacattttattgttggattctatgttttttctcattcgttcctccatagcttagatcgcgaagccgcatttactgtgttgggtttctttcagaacttatcggatttcaatgtagtataggccaaggacgacgaagagagagagagagataaaagagatgtttctttttttggggggaatggcgtgagaaaacgaagaagaagacaacagaaagaagagacgagacgaggaaatcgaaaacgaggaaaaaaaggggggaagaaagaggaatgttgttgtgtgaagaatcgatagagaaattgaagagtttggtaatggccattgttattggagctccgtgtttgattcctaaagcgactaccaaaccagacatctggagggactcgctacattgcgacgtggttaccttgtcaatgctgacgtcatttccttttcttttctctctctttctattttcatatacagtattcttaacacacaaaaaaaaaaaaaaacatatagtcaaaatacatctagtcaatggaatcccttcttttatgggccatcttctgacctat

SEQ ID NO: 35418 - DNA, 5115 bp, Arabidopsis thaliana landsberg
  unsure (1)..(5115): unsure at all n locations
aggaattcagctaaccctaaccaaaatagaacagcagagaggaacgatcgagagagagacactagagtgagatagagacgagtaacacatgattttgggtgataattagaaagaaattttatacccccaaaatcagggtgttacagacctatcccccttaaaagaatctcgccctcgagattctgggctagctagcggagaggtcagggtacctggcgtctcagatcgtcatctctttcccaggttgcctcggcttctgagtgatggcccacttgactttgcacaacctgatggtgattcttcgagtgactctgtctgctgtttccagaatctgagtgggcttctcaatgtaagtcagatcttcttgaaactcaagatccttggttggaaattgctcctctagcactcgcaagcatttcttcagctgagaaacatggaacacataatgcacgactgatagactttctggtaggctaagctggtatgccacttctccacgtcttgcttgaatctggtacggtccgatgtatcaaggtgctagcttgcccttgactccgaaccttttgattcccctgatcggtgacaccttcaagtaaatataatctcccacttcaaaactcaggtttcttctccttgtgtcagcataacttcgctgtcgagaccacgttgtctttagattctgtcgaaccatcctgatgttctcttcatcttcaagcaagatatctggaccgaacacctgtctttcgccgggttggtcctagtgcaacggagttctgcaactccttccatagagcgcctgaaatggtgacatcttcaaactggcctggtaactgttgttataggagaactctgcataaggcaatcgcttgtcccatccggactgatcttgcaacgcacaggctctcaacatatcttcaagaatttgattggtcctttcggtctgaccatctgtctgcgggtgataagctgaactgaaattcagatgggtgcccaaggcttcatgcaactgctgccagaattgagaggtgaactgcgttcctctgtctgacactatcttctttggcacaccatgaagacaaacgatccgagacatatacaattctgccaatacgacactgctatagttggtcttgacaggtatgaagtgggctgacttggtcagacggtccactactacccaaatggaatcgtatccggctcgagtgcgaggcaatccgactatgaaatccataccgatttcatcccatttccactgagggatctgcaacggttgcaacaatccagcaggtctctggtgctctgccttaattcttcgacaactatcgcacatagccacatgctctgcgatttccctcttcattccgtaccaccagaatttcttcttcagatcctgatacatcttctcactgccagggtgaatcgaataggctgtttcatgagcttccttaagaatcaactcccgaatagactggacattgggaacacacaagcggtatttgaaccatatcacgccttctgcatcttctcgaaaatctttgcctctgccatctagaatcagtcgccgaatctcactgatcttttcatcattcttctgcgcttctttgatttcgcgctccaaggtaggttccaactcaactgtgactcctcgcgaattgttcagaaatctgagactcaacctgtcaaactctttggccaactcataaggcatcagacgagcgaccatcagattgacttgactctttctgctcaaagcatctgccactacgtttgctttgcctggatggtaatgaatctccaactcatagtctttaatcaactctaaccatcttcgttgcctcatgttcaactctgactgagtgaatatgtacttcagactcttgtggtctgtgtaaacatcgcatttctgtccatacaagtagtgcctccatgtcttcagtgcgtgaaccactgctgccaactctagatcatggattgggtaattcttctcatgaaccttcaactgtcgggacgagtaagccacaactcttccctcttgcatcaacacacatcccaaacctgtgtaacaagcatcgcaatacaccgagaagggcttgtgcacatcaggcaagactaggacaggcgctgtagtcaacttttctttcagcgcttcaaaggcctcttggnnnnnnnnnnnnnnnnnnnnnnnnactttgttgcctagtaacgctgtcattggtttcgcaatcttcgaaaacccttcaatgaatcgccgatagtatccagtcattccaatgaagctcttgatccctctagcatctgttggcgctttccagttcaaaatgtctgccactttcttcggatccacagccaatccttctttgttgattatgtgacccaagaacaggacttcactgtcatcagacctgcaggaacatggtactgacgaaagcttcctctgaactcttcccaagtgatggtgtcggggtgggcatgggtggcgaggtaagactcccaccatgattgggctgctcctctcaacagacggggaccatacaggactttctccctatcatcgcactgagcggtatgcaactcccgctccacagtgcgcagccagtcttcagcatccatggggtcagaagaatgagcgaacgttggtggatgacctctcatgaattcagcacgcttgtctctgggcatctgaggcatctgaggctgaggtggggcctgctgctgttgctgctgctgctgctgctgctgaatggcggccaaagtctaaccgatggcttgaactgcctgagtctgcatcagaaacatctgctcgatcgacatcgggggcgggggcggcagatgctgctgctggggcacctcgtccttttgagcggctcgctcctgctgagcacgccttcctcctctgcgcctgttctctgacatctgcagaatgcaaccacacatcagaactgatctggcaaatcttgcagcataagagaagagtatagaattctccaacagcactgagcaggtgagcatcttcactgatctccaacacagaccacacagcttctcagataaagaggaaagtggagaataatgggtttcccaactatataactaactttattgacatagtatgtaaaccaaaatgcaggggatacccacactctggtgacaatcattacaaagatccaaaccaaacatagttcatcatgacaaacatagatgcacaggatatagcaaactaccctgtctaactaaaactaactaagaccgagactaacactaagactgaagcttctatgtatatatttcgtattaattacaagatccaactctaacgatctatggttctagatttatcttggtcttgcaggcgggattgccataagactggtgtccacgctgaggtgagcggtacgggtgctgaatcccaacgggagcgggggaaccaccatccaagtgacgacgttccgcgcgctcagcnnnnnnnnnnnnnnnnnnnnnnnnagccctactcagctcgtctaatgcatggtccagctccgtgtttagcacggcagctaggttgactgtgatgctcaacctaggattgccctcaccgacaggtgagacaatcacgcctcctgtgctgccagatagacggcgggggtaatacttcagttgagaccatcagctaccccaccgagaaccgagcagtagtgcnnnnnnnnnnnnnnnnnnnnnnnnnnnnnnnnnnnnnnagctgagtcccgctcagagatagaatagtgctctgagcaggccgacgcaccctggagactgttctccggacggcgcaccaagcaggtcgcctcccagcggtccgggtagaccccgcgactatgctggtagaccacacagcgatactcgatggaccaagtacgccggttaagtgcccgacgtagcagggtgtcgagcgcatcgtggaagtgacacccgcgagcagcgtcgcgagtgatgggtcgagcaacccatccttccgactcatggtcagcagagaagtcggtgtcgtggctcgagctgtcgtcgccacctccgtcgtctgggtctcctccagcagctactccagaggctgggacgcccagtgatggtgcagggggcgcctccaggggaagcacaggggagcagctcctcacagactctatctcctggtggagcaagaaggaagagccctgctgctcctgtcgtcgacgttcctgctcctcatgcaggcggtggtgcagtctctccaagtggctagactgtccggccacgggacggcgaacggacgctcagcaaggcgagagggtaagaaggggatgatggactttcgtgcagtgtgtctaagtcgagccatctacaaaagacatcgcaagcaaaagggtgagaacagaattaatatgaccagcaaataatgaatcataagtaaatgaaggattagaataaaacatgattttcagcaaggtataatatatagtagaacataggttcggtcggtatgaccaacttttgaagggatatcaaagtcaaggcagggacagaggtctatagtccttagaacgaccattctattctaggttagcggtcctacagtcagcacggctttgataccacttatgtcacacccggttttagaaggcaaaccgaatgcgaaccatgtacgtgccaggatcagttattcacgtacacagcagttacataatatggacatcatcacacagtgctcaaaatagtattaaaagggaaataatagtcgattacatcatacgtctgagacgtccatatagtctttacaataaatcaaagtgcggaaaagaaacgtagataaccgcggccttcacaggcaaccgactgggggttgccgctaacccacgcctagaactcgtcgtagtcttggaactcctggaagtctccttccacggcttcatcttctcctgagcagaggttgcaatgctgacaacctggggatggggggggggggtttggtgtgtagagcaagggtgagtacacatcaacatactcagcaagtatcctgtttggctgtagtggactagctttttgtggggataagtcaagcagatgcttttagttgaccagattattatttactaatagaaagccaggttttagcattaaccaagt

SEQ ID NO: 35419 - DNA, 754 bp, Arabidopsis thaliana landsberg
  unsure (1)..(754): unsure at all n locations
gttttacattcaacagaacaatagaataaaacatctatgatcagtatttgttcaaaaatatgcatagaaggtcccaaacactctgtttttgtgccacatatgcacaaaaaacgtttcttgtgttatcataggagaaatttaaaaaaaccgaaaatctaaaagaagaggtttaaggatccaaaaaccaagccaactaataaactgactgtctggtctaggtcttaagatctagattttattttcccagactccatcaaataataagaataaaagctaaaagggtactttaagaaaccatcctcatgcggccatgctgatttcagttaatgcacaacaccgcgaaagggcctctagctgtgttggttaggtggtccgagtagcactcctcagatcctgggttggactccccgtggaagcgaattttaggctgtggttaaaaaatgtcctcgtttgtcccatgccaaagcacaggtctaaggcccagctccggccgtggtcgttctcacatggactacggtgccgctgtgtacgcgtggggcttatggcgtacgtttagcgtcgctaaagcgataaggcgagcgtggaggcataaggcgtcttgtcgccttgcctgcgagagtaagggcggcggccgcgtcgcatatctcccgccggctgcctgcagggaggagagctgtggagagggagaactgctgctatcggctaagggcaatctgctgctagcactgagaaggtaccctanaattgttggctg

SEQ ID NO: 35420 - DNA, 705 bp, Arabidopsis thaliana landsberg
tggatagggctcattaaatgccaaggcggcacatcgcctgtcagtggaatggataggcggcgcgccttatctgcaataaatgcagaggacacgtggcccataagccttacgtcatgctccgctcgttcgcttacgtcacgggcagtcggccacgtggcagcatcggggctccgcctgagcggggagcagaagcgtatacggtatggtccggacacgtgtcggctccggacccccgcctggccttgattaaggtctgggtattctttgtcctagaatcccgggaccctactatgagcggcccggaccctccctgaggggtccggaacccgtctcaggggttcggtttgtacctgtggaggtcttgaaccttacccggaggtccgggctatgcatccaggggtccatcactttcccgtggggggtccggacccactgtcgccaccttggagtatatcgtctgctctggccacgtgcggccccggagccgcccacgtggaggggtcgggtgctgttcaccacgcgactagaggtagccgcgcgggcaccgtgtcttcatactgtagtaaggggtacccctgattcagggtaccggtagacataatccagcactattactccgaagtttctcaatttcctgacagatttcaaacgcctctttatgtgtcttgtcgacttcatattatccttagaactgtttatcttaat

SEQ ID NO: 35421 - DNA, 2702 bp, Arabidopsis thaliana landsberg
taaaagaatcaagttagggacacaatttaaaggagcaaaatgacttgagtgtgctgaaaaaatggcgcaccggactgtccagtgtgccacccgacagtgtccggtgcaccaggaccgtacaagtgtcaaccagccactctcgggaaaacgaaggcgcacttcgctaaaattcaccggactgtccggtgtgccactggactgtccggtgagccagcggacaacggctatccagcaccaacgatcgactgcaaaagtacgtgccacagtgaacagtgcacggcagattcagagcagcgaagtcagagtggcaccggactgtccggtgcgcaagaggacaaagcctccaacggtcgaccagctctgaaccctaatggttgggtgacgtggctggcgcaccggactgtccggtgcacccatcgatagcagccctccccaacggctgttttggttggttggggctataaatacctccaaccaccaccactccaagcatccaagttttccagacatctcattcaatacaagagctagtgcaataattacaaaacacaattcaatagaatcaaagcctctccaagtcccaaatccactccaaacaaatagtgactagagagagtgttttgctcgtgttctttgagctcttgttcttggatcactttcttcttcctcattcttgttctcaatacacttgtaaccaaagcaagagacactaagtttgtagtggtccttgcggggtctaagtgacccatttgattaaggagaaagctcactcggtctaggtgaccgtttgagagagggaaagggttgaaagagacccggtctttgtgaccacctcaatggggactaggttcattgaaaccgaacctcagtaaaacaaatcatcgtgtcatccgctctatttctttggttgatttgttttcccctctctttcggacttgaatttatttctaacgctaaccccggcttgtaatgtgtttaagtttgtaaatttcagtttccgcctatccacccctctctaggcgactttcaattggtatcagagcccgatacttcatttagggtctaaccactcgaagtgatgtcaggaggatccgcctagagggagatggaaaccgacgataaagccacaagccacgggaaggctccatcaagggagtccggcgccaaaggaagggaggaatcacctccccacgtcaagtcgcaccggagtggtgagaagaagaagatgaacaaagtggtctactacgagaccgattcttcatcgccctccacctccggttccgacgccccgtccgtcacttctaagcaccatgagcgcaagaagtatagtaagatgccacttcgctatccccgtatttcaaagcatgctcctttactttccgtcccattaggaaaccaccgttcttttatggtgaggactattgtatgtggagtgataaaatgatgcatcatctaacctcactccacgctagcatttgggacattgttgagtttggtgcacaagaaccatccgtggggggacgaaggctatgactcggacgaggtagcccaattccggcacttcaactcccaagccactactatactcctcgcctctctaagtcaagaggagttttataaggtgcaagggttgaagagtgccaaagagatttgggacgttctaaagaccgcgcacaaaggagatgaggtgaccaagatcaccaaacgggaaacaatcgagggggagctcggtcgcttcatgcttcatcaaggggaggagccacaagccatgtacaaccggctcaagaccttggtgaaccaagttcgcaacctcgagagcacaaatgggatgaccatgaaatggtcaaggttattcttagaccactcgtttttcttaaccctactcaagttcaattaattcatggtgatcctagatataaacaaatgtctctagaggaagtgatagggaagtttgtgagctttgaattgatgatcaaaggctccaaacaaatcattgagcgagacgccacctccacacccgaggtgcaacccattgcatttaaagcgacggaggagaagaaagaagagtctacgtcaagtaggctccccatcgacgcctccaagctcgacaatgaggagatgactttaaacatcaaaagtttcgccaaatcctcaaacaaaggagggggaggactacaagccccgttccaagaaagtttgctacaagtgtggtaagtccggtcattttattgcaaaatgtccattatcaagtgatagtgacagggacgacgacaagaaggggaagaagaaaatggagaagaaaaggtactacaagaagggtggcgaggcgcacatggggcgtgaatgggactccgacgagagctccaccgactcctccttcgacgaggctgccgccaacatcgcaatcaacaaaggcctcctcttccccaatgtcggccacaagtgtctcatggctaaggtcagcaagaagaagaaggtacactctagagttacccccaaatacactacatctgatgatgagggtagctctagtgataaagaagatgatttagtttctctctttgccaaccttaccatggaccaaaacaaaaaattaaatgatttaatagaaaccattaacgagaaggatgatctcttggaatgtcaagaggacttgctcgttaaggaaaataaaaaatttgttaagttgaaaaatgcttatg

SEQ ID NO: 35422 - DNA, 2412 bp, Arabidopsis thaliana landsberg
  unsure (1)..(2412): unsure at all n locations
attcgaaagtaattacaattgtgtcctgaattttataagaaacaccctgtgctctctggtaatagtggtcgcagcccattaacctttatttagtagtgaaattaatgtttaaggtgattttggtataaaaataatgctcaaaacttgtttaagccatatttaattcattctaactctgttttgctacgttcaaattgcattaactttgtaaaaaatttgtgtacaccttaaaaacattatttctatcaattcacatacctttatagttggaaatttatttaacttgtgttagttgattaatcaatctagtcaagtcaacctatctataattatagtttgactaaaacaagatctctaatcaagattataacatagattaaagttgaattaattaatactttaatatcttctctcatatgatttatgctaatcaacataaaacgtagttactattaattaaccatgaagatatttcgagaatcgtatctctttagttgtaacttcgaatctagtgattctcgaacccacgatctcgtagcgacgtgcagattattattacgcagtttattcttatgtttggtgtaatgttaatttttgcctataccatgtttgtctgtattgttacgtttagcaacgaggtcacgtgtcatcagaagagcaagttggtacctggaatctcaagtcccaggcaagttgtgcccttgatcacttctttttacctactcatgttctaattaatcataatgttctgcataggttaattttgatgggacccaataggttaccctagattgtttatgtcattaccttgtttacccctgaatcacttgggtagtttgctattgctttacatggatttgggataattatttatcatatctatgttccaattattttgttattctatttatgttcatgtcaagatcattaatgttaattggaacatagagcttaacttgagaaacacgtgccaccacaagggtttatgggacgcccttggctgattaattaggaaagctagtggaggactaccttacccgaaaggggcaagggcagtaggggagtggtcagtgtagggaggtccctggttgattttgctgcgatggcggtcagccaggaaccctgtactggatcttcccataaactgtagcgggttttctgaagctagtggaactttgtaaatgcctcgtagtgttgccctgcctcacctcctcggtagaggtgtatgggattggccttctcttggtagatgggtaacatgacttgtgggtaaagatgtgcaacctctgcagagtgtaaaactggtatactagctgtgctcacggtcatgagcagctcggaccctcacatgattaatttatggaactaaacttaatttgtcatatgcattgcatcgcaggtgttgttattacttttgttctactacttatttgggttggtatctacttatacttagtaattactaataaaactttgaccaactttaaaagcaatgctcagctttaaccatctcctttggtaagccttacactttacatgagctcccacctttggtgagttcatgcacattattccccacaacttgttgagcgatgaacgtatgtgagctcacccttgttgtactcacatcccccctggtcaagaacaggtaccgcaggatgagacgcatgaaggatgttgtgatgagttcatgagtggtctagggcgtcgtctcccagtcaactttggttgttggatcattgtcttcatatgatgtaattatttaattattttgtacagaactccgttatatattaatgatgtgacattcatttatgtatcatgagtcatcatatgtgtgagacttgatcatagcacacttggtgaatattcgcgcccgggtttggtgcccctaaaactcgggtgtgacagagacaacatatcgaaatctaggccaggatacaccacctcgtccaggaagagagagaacactcaagggcccttgaataggaaattacagacctgcagagtcagtagtttgtcccctagccttcataacatccaaccttgtgcttagatgcatgcctccatctttgccttccaaaactaaaaccatatcccttgaaaacacatggttttttggaatacctatccatagcaatttaattaagtcacctattaggattaattagataaaaaacaatgctccgataccatttgaaggatcgtattactctaaatagggagggtgaatgattgcagaaacttaaaaataaatatctcacctcctcttagtcacaagaccaaaataatgcacttttataaatctagaaagattattgttacattcatagctgactaaaatccataaactttgatcgatctcaaaatctatcaaaataaactacttanaattataaaactaatccaaca

SEQ ID NO: 35423 - DNA, 4102 bp, Arabidopsis thaliana landsberg
  unsure (1)..(4102): unsure at all n locations
tttctggagtgtgtctttgtgatgttgtgttcccccttttgcaatatgataccgttattttatgtttcaccgcgagtgtttaattagccagtgcttggggtagtgtaatatattaggtagttgagcaacctcaattacttcacttcaggtagatggtttacatggtacagatcgcaattgaacatgtttttccatcctgcaaacactgctatacatatatgatcatttcatatgcacctttgcttgtttcttgccttccatgttgatgactcgtggaatcgcgctcttggattcctctacatgtgttgagcgctgtcatcatagaattccagtcccacttgacaatattgttgtcagaacgcgataggaaaactcccaccacacattatctacccaccaccaaccccacataaatgtgtgtatacacactccaccaatattgacctatatatacatgaatctcaccgaccaatgaataacataatcacccctatacacacatgatagctcgagttgaaatgagacagtacagacaaaatcctgtacttatgcgggtaggtgggttattcagaaaacaatttgaagacgcattggagacaaacaaccccgaagcacattacttggaagggctcaggtacgcttgttgggaaaaagatttaaacatggctaaaaaacacattttcaaagcgataaacaaagtagatgaggcactgtttgtgatggcaatgttgacaatttgtggtggagagaaagagctaggtgagtttttcactgaacagttgtttgcacaaccttgggccgaggtattggctatgggagactctctatttgcagctcttgagcgaatggcggttcgtcaaggtacagcttacaggcgtacatggaatggggcccatcccccatgtgtatcaatccacaacatatataataggtgccaagagtgctacatattcttttgttccaaagaattctgtcggcgctgttagctgttaggagcttctcatcctaatcggccgataacatgatatgaccgggttttacttgttgtatgtctaatgttttagtatctgtggaaacttgtcaccagtcgggtaactcttaaaaataacgtaatgtttgttgacattacatgttgtatgtatgttgtgttatgattgttatgtctaatgtctcgttgtttcatttatattagttaaatattactaaatagtttcatttgcaacagtggagatctaattgtatgctaacagaacatgtcaaaacaataaaagccatcctacatgtatattaatattagttaagaatccttgtttaagatcaaacaatttaaaaatgtatctatgaataacaagttgtacgctaacataacatgtcataaactttacaggcaagcaatttcgattaaacatgattgtttacaagcagttttaggtatgtcgtatgtcgagttaggcagttttagggatgatccggcggaaaagtgacttgattttgaatggcttctcgagacgtgcgagtaggttagttactttgggcgggcaagtcggtgagacacttcggacggacgagtaaacgagctactcaagatagatgggcaaacgaggtacttcggacgggtgagctgacgagctgcttgagacgggagcgctgataagctacttgagacgggccggcccgcgagatacttcggacgggtgagctgacatgctgcttgagacgggcgagctgataagctacttgagacgggccggctggcgagatacttcggacgagtgagctgacgagctgcttgagacgggcgagctgataagctacttgagacgggccggctggcgagatacttcggacgggtgagctggcgagctgcttgagacgggcgagctgataagctacttgagacggaccggctgacgagatgcttcagacgggtgagctgctctttgtctctaagtgtcctcgcggaaccccctacctgacgcgccaactgttgatgcacgaatcacacaagtacgaaaatgggatctctagggaaggaagaagaatctttctattaatgacgagcccgcgacttaggcgaattggacgaattacaaaggatgatttcgtcaacgagcataaatggagtaagaacgagccgattgtagatgaaagacgagcttgaggccggaagacgatcttgatgtccgaggaagaatagagtttattcgttttatagctgaaccttgtaaaaggttgcctacgtacccttagaaagggatcaagccacacgtagttcatattagaataagtgagctaggccgtcattggaggtaggtcggcaggtaggtgacgagccggcaaatgtgcgatgagctggatgaaccgtggtagagagacgagttggacaaaccgagttgtttgctggtgtagacgagctgggcgacgagataggtggactatgcagtcaatggacgaactgccgctaggcgaggaggtagatgagttttgcagtcgagggatgagctgatagctagacgaggagttggtcgctgaggagcttgaagacgagctgaggagcttgaggacgagctgaggagcttgaggacgagctgaggagcttgaagagcttaaaggcgatctgaagagcttaaagacgagttggagagcttgaagacgagctggagagcttgaagacgagctgagggacttggtgaagagaacgagttgagaagcttgacgaagaggagcgagctaacgagtttcttaagaagggagagctgatgagcttcttgagaagggcgagctgatgagctacttgagacggacgagctgacgagcttcgtgagacaaagtgagaacacgagaacagtacaccacttcggtacactagactagtacactagccaagatagaatactaaactaaacacgtcgtgaccgaccatgtagaatcttcgccggataacttgttcaagggatttgaaagtgtcaattttttcgcagttaatagactttcctggcctagttttatcaaccttgaatcccaccaaccattggagtagcaaatccaccggccgaccatggagacgcaggattcatcgtcccctgaaaaaacgaaaacagagtcatcgtctccatcgttatttgttggccgtacactcaatttcataaactgtaaagcttcttatgataactcataccttccatctcgacagattttgacaatgtgtgtatgattttcgaagtgacgagggtttatcttcttttgacaatgacgacttcagagaagatgtcgacgacgagagaagtttatgttcaacgagggtttaggagataagtttatgtttggtttcaatgtcttgaggacaaatgggtttgagttttgtgatattagcccatgacaaatcttgaattttgaatgatattgggctggtttgaatttggcccattagttttcatcaaaacacaagaggggtaaaacggtctttgactatttgctgtattagaggagggctgtattagagaggacagaagaaactaccctatcagcctatttttaaaaaaactgtctagttctcaaattatttccctaaaaactgcctagttctcaacttatctcttatatataccgaacccgaaatcagcttgtgaatcttttgatccttgcttcgtgatcaaacctccccatttaggatcatacagaaagccgttaggtttgaagctaccatctaaccacggctcaatcatgttcttcaggtaagttacaatcttcggaatcacatcgagatagcaaacttcctcggcgattaaggcaaacctagctgctctggctattaatttcccgtagaaatacgacgaactcgtgacctcagctgaggaattcaaaccgttaacgtctttgccaagagccgagatgatctccttgtacgaatcttttttgactcctttcattgagtgcacgtcaccgaaacagagtcaggtttaagaaccatgagtctccgcgaccctactaaatctcgtcgaacttttgtacggaaatgatctaaacggtgactaactgttagtgnacctctgtcagacaaccagaaggagtgttgntgctggacaagctggactgttttaga

SEQ ID NO: 35424 - DNA, 1474 bp, Arabidopsis thaliana landsberg
tattcttcaatactggggttcctactatttttaaacagtgtctacaagaggtttgaatacctacaaattttcttaggttcagcacagaagaaaaactaattttccttaattaaacaaggtttggtcagtttctgtttttaattttaaactctaaaaattagaacagaaagcatagggtttattatttttaaatgatagttcataatatttaatatctagcaaaattagtttgacaaattttgattaagaaatcatcaagttatagattttctaagttctctggttattttaaaaagattaacagaattgattaaatggaaaactactttgcactggggtccctggcgggtgttttaagtttcctcacggatcagtccctaggctactattcgaatgagtcactgacattgcagaaaaccccaggttcttctaatactaacccgaggtccttcttctaacttaaacaataatcgcggcgaaagaaagggcggaggggcttaccgacggcgagactgttccggtgaagtggtcgagggcgaaggggaggtcgcggggatcacaacggtgtgcggaacgtcgacggagatggccggagttggtcggtccacgcgcgcaggcggggatgctcgtcggcggcgaggagaccggcctggtcacggcgaggtagttcaattaaataggtcagggaggtccatgggatgccagagaagacatgagcgaaaagaattgggcggagactcactggatagctcggtccacgcgcggcggcggaagaccgaagtccggtgaggtaaagccgcctctcctgtgagcagatgcctcggctcaagcttggagaatgcttcacggcttcactgggaagctatcccggggctagggcgagactgggattcatccgcaaagactgtccacgacgcccgagtctgggcagagatggcgggcggcggtgctcgcttttcacggcgagctccggtgatctctggctcgggcgaggctcggggtgtgcaagtgccaacggctaaggcctctggaggcatttataggcgagggcacgacacaggcgcgtagggtagggcgaccacgcgtggggcgcgcgctgccgcggccagtccgcgctcagccggtcaagcaagcgatcgaacacatggctttttgcttctacccgagttcaagcgcccatatgttgaagatcttcgcgaatttgggcatgatcactgtgcaagatttgctccccgacatagctttatcgtttgtgtgtggaagttgagcggtttggggcagtgtacagagagttgtcgtgtcacaaaggtggcagtgtcacaaggttgagtcccgaggtaaaaccatgccaagggtgtgcaaacggtggagagaggtgccaaactttgccacggtgtgtcaagggaatttggcgcatctttgatatttggacttgtttgatttgagttttaaaacagagacgtgattgggtacg

SEQ ID NO: 35425 - DNA, 974 bp, Arabidopsis thaliana landsberg
  unsure (1)..(974): unsure at all n locations
gaaccaagctctcagtgtctgggaaccgattctctgtgcatctcttgatcttggagacacaagactcgctgagactgtagcgaaaactatgttagaatctgaaccaaagtcatcttttccttacctggttctgattaagatatacgagatgacatggcgctgggaaaattcagtgaagttaagatacgccatgaatgaacataagttgaaatcggctcaaggatcgagcaagatcagtatagagagcagtgtgttcagcttcgaggctgaccagttgcaaattcatggaggtcatgatacttgcgcactcttggacttattgtcttgggattcttttgatcagaaaattcattggtctgcataactttttttaactaacaagattccaactataaagtgattttttcatttacttttaacctcagggcacaggttgtattcgttagtcaacgacaatatcaatattagattccacataaaacaaattaatagcattnnnnnnnnnnnnnnnnnnnnnnnnnatcaatttggtaataagaaagtttttgacttttgtcgtcaattttgtcaaggtctctatcagaccatcactttcataggccaagtcgaatgaagtaaattagtagagttgtgtaaaagcatgggacttacggtttggtttcatacaagtaaaatatttatatagtatagctttgtattcaaagacaactagacaagtacgagaatatagatattatatttaaagtaaattttaatctcgtaaattgtattctaatttcgctcacatccggacaagtttctagtgttttttttttttttttttaaacttcattgaacaaaaaaaagaatacgagttccgtaggcccaaaatgtccaaaaaaaagaagaggcgaaaacaggtaaagcagaaaatgaaaatccttaataatctttgttgtgaaggaaagaaaaaaacttgtttatcattatttcta

SEQ ID NO: 35426 - DNA, 1052 bp, Arabidopsis thaliana landsberg
ctgatatttctcgctcctttttggccaatttggtgctttccttgtcaagggcactggcaattctttttcttttcgggccttcggcatctccgcccagttgctcatagtcagggtaatcaaaattcaaggcatccagcacccgattcaatcttcgtttcggacgagtgccgacggctgctgacattaactgatcttctttcttagagtagttgccgaggatctcgttgcacataacctcaattgtgtccaaccactcttggcagggtgctttaaaatgtttcttaaacttgtagtgataaggcaatcgaacaagttctcccttcttcttttctccctctagcttcggcatctcccactccctcagtgttgggaacactttaaaagccaaaaattcctgcactaagtctctagtgccaatatgatctgaaatcactcgaaattcagccaaagcaatctgactcgggctccccattatcatgttgcagcgaggtcgggtttctccgaagtcagttctaatggactctagaccaatttatcttcatcttcgtcaaccttgacataaaaccattcagatttccatcctgctgggcatttacttcggtagctaatcactgggaactttgtagttttgcggtaagcaaagttgtagcagccaaaattttcatgcaaaccatccccctagccttggtttggtagtgcagttcgtgtactcggcagaaaccatcggagaatggtctaccccctgactttggagggcccagatataaacactcagcctaacgatagcattaggcatcagctgatgaaggtagatcccatatttcttcaacacattagcaatcatcttgttcagagggaatcttaaaccagctttaaaaagacttttgaaaaccaccacttcattttttcctagcttcgggatagtttcttctccaccaaaacgaatcaattccttctttgcttcactaagatagcgcagcttcaccatcttaggaaaatcagtttcggagatggtggacttttcgaagtccaggtggctaggcttgctcggc

SEQ ID NO: 35427 - DNA, 4517 bp, Arabidopsis thaliana landsberg
aaagagcagggccatttgaatgaacaggtgtgggagactgtggacattgtggagaagcttttttgggttgcgatgatgtcagcggatgcaatgttggtagaaacgaaattgacggtgaagctggtgatgatgaagtagactcttcatctttacatgaaccatgatcatgtaatattgaagtgatcccaaggctagagggtgagctgtgaaatctggatattgaagcaggtgatccttgtgtggggctacggtttggaagtggtgatgttactggactttggaccattcgaggtgaaaatatctttgagtgaacatttctttggactgaaactcgaagtccacgcgattcgtcaaccttcttaaggattgaattcggatctgcataagatttatgagaggacattgtatctttctctttttcaggagaggatgtatcaggacttgaaacaatattttccgatatcatcaacttggttttctccttaactttctcaagtgccgattccaataggctacgtgagtcagggcttcgaggagaacctgaatccaagctttcttgaaggatatttgctgctgttatttggttgaaaacagtcacagcaacatcagaatttggatccaaccattcagcttcactaaatatctcttgaaccttagcaaatgcttccataggtaaaacatctttttcctccatatgtggcagatcaacagaggcaagctttttaccagcacccatctccgaaaatataacctgaacaaacacagaatgttactcctctcttgacttggaaagacaattagctatgtataacataaaatgcttttaacagatatgccagactcaaaactgaactcactaatattaatcattaaatgcacaaaattcttgactcagagagatgtattacacgaagtacttctatacaaatgactagtataattctgagctcatcgggactgaccatttaaagcttagacaacaggcaactcttttaactaggaaaccaaaattggtctacttattaaagagaaagaagataattagtcacctctgcactgaaatccttgggaaaccgatccgttgtattccacagtacatcaatctcaccacggttaagtgttagaatgtttgatctaagaaatgcagtattgaacacgacccgaaacatcatctcttccctctcaagatcactacctagggtaatgcactctagcacgacatcaccgagaatatggcaattgatgtcaatctttaccagttcacaatctgcctgcaacagtagatgaaaagttaggactatcataactctctgatactgggaagagtctgtataaatgaacacatcaatgataaagatcttgatatcacctgcttatattgcctaacagctttgcttcttttaggcatcgagaaaagaacttttgaagtccgatcagaagccataaaaggatcttgaccatatattctgaatatgggtcggcaaccaccctcaccatcaaaatcaggaatcagtctaagattaacacagtctaatgtaagggcctggtctagcggtggccattgtgagccaacattcctcctcgagatatactgaagaaacctcaactgtgaaggcagcggatttagtggagacattagctgtaacaactcacgaggagcctgcttatatatcatttctagtgttctgtgttctccactaaactgtttgcggtataacaagagcgaagcaagcataaaagctaaagtcggccatccgccaagctcacagtgcgacaataagatattctgttgacttaacaataaccaactttcagctgattttaggaagtgatgcaccgtttccattgtaagcaaagggcaaccttcataatggcgaggatagtccatgatggtcatgtcatactcagttagtacactctccatccggcttctgctatctccatcccggaaattaaacaccatgaatgatgcaccgggaaactgttcccttaactgactcattatgcggctcacataaactctgtaatcttcatcttccaacatatccgtggttaagcagcaatcaaagactgtaatacaaaaacatcaaagttcagcaaccttatagagcaatcttatatttcgtaagcagcttatagagcaatcttttgtatctttctcactaaaatagtctatttctcagagctaagcatggataagacaaggacgaatttgagaagtcatgcaacacagtgaacatacaaaacctgaaaaatctatccatgagctaaatctcaccgatcaagaatcttaagctatcaaatgttagattcagttcaattaacaagcctaacaagaagtacactataaacttaggctaaaattatgatttttaagacctaaaaattcaaactttctaaaatttaatactctaagagcaagggataagacaagcaaaaggatttgagaaatcatgcaacccagtgaccatacaaaagaaactgtttcctgacaattctttgagaatgagacatcttaagctataatagatagactttccaccaatgagcctgagcctgtgctcatggatagttaacagaatccatgaactaaatctcacccatcaagaatcttagtctatcaaatgttagattcagttcaatcaacaagcctaaaaagaactagaaactaaaacaggacactacacttatcaaaatctgatcttaagacctaaaaactcaaactttctaaaaatcaatactccaaagcccaaagaagcccaagcccaagaaagcaaaccctaaacccatcacttaaaagaagaaagagcattccgtaaactctctctgagatctcaagcaacccttcaggaggttttctgtgaaagaactttctaaacaacgccattgagaggtttctttaaatgcttaactcaaaaaagcagagaggtcacacaatccctagaaataatcacttatgaccaaatgcgacccacattgcaggaaaaaccccaaataaggagaaaacaaaaacgagaaaaatgtcaggaagaaagaaggaagcgtgagataatcttattgctgggtctttaaggaacaatgcgatgtgggttttgtttcttttgtagtttggtggtttgtcttgacatacacactttcaatttcttccgttttggaattggaaacttagctttcaatcaaaacagatgtttgatagctctgcacatgcgagaaagaagaaagggaatgatgcagagagagaagagagagagtttggttatcttgggaaaagaggaactagggtttttctttgattctaagaccaagaagaagatgatatagctattgagaaattcagacagagattgaggatgatgtcggatttcagatagaagggaaaaaaaagaaaggaggacccaaagatctgttactttgtttaggactatgatacatgtcttccaatattcttttttgagttatttaagatttgctttcttttctttcctaaactcggaatttgcaatttatttccttttgccatgacttcatttaaaaaaattaaataatctttgaatgagtacacacttagatatcatagtttatttttaagtcattaatgagaaaaatacaatttttgtaattttatatttgttagaaataaatttttagctaccgattcaaccgcgaaaggtagattatggttcgttacatatatattgaaccaaatcgacggaatacttggtccgtcgaaaaagttaattggttttaagaatattggggtcacatacgaaataaaactgggatttttggtatatgtataagttcatttttctaatttaatatttacattaaatttagacattttaaatgaaaagtaagctattttttatattttttgaagttcacaaaaaacattttaacgattttgaaaagtagatttcactttaattattttttcgttacactttttaaccaaattacataaaaaaaatgtttcattcatcggccctgatcacttctcaagttttccaatatatgacattattggaggtaacaagatataatacactaatatgactgacaaactgcacaagacattttcttcatgtccctatatatggttagggagaccaaattcacctaaacaatactatagtttacggggtgatgctagacatgtcagtacaatagtctcaatcagtgggaaacgttgcacaaacggatcatgtagctgagtaaatgagttgatgcctcgttagttggtaaactcatgagccattcttgctattagttaaaccaaatcccttgtataaacacgcctctcatagtcatagatgagcttatgtcttgttctagtaaatgttataaagaagataactcaattgataattggttttagcacttggtccttgctctgttgattcgaaatccttattgaaaaaagaagaacaacgtaaattccttgttaaaatttttgaaaatttctattttctttgggccaggagtgatctcaacaaatatatccgaaaatgtaaagg

SEQ ID NO: 35428 - DNA, 2897 bp, Arabidopsis thaliana landsberg
  unsure (1)..(2897): unsure at all n locations
tgatgaaggtgagagtagttccggggttagaggtggcccaacaacaccaaagacgaatactcctacaccacctagccttgtagatggtgtcgctggagatgaagaagcttttgatgatttaaagatgtttgatccattttttgaggttggttccacaaaatcattggggaatagtaacttcgttttctagagactaataaagtcggaatttttgttgttggttaaccannnnnnnnnnnnnnnnnctgaagctgctttagggaagatgtggtccaaaaaagctcgaatggatgaggaatttgttgtgaacctaagtgaagataacttaatatgcgacgaaagcatagaagcttcgtctctttgggaaaatcaggttctccccaatcctagcctcggaactgttggggacttcgatggtttttcgatatcagatctggagaatgcagatttggggactccccctgatttcctcactgtaagatcctgcttgaaaaaaaccttgtttactttcggaaaattcaatggaacttaagattctaaattagttgtcatggaggttttgcagttggcttctcaggagagcttgctgaattggattggatggttgtgattggattcttgctgctacacaaagaagctcttctagtacggcgttttcgctgaagaaggaaaaagctggaatatgtcataaataagaaaactttaaagtctccgcaactgaagtcatatctctgtgataattttacttcaggagaccagttttctctcggattcccggaaagctgcttaaatattccgggaataatcattttcaatctctgaatctgcacttcatcattgtaattcaaatagatattttgacctttgtactctttgctgtcttatgatggttactctgtttttgtttggctcagggtccaacggttataactatttatttttgggtattttactattttcaccttatattctcaaaagttctcattatcaccccaaagaaattaattaatccaatttaacctctttaacattactagacagttcacacaccctctgtctagacggaattagggttttcttaagctattccgcagcagtctacggttgttgtgtcggtggtgggcgcctccaaaatttaccctttagtataaataagttttggaaaattcagactttggttattgaaacgccatctcagctctaattcagtacgatggggaggagaggtcgcggcggcggcggtggtatgggcggaggaatcaatcgtagatatctgagtcaagttatggatacgtgcggcaaggatttatctacggcggaggacatcgttgatgatcttcgttccaggtacggcaattttgcgaggttgactcggcaagtgcttctactcaatgtcaggcaagtccttaatgttagaaacaacaagagggttaaagacgaagatgaagatgacaacattggagatgaggaaggttctgcttctcagaggaagaaacagagacgggttgatgagaaagaggagaaattgcagcgagcggagcagtcgcatttaaggaagaggaatatggaacgttcagtgtcttcttctccgtcttcttcttcttcttcggaagacagtggtgatgtgtcgacttctgaggacgcggtttatggcgagaagctgagtccgccgcggtttgatctgatcaatgacagtctaagagataactacgctaagttgaacagctcctcgaagaaaccaattgggtcgcctgcggaaaagaatgtggaagttgagactgtgagcaacaaaggtagaagcaagttggctacaatgggggccagaaaggaggctaaagtttctctttccctcagtggagctactggtaatggtgatttggaagttgagggtactaaaggacctacttttaaagactttggtgggattaagaaaaccttgcatgaattggagatgaatgttctattccacatatatcaatcctgagccgtttaagaagattggagttaagccaccgagtgggattctatttcatggaccacctggctgtgggaagaccaagttggctaatgctatagccaatgaagttggtgttccgttttataagatttcagctacagatgttgtttctggtgtctctggtgcttctgaagagaatattagagagcttttctctaaagcatataggactgcgccttccattgtgtttatcgatgagattgatgcgattggatcaaagagggaaaatcagcaaagggagatggaaaagcggattgtaacgcaattattgacttgtatggatggacctggtaacaatggtcctgagtctagtgttggatttgttctcgtcattggagctacaaataggcctgatgttcttgatcctgctttgaggagaagcggacgatttgagtgtgagatcgctctgagtgttccagatgaagatgcaagggctgagatactctctgttgtagcacaaaaacttagactagaaggcccctttgacaagaaaagaatagctcgtttaacaccgggttttgttggagcagatttggagggtgttgctaacatggctggcagaatagccacaaagagaatcttggattcaagaaaatctcaactggctggggactctgaaaatgatagttcttggctgaggcatctctggccagaagaagagttggaaaaactctttgtcaagatgtctgatttcgaggtatgttaattgtaggcatggcatgtatctacttttctgtacttcaataactacgagattttaatccttggttcctaactctgttggccgctctgtaatctactaggaagcagtgaatctagtaacaggcatctttaacaagagaaggattctctatcgtgcctgatgtcaagtgggaatatg

SEQ ID NO: 35429 - DNA, 928 bp, Arabidopsis thaliana landsberg
tgtcagactgcttgaagttgaatttcagagttacagtgttatgaggtgaactttgagctcgattttgatttggatccagtggctttttgcgaatacacattatagcaaaatgaaagatggattatagctctataactttgctgcgcaaagttgacattggttccacataaaaactggagaaaaaggagcttcattgtgctttgtcagtcgctcggcattggtattctccatggtacagtgctcggttgaggatcagatcgaccgccgtggaaaatctcaccaccggcgaccgctttgccgggattggtgccgcggccgtgtggatgttgctcaccttgaaaagatcttcaccacccgtgcgctggcgacctctccggtaacccccgtggccctctctcttcctctttgcggccgagtggattacctcgccggtgaccgccgcctcctggccttatgccgcgtggctctgcctttccaccgcgacaccgtgactccctatagctgtcccatcgtcgccggggagattgccacgacggtggacacgtattcactgcgccgccttcttctttatctccggccgccaacacggctcggccgaattgatcaccaccgctcgtcctccctataaattgagcctgtgcctagtccgcaaggtcatcagctacccagccaccaagaattgctagcaatcgatcaccagtgtgcccgaattccttgtttcccccaaatcctttctccgccaccgtgaagatccgttcgccgcggccagccctttaccggtcagttcatccctcactctcacttgttcgagcactcttgacgctctgtgatgcttgacgaacccccaattcgtacggagtagctttagatcactgggaacacgtaccaattgtcttcatcatccgcggtttacgtgaatagagctcga

SEQ ID NO: 35430 - DNA, 6645 bp, Arabidopsis thaliana landsberg
ctaaaacaccatacttttcgttctcctgtaacttctctccttcttttaactcaattccttcttcaacattcatgaccctttcagtcaatttactcacgtcggtataagtcacagcctttgtaccatcataccttcatcatcccttctgttgtacaaatatctccaaagtcttgtaaaaattcgctcctacgcccacacactcttttgcgcttgttccaaactcataaactgcaactccagacgatcacgtgcctctggtagaaaatacttggactcaaactccttcttaaacatttcccatgtgataggctggtcgcggtatcgtgaaacaacactatcccaccaagctcgaccatcctcagctagaaagtttaccgctatgtggcccttaaagtcttttgggcatcttgaagtttcaaaattcatttccaggttcctcaaccacttatatgctaagacagtattctgctctcctttaatcttccgaacacctagatccttcatcatcataaccaactttaagaacttagccgaaggagattcggcacgctggctttcgtgcatctgttgttggtgttgctgttgttgaatcatgtgagtcaacaaggtctgaatcatccccaacgtatgttgagtctccggcacattttgaacattacggccttccccatttcctttattaactttccttggtagtgacggatttgggtgtgcggtaggttgtttcacaggaacatgtggtctcgtcccggagtgtgacccttcggatgtgctatagtgcacagtctttggtaaggagtattctggtgtggttccgggaatattgatgacttctccaaacatattgggataattgtatccctcatctccttctcctccaacatacggtaccagtctcccagaccgaaatgatgactccagttttcataaactggtgagaaatttatcgtctcactcctctctgttctttgaccagacatctgcatcctttcaaccaaggtaaacttaattcatctacctaataatggtgaacgacccggattatcctaagtgccttttgcgactatttactcgataaaacatttgaaaaaccggatcccaaaagcatcaaaaccatgctcggataccactctttgtaacgcccccggtccgcactaaaactcggccagtccggcactgctcggagacgccacaatggaaatgaatttccatagagtagccgaggttcagaaacacattccaatccttagcccactcaaggttactcatttccccatttgagatccacttaagcttgccaaccctcacttcacccaaatgttgtgtctactcaaataaagtcttatcagtttgaaacccgtataatttaaaataaatgccggtttcaaagtcatgaagttacgataatacaagggaaaatcacaacataaatatttttttttatggccaaggcatgaggcccaaaagtacacgattctaaaatacatactttgagttttacaaaagaacactgaaaaactactccgggttccctagcgttcaccgctccctctaatcccctctaaggttacctgcaaaacaagtagaatcatgagtaatctagctttactcaatgagtttgggttccccaaggaaatgttagtctaaccccacccataatccccacaaacataacataaacaatcagactacgcagagaaggtagtaaacaacacataaaacaatcaagaaatataacgttttcttaaagttttactagggtccgatgcactgccttcctccacacaccgtgaacacccgagttataaccacaaaggcatataaccggaacatcaccttggctacacagtcgtgtaaacaacaccggcccttgggtagctaacccaaactctccgggtcctttgatccccatgatgcctgtttcatctcgtcaagcaaacctcacgaaaaagcggaatcacaaggcaaggctagctacatcccacttgactgtagcattcttatggatcaacttggataactttcacaagctccacacgctacgatcctcaatcaacactatgaaacatatggttcgttctcaacacacatgatcataatctcaaacttgactatcgaataccagcgagtgatgtctaagacgacgcaaccatccctcttaagcgaatggtgtttcgtctaaacacaaccactcctatagggcaaatggtgcttcggtcacaagcacacctagctattcgatcagccaacctcaacaaactcaaagacaacatcaacaaaactaagagaagggagaatcgagaacatgcaagaaagaaatcaaacatgcaagaactaaaaccggaactcacaatcactaacttggtcgacggtctttaactcgggatctctctctctctctcagattatcctaagggtttggacgatatcctgctcggacgctctcgctctctctctctagttgtctctcgggtttttctaaaggttcggatgatctctctctctttctctctatttgggcagcgattcgatgtaaagttctctaagggttcagctaaaggggtgaggtcctgtttacaggctaagggtgcgagtttaaggggtaagagacgaaacttgggctccacttcagcttaaggacaaaacttggtcaccaagttggctcacccgaatggatacagctccaagttttccttgtttataaatagacaatccgcgtctctcacctaatgcgcattttcttttttcctcctcttgcccttcattcgcctcctaggtcaatgcgcggggtgctacattgtcccaaattccctaagaattggatgggctggcctcattgtcgtctccttcttcagtatcgaacaattgaggatattttacctgcaatttttcttcatcttcccatgttattacccgtcggttttgctttccctagaacactttaatttgaggaattaaccgctgcttgaacttttgaatacggcgttcttcgatttcgagtggcccctctggataagtgaggttggtcttcaattcgggtatcggttctgaaataacaacattgggatttggtatatgcttctttaattgagacacatgaaacaccttatgaagtcgcatgatttctatcatgtccaacttataagcaacctctccaactcgactcacaatttgataagggccaatataacgaaccgcaagcttccctatctttccaaatcgatattttgcctcttgagttgtgacctttaggtagagcatatctccttcttggaactccacttctcgtatctttcgatctgcgtactttttttgttggtcttgcgccttcttcatgctttcgcatatgaactggattttctctactgcctcatcgactatccattggtcgaatttggttctttctcctaccttcgtccagcataatggagttctacacggttttccatacatggcctcgaacggtgacatatcaatactagaatggtagctattgttgtacgaaaatttaataaatggcagattttcctcccaactccttccccattcttaggcgcatattcggattagatcttcgatagttcggatcgtccgctctgtctgtccgttggtttcgggatgaaacgctgtactcatgtgaacgtttgtccctagggctttctgtaggtcttgctaaaagatagccgaaaactttggatctcgatcgattacgatattggctggtataccgtggagcttgatcacttcttttatatacctttccacgagattgggagcttggtcgatgcttcttattggtataaaatgtgtcagtttggtgacgatcaacaataacccatactgagtcattcctctgccccttccttgtaggtaatccggtgatgaagtccatagagatcgtttcccacttccatgtcggaacatgtaagctctaaagtaacccgattggaacttggggatcaatctttatttgctgacaagaatcacattgacttacccatttggctaccgatttcttcattcttggccaatgataatatcagcatacgtcgttatacattttggtactacctgggtgaaaactcagtgtagacgagtgcgccattcagaggatctcttgtcataaatttcctcgatccggtaccataattcttccattgagtagcagggtgccatcgtctgccctgtgatatccgctatcgttgggtccgtccagagtcttcagctttgtaactatctcttgtaacttctcatcttattgttgttcttctccgatctgctgcagcatgtttgattgtgaaacggtgtgaagtccaagtggctccggtgattctccatcgagggcaaaaagatgtatctgcttgaattcttccagaagcagattcaattccttgtctgcatctaacttggttcggcggcggcttaaggcgtcgaccaccacgttggccttcccggggtgatattgaatttgtaaatcataatcggcaatgaattccatccatcttcattgtcgcaagtttagatcaggctgagtgaacaagtatttaagactttgatggtcagtaaatacaagaacctttttaccatacaaatacgatctccagattagtaatgcaaacactacagctgccatctccaggtcgtgagttggataattctcttccatgctttcaaaattgtcgggatgcataagcgattactttcccatcttgcattaatacgcaccctaacacgactcttgatgcattagtgtaaatagagtaaggattaccaggctcaggtaaggttaggattgtcgcggtggttaatgcttcgttcaccttctcaaacgcttccttagcttccttgctccaagcaaatggtacgcttttactcgtgaggcgtgtcaaaggcttgttgatggaagagaatcctttgacaaactttcgataatattttggcaaacccaagaagcttttgacctcagtaacattggttggttgcggccaatcttgaatggcggcgatcttcttgggatctacggttactccttgctccgagacgcaatgtcctaggaatccaatatctctttgccaaaccttgcatttactgaacttagcataaagcggctgctctctaagtcgttccaagactttctgtagatggtaataatgttcttcttggcttcgtgagtaaacgaggatgtcgtcaatgaatatgatgacaaacttatccaaataatcgtgaaacacttcattcatcaatctcataaatgcggcaggagcgtttgttagaccaaagggcatgacaacaaactcgtattgtttgtagcgagtccggaaggccgtctttgttatgtcagcttcagcaatgagaatttgatgatatcaggatgcaaggtcaatcttcgaaaaccaactagctcctctcagttgatctaagagttcgtcgattcttggaagcgggtacttatctttgatggtaatgttgtcgatgccacggtaatcgatacacaaccgcatacttcaatcctttttctttacaaataacaccgaggctccccatggtgatgaactcaggcgtatgaatcctttctcaagaagacctcctagttgttgttttaattcttctaactcgacaggcgcgattcggtaaggagacttggcaattggaatagctccaacctcaaggttgatggcgaaagggttgctccggggcggcagcaagccatctaaagccttaaacacatctgcgaactcccctactgctgagatgtcttccactttcaactcctcatcgtcttctccactaatcgcggtaagggttactaaatatgcttcccactggactagcatattctcaacacgaagggctgattcagaaaccgctccggcactcggactcactccggaataaactaacatggtttggtttcctaattcgaatactactcgactcttagcacagtctattcgggcatggtatccagataaccaatccattcctagaattacttcaaacttcctcatgggcataatcaaaaggtttgcgggtaagtttttcctatggattactatgggcactcctactagtattctacttgtttgaaggggtggttggtcactagcggtatggatcgggatattaacttctttttcctcataattcgtggtgaactttgcgaccacctcaggcgtaatgaagctattcgtggctctcaagtcaaataacacatacgtgggcacaccaccaataggtacagtccctggcaacgcattcaggcacacaccagacaatacattctcacaattcacacacaaaaaccaaaaaatactttaaaagggagttagatcccatacaaacctgttacggggtctttaagaggtcttggggtttctgccgattctaagtctaatgcgtacacattagcaattgttgcttgtcgtttcgccgggggtcctctcgctcctgatgcaggcgggggtcgtgtgttgctctgagtagccggtcctgtgggtttacttagacacgtgtgagagtagtggcctcggtttccgcaacaataacaaggccccttcggattcacttggcccgttctcttattcgggcatccattggaacgacacccttctttgctgcagtaataacatgcgatatatgcctttg

SEQ ID NO: 35431 - DNA, 3148 bp, Arabidopsis thaliana landsberg
gacgacagtgacgagtggaagcaacacaaccgcaacgagagagtgtagctatggcgttccagacgctcttgaagctgtcgacgatgtactgatgaaagacctattgctccatcgggataggaggaggagaaggcagctcatatggtagagctaaagaagaagatccaactctcggacccctagtagggtcaatgaactcatcctcagtctgagtcggtgcggatcttgaagctgaacctctctgtctcctggagcatggcgcggaatgcagacgggaaggatcatgatgaaaaccaatctcctcatgctctcctgtaatctttgtaagtgcagggcaaggtaactgaatcatatggtgtcgtgtctcgtctctgaaacaccaaaggaagttgcctttcagccagtgaaagtttttaagattactctcatccattgtgaatctcgtggtgttgacctcttctccttcaaagctgatgcaaaaatgctcaaatataggagtgagaagactgccaactctcttagatttcctccctttaccgtgtaagggcttggtcttgagtgagaccaagtgatgagcaaacaaaacgccaaagtttatatcgcggacaacctcctcaactccaaagctgtcaggaaagaaatcatgaacagcatgatagagcaacaacagcacagaaagtctcatcttgccaggcttcatcttgcacaacagtgtgcttctaatcagcctaaccaaatatcgcaaaaaccgggtgacgaatctctgagtgaactgcgtccttggaatcaaaaattccattaccaaacctgcaccagataacctgagcatccttaaactgtccaggcagggaaactctagtgagatcaaaatcaaaaccatagatgtcacacaaatctctcggtggtagactctatctgacaccgcgaatgaagtagataagagctccttcctgagcgttgtgtttcctgtcattcacatagtagaccctaacaaaaaccatgaattgtcaaaccagctcaggatacaaatcgtactgcctacaatagatgattcccaaacctatgtcatctagcagtcctaaaacagatttctctatctgcaaacgctgcatcaaaccgaaattcgcaaaccgagtaggcaaaatttctacactcatctaggcattatagaacagagtatcataatcatcctaatctggagaaaaatggcgattgatatagccacctttagtgaattccctgttgacatctttctcccaaaccctttgagaaggaattctctcttttggaagctttggccatggaaatcgataaacaggaggttgaggagctgcaacttgggatatcggttgggaagggcggaaaccgacagcagtggataagcgcaggcggggtgaggggcgacggaggaggaggaaggtccaacgctcttcctcgccttctttttctgccctgtcatcttgcagatcgatggagttgacacttggggaagatagaggatgagattctagtgagtttagagcctgaaatcactagaaacagtgaagaatcgaagaatctagagagaaaagagtgatttcggcgattttgaaaaaaaactgaaatgaagaagatgaagtttaggttaaatcgacttacctagaaaatgagggtgtcgatcgacactatcgcgtttttggtcaacacacgtttttttttctttctgaatagtcctataaaataaaaaatcttaatgttaagaatcaaatgaatgaaatgaataaaacggagaagtacttaccagtgggttgcctcccactaagcgcttgtttatagttaatagcttgactctgcagttgcttaatcaacaagtaggtcctgaagatccaaaggcttttctactggaatcttggcttcagcccagtaatgattgactctctatccattcacggcaaatggttttccattgttgtttttgagaatgactgttccagatggcctaaccaagtggactgtgtagggacctgaccaaggagaagacaattttccaggaaatattgtcaacctagaatcataaaaaagtacctggtcattaggctcaaaggtccgagtgaggatctttttgtcgtggtaagcttttgtgcgttccttgtagagcttcgagttatcataggcatgaattcgtgtcgatgttagggtagatgcgctgcagagccaacaggatgccacgtggcagagagtggccacgtgtgcgggtcccacggggacgggttgttacactaacttctggaccgaccttctgttatcaaacaattgattgatatattcagatttagctaatttccttactatttaaaatcgtcattcaatattttcaaagatgtcaataatttaagcggtaccttctatatactaacaaaatcatttattagggtggtcaatgtcttgtgtttgtatctgaaatgtatataaatatcatttgtttatgtcaacaatgaaaacgagttatgtggacaacagaaaagataactttattgtggtgatgccacgtccaaactgatataactttgcattttataggcatgttttactccttttatagtaatctaaaccatattgagaactagctaatagatatggatatggcctttacgcacgtttgtctatggacgctactcgccttcgtgctgacctggacggtgttctacgttaccaacaggaagaagaaggcgccggaattggcggatgcggcagcagaggagagaagagacagtgctgctgatgttatcatcgtcggggctggtgtgggtggctcggctctcgcatattctcttgctaaggtttgtaaagtggcgtcatagttttgcaaaaaaatgataggaataagtttagtactatatatgactgtttttattgtttcatagtagaattctattgcaatattttgtttttgcataatataaccttattcctaatttccaattatatataggacgggcgccgagtacttgtgatagagagggatatgagagaaccagagagaatgatgggtgagtttatgcagccaggaggacgactcatgctttctaagcttggccttgaaggttgggctcttttaatttaactctcgcttacatttacatttactttttatttataatcggagaat

SEQ ID NO: 35432 - DNA, 2086 bp, Arabidopsis thaliana landsberg
aaacaatcgagtataaatctgcatcataaaaaacaagtcatgtttctacgtataactcatttttcttacatgcagaaaaaaatttagaaatatggaaaaaataacaattataatgatcaaagatattttgttttgaatcgtgacaacaacgaggttctcatcagtttattgagaaatgagaacaaaaacacaattgaaacattgagtaagcaataaagagttgagaaaaacctctcagaaactgaaatatgatttctgttgtttggatggatatatatatagtttgcattaccctctttttatattgtttaggaacaacaaatgagtctcatgtttttatcctcatttattagaattttatgattttccttatgaaatccataagtttgaatcttatttttgtcaatataataacatacaaattttgaagtcaaaatatttgattgaactctgtgcgttttaggtaatataatgaaaacttatatatctaaggtgattaagttttgctattgactcaatcttaatttaaattaaattattgggatgttaattactttggctagtgaatgatgttggagtgttgtctacttttgctagtgagtagttaatttggtatgttgtttattttgctacttaactattttggtaaaaaaaaattaaaaaaaatcttacagttattttggaatgctgtatatttttgctattgaggtattttggcaagtgtgaaacccttagtctattggttgaccaatgcttcattaaggcttcattaatgtttctacatcaagatatctggggtacgtatccaagatattgcgaattattagcagatttgcagattaatggaggcaagtgtataagagatctccaacgatgtataattatagacgatcgctaagattctatacagagaagatattgaaagtgtccatcatttacatgaagaagaagaagaatgtgtggtctatcgcggatctaataaaagttagaaagaattgttcgtagtaaaatcgtctatgtaacaattttcataatttataataaataataaatctatacggcaaaaaaaaactgagattattgatttaaaattttgataggtcggttcaatacttttaagactgagcttctactaatttctggaaccttaattataataatcctctaactaaaaataattcgagctcatttaaaatacttaggagattatcttatttcaaaagttgttccggcggtttataaaaatatcatgtactaattacacataaactatgcatctagaccatgtttaagactttaatatatatctcctatgagtctacgagactacacgagggtttgtttaacagtaataagttacatacgcctgcaattagaaaatactaaacatttctaaagatgaaaacatcggatctaaaagttgatgtgtcgatctaaatatatatgtactatattcttcaccacaattcataaactttggcttttcgatttgattacagccaatgagaaattagttaaaaatatgagcaaaatttgttaaattacactccactaaaaaagtatcaaaaccttttttcatataattatcgcttagtagtttagtactctttgtaacaatagtaatatctcactatcatccctttctctttctcaactttactttataaaataaacctcattaacaaattagaaatatctaaattcactaattattagtttattactcttcatacatagtgaagtcaataattttgccaataaattaagaataataaaacttgagattaataaaaataataaaaactgagattaaaacataattttattttaaaattcataagatatttattaataaatacaaactcagcctattaaaaattgatcccaaaaaggcataaattataaaatgacctaccaaaacgatatatataagaattttaaacaagtgaacgaaaataaataaaataaacaaaaggcaaaacggttcgattcagttcggtttacctcttggtaagaacccatgtcatcaccggtaaaaatgatctcaataaaaaattcactcgactagactccacccccggcgttt

SEQ ID NO: 35433 - DNA, 1273 bp, Arabidopsis thaliana landsberg
gcggctgtcaagtttttgggacctcagctcagcttttttagaccgtttcaaagtaactccgagtggatcagcatcagagtcgaaaacccttgtttctactcatctcgtgtcatgtactccaagaaagataacatgttttgcattcccggatctggaggacacctcattggaacatgggatctccgcacacacaagcataatttgcagagcttgcagtttcaaaaccttcccaagctgacaaagaccaaacagaagctactggattcatgttgcaagagcgagcacttggttgagtcaccagctggtgaaactttcttggttaagtggtacaagaagtcttcaagcaagatcatcaagggtattgcgcaaatgaaaacacaagctttaatggtgttcaagcttgacgaacaaggaaacgcggtttacacccaagacattggagatctctgcatgtacctctcaaaatctgaaccattttgtgtccctgctagttcctttccaggtctcccctctaaccaggttataatctatgatttcgacgaagcaggatttttctttctggataatttacgcttcattggtggtaattctacatttaaggctcctttccatattccacctccaaatatgaacaactagcactttacatagtttggaattttctttcttgtttcaattattcaaagatcagattaatatgttttttttttttataataaattctttgtgagattgatatgcatatctcatcagtactctttcatgcacttgtgtttaagcagcaatcattcatatgtgtgtgcctttcaaaatcgttttgttggtttcgagtaagttacttgagatcaggggatatgaactgtattatttcacaatgttatatttttggtttgaatcctccaccaattgtttttgttatttttgagtgttttaactttgtattttgagtgactcaacccttagcttgggagactctctgactgcttcagtcatttttaaatgagtagataaatttcagattatacaaagccaactggtacatgtatcacacaaaactattattttggaagacaaaatgagtaaaatcaacatggttagagaaataaccatatttttgtaaaatttatatattcaaacactcgtgcaaatataagatatttaaattttgattgaactataacttaaattggtgtattttgacacgtaaatgaaatagcactttagagaaaaaaaagactaaaactctgtggtttcaattaatttgtttttgcct

SEQ ID NO: 35434 - DNA, 1805 bp, Arabidopsis thaliana landsberg
ttcaagaaatgcatttattcgtgtgtcaatcctctaaagattctttccatacttacaaaaaggaaacaaataagtcaatttggttaatgatttgccaactaaagaaacacagttactccacgatttaaaaagtcagatattcttaaatttcaacacatctcatgtatctcctttttagcctaaaaattgcagaaaaatgttatatcatctttactcgatttagaacgtttctatccaaaatcttttgaatttgattccacaaacaatagaaagtctgagaaaagtttacaacgcatctttttagttttgtgacatcaaccttgcataattttataaatgtcaagtcgtcaattcattctcaattcattgcactcgtacggggtttggatttgacgctaaatgccattgtgatattgactaagaacagcacacaatagcaaaagaaaagagagaaaaaaaaaaaaaaaaaacttttagagataaatgagtaattatattaacacgtgttggtatctatctagtataaaagattagtcactcaagccttggccacgaccacacaaagtaattacaatggaacacagaaaggtaagagggaacggcatagacattcacgtagcaatccaaggtccctccgatggtcctatagtccttctcctccatggtttccctgagctctggtactcatggcgccaccagatctccggactcgccgctcgtggctaccgtgccgtcgctcctgacctacgtggttacggtgactccgatgctccggctgagatttcttcctttacatgctttaacatagtaggtgacttagtcgccgtcatatccaccttaatcgaggaggataagaaggtgtttgtggttggacatgacaggggagctctcatcgcttggtacctttgtctttttagaccagataaagtcaaagctttggttaaccttagtgttccgttgtctttctggccaaccgatccatcggtgaagcccgttgatcgcatgctaagctaattacttagtatacggcaatgattactatgtctgcaggtttcaggtttgttctttatactcttgtaggcttgtagctaattacttgaaggaaaagttagttattaggttagatggttgagtgtaggaagttggagatatagaagctgagattgcagaggttggaacagagagagtcatgaagagactactcacttatagaactcctggaccggtaattatcccgaaggacaaaagtttttggggatccaaaggcgaaactataccactcccgtcttggctaacggaggaagatgttgcttacttcgtcagcaagtttgaagagaaaggcttctctggtccagtcaattactaccgtaacttcaacaggtaagtttgaaccagacaagtcttgtctctattgtttaggaagaagtgttgaatgggtcttgtaatggcaggaacaatgagttgttgggtccatgggtgggaagcaaaatccaggttcctacaaagtttgtgataggggagcttgatctggtctactatatgcctggtgtgaaggaatatatacatggtccccagtttaaggaagatgtgcctttgcttgaagagcctgtggtcatggaaggagtggctcacttcattaaccaagagaagcctcaagagattctccaaataatccttgattcatctccacattctaatatttcgttcccttataaaacactcttgtaagttccataataagttgaattttgaggatgcatcttcatgtatggacatatcatcattcctcttttacacaccttatg

SEQ ID NO: 35435 - DNA, 5465 bp, Arabidopsis thaliana landsberg
  unsure (1)..(5465): unsure at all n locations
atccggcggtaagactatcaattgttttatctcatctggaataatccaaactgatgattgcgggactggataaatggtaatgagctatgccaatttccacgtattcatatggtaataacgcgaagttagatcttccatttcgagactatctaatatcgattcggtccccacaaagttttgggcagcggcaatcgcatgtacacacagatacttgttgacatcaaaacgtcggcaataacaagttttccttagcaagtcaacaaaataaattgcatcaagcaaaggtaaaaggaagtatttccttcaacgcccaaacgtactgttcaatgattcacacgcattgctcgtgtctatgttatacttctccccttcaaaataacaccttgcccaattttccacctgagcccattcatccaaatacgaaccgacattaggaaatcctctcctaaattgagcatactctctcgttaactcaaattgagtataaacatgtgcgcatgcaaggaatttaaccgcgacttcttccttctcatttttcacccttactttaacgttttgaaacaaatgccaaacacaatggccatgtctcgcgtttggaaacacctgcataacgtacttgatgatgctttgatgtctatcactcacaaaaaccaaacctggttcatccgcataacggatttcagcttgttaaaaaacaacgaccaactagcatcgttctccctatcaattactgcaaacgcaatgatataattgtcatgattaggatcttgggctattgcgaaaactaatataccgtcgtatacggtcttaagaaaagtggcatccacaataacaactttcctcataactttaaacctttcaatggaagcacccaaagcaacgaatacgtacttaaacttttgttgtgcatccacttccacatatgatattgtcccgagattcacctcctttaacatgtataaataagagtacaagtcggtgtagtttttttcaggactaccccgcacgtcactaatgtgttgtttttttcctctccatgcggtagcatacgaacaatgcaaacccactcttccccgaacaatactcattatgcttttaggtggtggagtttgaaactcacctggataattctcatgcaaaagagacgcggctaaccgtggtgtgccggtatgttaacaatcgcttgaattcttatcagaccgcttgattgtatgcatcttcctgtgaactctaacactgaaacaatttgagctcgttacttttgcacatcgtaaataccatttacaagcagttgttgtagattgtcggcatcgtaacatgagtcgctttagatccaattttatagttgcggtcgcaaaacaatacttatttgcagctctgtaaaccaaatcttgcaccgcctccttagaaaaaaattcttgatgtagttcaatccccgttccatcttcccattccgtaacactctgaattttctcactactctcacttccttcactagcagcacatgaaagatcataatactcaattctaccaaccacaccattatctttttccctatccatctggctatccacatgctcaataagtacattctttatttactacctccacatgcaaagctggtgttattcccttagcattcactaccattagataccctaaaaagtcatcatcatctacaatagatatctctctcttagatgtgcatagaatgtaactcaagttcaacttccttgaggtttcatctattccaatcttcttgcatatgttttctactaacaatgagtatgttatctttgacgtcttcaacaacacaccacttaaagaattgtttgaaaatcaatcatggttttctgaatagtacccatagtcaaattgtatgaatgtgttcttgttattcatcggcgcatataattacaaataaattattaaaacataattacgtaattattcagattgagacataattgtacctatattatatctcattaatatcatttataccaactgtcatattttatctcaataaaacatttgtaccccctgtactattatgtctcagttttaccatttgttctagttcgtcaattctagatttctcaaatcaataatttcgattgaactctccgattcaaaacgatacaacagcccataacgaacaatacaaaaaatttatgttattaacaactaactcaaccaagaaattcacattaatctacaaatcaaaaaaatatcggatttacttttgtcggtgaggaggaagctaactttgggagcagattatcggcttggaagctacggcgtcctcggaagctaattcgccggtgaaatcggagctcaaatcgccggcgaaatcgaagctcaagtcgccgacgacgaaatcggagaaaatcacgtatcggagaaaagagtcccgcgaagacgtcggttttcttttttactaaatattttctttttttactaaatcatttcttccttctcatttttcacccttactaaactgatgattgcgggactggataaatggtaatgagctatgccaatttccacgtaatcatatggtaataacgcgaagttaggtcttccatttcgagactatctaatatcgattcggtccccacaaagttttgggcagcggcaatcgcatgtacacacagatacttgttgacatcaaaacgtcggcaataacaagttgtccttagcaagtcaacaaaataaattgcatcaagcaaaggtaaaaggaagtattttcttcaacgcccaaacgtactgttcagtgattcacacgcattgctcgtgtctatgttatacttctccccttcaaaataacaccttgcccaattttccacctgagcccattcatccaaatacgaaccgacattaggaaatcctctcctaaattgagcatactctctcgttaactcaaattgagtataaacatgtgcgcatgcaaggaatttaaccgcgacttcttccttctcatttttcacccttactttaacgttttgaaacaaatgccaaacacaatggccatgtctcgcgtttggaaacacctgcataactgacttgatgatgctttgatgtctatcactcacaaaaaccaaacctggttcatctggtataactgtttnnnnnnnnnnnnnnnnnnnnnnccaactagcatcgttttccctatcaattacagtagacgcaatgatataattgtgatgattaggatcttgggctgttgcaaaaactagcataccgccgtatacggtcttaagaaaagtggcatccacaataacaacttttctcataactttgaacccttcaatgcaagcacccaaagcaacgaataagtacttgaacttttgttgtgcatccacttccacatatgatattgtcccgggattcacctcctttaatacgtgcagataagagtacaagtcggtgtagcttttttcaggactaccacgcacatcactaacgtgttgtcttttccctctccatgcggtagcatacgagcaatgcaaacccattcttccccgaacaatactcattatgcttttaggtggtggagtttgaaactcacctggataatcctcatgcaaaatagacgcgattaatcgtggtgtgccggtatgtttacaattgcctgagttcttattagaccgcttgcatgtgtgcatcttcctgtgaactctaacactaaaacaatctgaactctttacttttgcacatcgtaaataccattgacaacctgttgttttagattgccgacatcgtaacatgagtcgctgtggatctgacgctatagttgtggtcgcaaaacaatacttatttgcagctctgttaactaaatcttgcacgacctctttagaaacaaattcttgatgcaattcaatccccgttccatcttcccattccgtaacactctgacttttctcactactctgacttccttcaccaacacatggaagctcataatactcaattctaccatcaacaccattatcttcagcaacatccatccggctatccacatgctccctatcttcaataactacattctccatagcctcttcaaaaacccggctatccgcattctcaatagcctcttctacactattagcctcttcaataatcggttcatcattcacacaattacctcctgcagcttctcctctaaaaatcgtcactactccaccattctccacatcaaatgcattcaactcctcataattaacaccaactgaacttcttctctctacccttgaaatttcttccaccctctcagattctttatttactacctccacgttcaaagctggtctaattcccttagcattcactaccgttagataacctaaaaagtcatcatcatctacaatagatgtctctctctgagatgtgcatagaatataactcaatttcaccttccttgaggtttcatctattccaatcttcttgcatatcttttttactaacatagagtatgttacctttgacgtcctcaacaatacaccgcttaaagaattgttagaaatccactcatgctcttctgaataatacccattgtcaaattgtatgaatgtgtgcttgttcttcatcgtctcctgtaattacaaataaattataaaaacacaattacgtaatcgtttagatttagatataattatacctatattataactcactaataccatttgtaccacctgtcctattgtatctcaataaaacatttgtaccgcttatactatgatatctcagttttaccatttgtcccagttcgtcaattctgggtttcacaaatcgtaaatttcgattgaacactcactaaactctctgattcaaaacgataaaacagcccagaatgaacaatacaacaattttatgttatgaacaactaactccaacaagaaattcacattaatctacaaatcaaaacgagatcggatttacttttgccgttgaagaggaagctcactttgggagcagattatcggcttggaagctacggcgatatcggaagctaactcgccggtgaaattagagcttaaatcgccggcgaaatcggagctcaagtcgccggcggcgaagtcggaaaaaatcacgcccgaagtcgtcggagagaatcgcgggagcaacgaccgtttttcttttttttttttactaaatgatttactttttattttgaattctccctcagttattcattaaggagagagatgtaattacacatggtcgagtggtactcagaataaatggatggtactcagaatagattttccaaaatgatggcagaatagaacgtggctctaaggaaccggcaacagattttaatttttaagagaggaaaaagcaaaaccacataggatttaagctaagataccactacgtcttgaatgctcattggtccaaaatgaacaaaaagaagaaaaaaaatactctcttaaaaatgctctttttttttctaaggatcagtg

SEQ ID NO: 35436 - DNA, 3983 bp, Arabidopsis thaliana landsberg
gtatgccacataaacaaacaatcattaggataaataagcttctctaagtcaagaaagaactcaacttaataagaaaaacttataccatcatcattcttgctagtcttggtaggagcagcttgctgcaaataacacacacacatacacaaaaagattgaaattatttcaaatatttcaaagagcatagttaaaacgaaagatgaacacagccattaccactttcaatttcttgagaatgttatcgaactgagttgtatcaaatgcccatggatttggcttatcaagaccaacacctgctccaacatttaaaaaaaattcagacctataacataaactatagatgcatatacaccacacaaatatacaaaaggcttaaagtagctctatcttgattccacaacttcacattcaccaaattacataaactaaactatgtaaacagacatttcctcctaaaaaccgaaaataatgttgttgttttttagtgtaagtgaaaagtagctctattaaagtttcctccaatctaaattccaccgagaaaaattcaaatcactagtttccattaaggagaagaagaagaagaaactaaccagatgtatcttgtttgttcgtaactctcacataacctttgataccttgcttatctttaccaagtccttctccttcttcccaaccctaaaaaaatcaccaatccaaaaaattaggtcttctcctttataaaatctctacacacattaacatcattacaggaaaattcactcaccatcgatttcataagcttgaaagcggcggaatccttacatattccgacgtacttaaccggagcttccggcgccgccatcttctcttctaattttccggcgattgaatggagacaatgcgtcgccgtttttcaaaagcggtgcggaagagaagagtgggcgaggaagtttagagaaactggaacagaaaacctaaagcgaagaagtgatgagtaaaactcctctacacgtggtctttagtaaacttcagtggatatgtaacatgatcgacggtcgagagtttatcatattttaaatgggctttaggaaggagaggcccaataaacaaatggatgtctaccaccacagacttatgaagtgagtaaaccagaaaatcgaagcaataacggcaatggctacttcttctactcagcttctactgtcttcttcttctttgtttcactctcaaattaccaaaaagccattccttctcccggcggaacaagatcggcgtttggagaccggagaagtctctctcgttatcatgtcgtccttcagcctcggtttcagctgcttcttccgccgtcgacgtcaatgaatctgtgacttcagagaaaccaaccaaaacgcttccgtttcgaatcggtcatggtttcgatctacatcgtttagagccagggtatcctctgatcatcggtgggattgatattcctcatgatagaggctgcgaagctcactccgatggtaaacatttcttgaaattcgatttggttaattcgtcttcttgtagattttagggttttgatttgagtttgatgttggaatttgtgtaggcgatgtgttacttcattgtgtagtggatgcaattttgggagcactaggccttccagatataggtcagattttccctgactctgatcctaaatggaaaggagctgcttcttctgtattcatcaaagaagctgtaagatttcgacgcttaccttgatgttcaattttgtgtgtatgttccagtattagctactccttctttaagcctgattttgtgtgtggtactttatagaatggttcagaattcaagctagatccataagttgatgggatttactcagcttaataatactcttgagtaaattattttcatctataggaagtagaagaaatatggaaatcagatcttatccctgaactgttgtcatcactcaacgatgctatctataagcttatcactcttgtatacatgatttttgtcttgaaaagccttggcataactcaattttctgttgaattttaggttcctgcatctttgtattgttagatttcaacacatatgattgatgataagtagcggtactcaaggttgaagctataaagtttctttcttgtcctgtcttttaagttatgggttcacatttggcgtaatgtgtttgttaagttcaccatgattgactgtgaatgttgattgcgtggaagctaatctgaatcacttgtaatgatgttatatagatataacagaagaaatgttagattctcgtcggtatgaagaatgattcaataaacttgagacgaggtttatttgactttgtgtttcaggtgagactcatggacgaggcagggtatgagataggaaacctagacgcgacgttgattctccagagaccaaagattagtccacacaaagagacaatccgatccaatctgtccaagcttcttggagcagatccttctgtagtgaacttgaaagccaaaacacatgagaaagttgatagcctcggagaaaacagaagcatagcagctcacactgttattctcctcatgaagaaatagaagtcaaaattgattttagctctttatcatattccttaaagtgtctcatcttttaagaaaaacatacttttgattgtaaagtgtaatcatcctttaaaggttaattaatcgaatcgtttcgtagaagcagagaaaatcgaatcatattttgttgatgattcattgtgattcctagttccttggtcagatttgaatataattggaaactgtgtcttggactgcaagttccttgtgacacaattttttatttgtctgtcatatagttgttgctttccttgtctacatgaattcttaaatcaaaatcagagaataataatatcatactgaaataaatacatcaatgatcagagaataatccttacccgtcaatataaaatcaacttctgactaatcagagacttaacatactgcaaatcttaagagattatacagccgtgatcatgatcgcacacaatagtagtgtgatgatgcattggacaaaccggagtgtcatggtgagactgagaccggtaaagagcttcttcacgttcacgttcacgttgacgttcacgttcacgttcattttcttctttcttcttcttttccgcagctgcagcggtttccgcttccttcttcggatcgaacgggccaaatgtagccattttcgcactctgccatctctttttgagttttttgagaatctgcatttcgtcaaactcaccaatcaccgttaacttcccttcttttgaatccatggtaatagttgtaattcctggaataaaaagtgttaagatttaggtcttgagactaaggaagatcttttcaaggtggtaggttcttttgagatttcaattcataatccataaagaaaaccaaaaacagaacgtattattatttttcaaagctttgcagcaaaagctcattaacaagaagaaacttaaacttaaactcacactcaaactcaataatgagtaattaaaagatttggtttttcactaaataatcatgaacgagacaagaaaaatcaaaatcattatttaagggatcatatcataacccatgaagaatcacataaatagagtatgtgtgtgtaatcgaaaaatctttgccttttcaatttaaaacgcatgaacagaacaaaaaaaagttttgagggtttcaaatcaaaactcatcaaaaatctcaagaacaggggaatgtgagtaacgaaaagctttgctttttcattaaaaactcatgaatattactacataaatcaatttcaagttttgaggtttttaattcaaacccttaaatgatccaaaaagcagagtgaatgttaaaagcaaaagcttttggcttttcactaaaagaacagaagaattagatacatcgttggagatagtcttaacagcaatcatttttgtagggtttcaattcaaaacgacagaacctaca

SEQ ID NO: 35437 - DNA, 3351 bp, Arabidopsis thaliana landsberg
aattagttaaccccccaaaggacttaagcaagattttcccggttatcgctgtccctatcgggttgcaacatttttggcctggtcaatgaccaataatgaacatacagtttaaaaaagaaccttctcattactagtaactatgttccaatacaacaatcgttcaacaattgatctcatttttgtttttagaaatatttcaatacctacttctatccatcgcttatttaaaattagtttatattatactacaaacaactcaattccaaatataacgattttaaaaaatcaacaagtacataaagtcatcttttaaaatctaattcaattaaggaaatataattaaagaaatcggtggagaggaagacaaacgtcagtcgaaccaaaagacaggagaagtaagatccaaaaccttctctgagacaaatggaacatgataggaaaaaaaagaattccctcaaaaaaacacaatatatacacaaaactttgcaggaattttgttcatacaagaattgcctaaaaacttccagttatatatatttatattcagaactaaatacttatacccaaaataaaggtgaaaataattacaaaagaaaaaatacacaaatttttacattttctacaaataacattaaatacgcatgtcaaaattttgaagacaaagaagacatcaactacaatcataaacaaaacgacgaaactatcaatacaatttcacattaatttaatttttcatctttctcatctacaattgaacttcattaaaagacaacaatctcataagacaacaacaaaaataattaaaacatttaaaatacactttctctcatacaagaccaaatatgagtaccacctaaacaaaattatcacctaatcattttatattatattcacttaccttcctaatgacgcttctacatagatgttggttaacaaaaaaaattaccccctcccccaatatttaaaagggctatatggaccttattaaaaaaaaaacaaatgcattgtatttccacctaatttctaataaacttcttattctacatatatcatgaataatcacaaataagattcactaacaacatacaacttcaaaacacaacattaccaataaaacccaacggcttggctcggggttctccttagtaattattaataatgtttttgtaagagaatgtgttttaaataacctgtttgaccatgttaaaacatattctcctactaaatatacaacaaacacccaaataataaaacaaaaacattattaataattctataatatacataaaaaagaggaaaaccgaacataactatctcccgcggtgtacacggtgggttgaatcctagtttatactggctaagaatgatcgggtttttggctcctgtacgaatatcttggctgaaatatttgtcttacgtaaatcatagaatgattggctaaatgagggtaaatagtgaaataaatctttttttttttggtgcacaaacttaattatattgctcaaatgatgttctggtcatacaaacttagacatagttttgcaacagaatcaaccacaacattagatgaccgaggaataaattggcatattaaagtagaaaaataatcgatacttaatagaatgtcttccaaaataccgtgaacttccaaaagaactgaacaagagttgatggctccgatcaaatgttgacagtcagactcgagtagaagatgatccactcctaagctgactacatctagaattgcagttctacaggctaaactttcagccatgagagttgatgaaacgttctcgcaaattgcagaacacgttgaggtccctcctgcccctggtcccttaatactcccgccaaggcccgccactttgatgtcctctctccaagccgcatccgttctacaagagacactacgccaatcctggtttgggaggagactcctgctcgctgccaaaggcacagaaggttgcttgtcttgtggtgaggtatgggctgagcattgccccactcttttctgataagagagaacaatatcattaaagactttttgattcctagcttttcacaaattccagcagatccatggcgccaaaggaccaaaacagactcttgctggagcaaacacaaaagagaatatctagagaaaggggcctgtttccacacctattgggcaaaatgacacataaagaacaggtgcaagatagactctgactctccactcctgatgcaagcatcatccacaacaatgttcctttctcggagttgtttgccagtggacagtcctccataaagagctctccagagaaacagcatgatctttggtgcggttttgactgaccacactaaggaattccacatactatcctcctgccctgccggttccgcaagcacaagggctgagcttatagctacaaaatagcccgactttgtagtgtaaattcctatcttttcttccaaccaaacctgcttatctcatgccccaaggcaactaggcttaaaatccagtatcaaaccagagagaggggagcaaacagagctgactctttcctcaccccagtccactgtatcttgtatgaatagatcacatactcgccaaaataagaatagagtatgaaaggatctcttcactgtattgagacctaaatgaatctctgaaaacaagggatgaatagcttatgtctctctgaaaacttgttagaaaagaacttaggtctaaacaatgaactttaaaactatatataaaccctattttacgtccagggactagtaatgcaaatagggaagtcttttggggcaaatttccacttcggttaacttgaaagcgtcatggacttttctgggccaaaaatggtgtcggtggacactccctctgaatctggaatctgaaatcgtctttagttgtatttttcttagctcttgcaccaaaatgtctcctcatctccattgttgtcccacttgacagaatacctgaataaacactaaaaagactcgagaaataacataaagactcaaaatccttatcctaaaacatagataaaatcagtaaaaacagggttatatcaggtggtaaagctttaacaaagccgccaactttatgaactgtcgggttgagacaccttaccaccacactcatggtgttctcttcaataaggtcgtcattttcctgatctgaaaattttcaccaaatcaccttcacctagtagatacttgagttagaagatgataaatatgtgagtgaacttgggaagttagaaggtagttcaactgaagcagattgtgattatgcagtgacatagacacctattctcaagttcttttatgatgcaacggtgagaattgagcaactcgtacgtt

SEQ ID NO: 35438 - DNA, 947 bp, Arabidopsis thaliana landsberg
  unsure (1)..(947): unsure at all n locations
taaaataaaaaacggattaaactgaaagttgaacgtcgtgcaactacagtcgcgtgcgcgagaacacgctgcgcgcgccggaagcacgcgagccgcgtgggtggcacgcgaggccacgccgaggcacgagccgccggggacgcgggcacgaccaccagggcgctagggtgcggggtcgcggggcgcgcaggccggggccaccggggagcgaggccaccggggcaatccaccgccgggcagggaggggcgcggggcggtgggccaccgagggcgagccaccgctggggcacagacacgcaggggcgcgtggcgctgaacgcgcggnggctaagcctgccgcctagggcgctggacgcgttaggggcgcgcaaggaacgtgcgcaggggagaaggaaggggagggggaggggaagagagagagggagagggagctcacctcggggtccaaatccggcgatcaccgtctccaaaactgtcggtaccctgaatcaggggtaccctcttctacagtatgaaggcgcggtacatatacgacgtctccaggtcacacggagaacggcactcgaccccaccacatgggcaggtctaaaaggcaccacgtggcaagaaaaggtaatacatcccaggaagcgccgttgggtccggacctccgcaaaggaacaccggacccttgtgagtacgagtccggagctcccgaggaggcatgctgggcccccccgaatgaggtccgggccttagcaaggtcccgggacggagaggaccccggcacaagcaagggtccggtgccgacacgtgtccagtccttgccctacgctccccgcccaggcgaaaacccgccgcggccgcgtggcttgtggctcgtgacataaggcaacagaccgagcctaacgtaaggcccatacagctgtgcagtctttgcatttactgcggagatgatgagccgcctg

SEQ ID NO: 35439 - DNA, 2340 bp, Arabidopsis thaliana landsberg
aggatcccatctgagcacgatgattctgactgcgtgatatttcgcacccccacaacgttatccaacgatgccaagcacgaatcacgtcgaccggcgcaaatctagacgtgcggctcacgggcggcgagggggactgaacctagggatatttagtgcactgtaccatcagattgttcttcagttagcctgacagaccaagtttggcattgattttctcctaaatttacatggcaagttgttgatcggctagtagcaaatttgttgtctaatgatccagctataaaccgactgtggtaaccatgctcaaacacccacgggatcatcttcaaaatggcacccaaagttcatcccatgccactgaataccataattcaggttttagacagactgacagccccactttgggcacatttatctcaaaatacttcatggtaccaggacttgatctctttagcaaagttgttcttctatagttggtcttcaactttgatgtggtgagctagggcaaaaaccctataatttgaaagttacaaagccccaaagttgagccaattctctgattttcagacttagaatagaactcaaatgaggtccattttgcatttaagtccaaaacttagggtttggctttcaaatccacatatttgtgaaccaattgacttaaaatacttatttggcttggtttttgcactttaacccaaaagtgggctaattttgcacataagcccctagggtttggtttcagggttttccagggttccaattagggtttctggtatcccaggggtataaaagtgattcaagtttattcttggggtcatttgatgacttttaccctaaagtctttaggttccttaacttgggttaagttttcccctttaccactatttagggttaagtttcctatccagggtcctatttgtaaaacagtaaaacaatagaacttgtttgaaatttttgcctagtgaatacactctaggtgtgtcaaacatatgcaatgccaatgctatgatgtcatgctcaagttttagttacagtaacactaggggtgttacacgtactgttcacgctgacttgtacttgctcgtgcgtcatgcttgtacttttaccttctgtcaagccaaaggtacgtttgtaattcaatatcatttctatttttccatgataataaaatgggaatgagttgataataatatataattgttcatattacctcttacatttcatatgcttctccttttattaacatatactgcgatgatgaaggtatgtccttcatgaccttcgtctgaagatcattatatgctaagggaaataatgcttccaaggacgaagacatttaatcgttaacccttcttttgtgttgccttgttcttaattcttagcatttgagaacaagtccccaacattggcgcccacctccggtgaactcacttccacttcgagttttttgaacaccttcggaagctatagaccctcgctatggcaccgaagaaagcttcagcgactggggctgcagcactgcaaccgctggaccccaaccaggagaccgtctctctccgggaggcccgaaaccagaagaggaaggctgtcagcccgacgattcaggaggatgaactagaccaagagatcagggacatggagatgctacatcaacaggtgcagaggaagaaggagaagatggccaggctagctgagctgcagaggcagatagacgaagcttctgaagaagtccgtcatcttacccacgatgagcagaaccgaaggcctcaacaaaaagaccttcatcaggagggcttcttcaatgaagatgactggtatgataattttcatcatcgaaattttgtttttgacgatgcttctcctctgtccgctgagctgcaggctacaccttgggcttcgtcctataagccaccccagcttcccatgttcgatggccattcggacccgaagcagttcttgatgagttacgaagcaacagtgtcttcgtatggtggcaatgctgcagtaatggcaaagtctttcgttatggccgtcaggagtgttgctcagacctggtattcctcccttcggccaggaacgatcacttcatggcagaagctgaaggatatgttattgaccagctttcaaggatttcagacgaagccggtcactgctcaagccttgttccagtgtactcaggatcatgaagaataccttcaggcgtatgttagaagattcttgcgtttgagggcgcagcaccaacggtgcccaatgaaattgtcaccgaagccatgatcaaggacttcgtcctggacctgctgctcaatactttgctaggaagcctcctcagaccctgga

SEQ ID NO: 35440 - DNA, 3848 bp, Arabidopsis thaliana landsberg
tgcaggtgatttgccggacccggtcccatttgatagggtccgagggctcgatgcctccctctgatgggattctgttacagaatcgctcctgctggtctcggaaatgtcctagggtacctcgggagcgtagccaagcctcggccatgtatcggacgtacccagagtcatccctcgctctgcgtgttctgaggcagtagtaggtgcggagccgacgtggcctgaggcggctgtcgaacccttccgaggggccagccttcgaacctctgaccagtagtgggcgcggacgccgagtgctctgaggcggctgtcgaacccttctgaggggccagccttcgaacccctgatcagtaggagggcttggggacgcttccttcgcatagaaggatccctttcggagtacccctttctcggtccctgtagcaagagagagaaaggggaagaggaaaaggatacgaaattgaatgatgtggcgcaccttttttgacgcggtcattatggcggaggtgaagcgtcgcctgcttcgccggccaaaggtgccgcctgtcctgccgcagagttaatgcgacgggacaagtggttcgcggggcggccgttgtgcgtgcgcgagccgttcgaggaacggaacacgagcgtgtcgtcttcacgccgtgggagagggctctctcgctgtcccaggaggggatgtgagcctgcagtcgacttgaccgctgcttccgcccgcctaccaccgccattactgtcggcccacttttggccgtatcaaccgtcgcgccttctcccgcggctgactgacccatgaccgatgtgctcggttggcactgtcgggtcatgcgcagggtcgcctcgagtcgcggcaccggttccgcagccgagaaggcgcggtactggcgcgagtggcggtgcagtttcttgcacgtagtaaccggcgcgccggttacatgacgtgtgggcctgggccccccatgctggacgcgttggaagtcgaaagggtgcgcccccctgatacggttgcatgccgcctgcatggctgcccggcctttcacccgctggtctaggcgaaagtgtaggaatgctcgtaaccgctgggcggttgtatgcaccacgcgcggcggtttggcttcttctgctctgggtcagcttgcatgacgcatgggacccaacccccgcgccgcagggggaggaccttggagcgtgttggagaagactcggcccacgacggctggggacgcaagtagggagagtcgcctttaaaaggagggtgacccccttgaaaggcgaccatgtcttcgtgctcccttatgcatcgtgtctttccaccttccgagcccccggatggggatgcccgcagtccttccgccttgtcgttggggggaacgcaactccatgggagttggtacctttcagccatcgttcggcttcaaggattttcatcatgcagcccggctgattcactcaccaatggtcatccaggatgatgacaaccagttcgatggtggggagaagcaagccgggctgcagcctctgtcccgccctcatcttcaaggatcttcatcatctgagttggggaggagggaggggcaggtcggggcctacctccgcgtgacagcggcccgctccttccctcagtgatcgggggagaggggcgttcgctgtccgtggagctggtgctgcttccggtgccgcctcctaccgctgggcggaaagtgctgcccatccgctgcacgggtgtcaggatcgccttgcgcgggccggccacgtccaggtccttcctgcgcgccggctgcaacgggggtcgcacaacacgtcgtacgcgcagagggcggtgtttgtgttctgggacggtcccgtcctcattcctgtggcgaggacgagagtgaggacctgccggtgcgctttagggcggtcgcgctcgctggtgcggtgttggtgggcaggtgaccgctgtcgtcggtgctgaggtggtggcagccagagaaggtttctccactgacgagaccgtcagcacctcctgcggtcggacctccggctcttcgactttgacggcttgtcctcgccccttgtgtggggacgtgggcgagggcctttccacagcagcgtctgccctgaggtcatcgctgctgctgtttagccgcccgaagcgaaggtcgttgtcgctgctggtgcagtggtcgccggcgagccacctggagtttgttgtcccgcaggccctctagtgtggaggtagttcatacccgcgggagtggaaccggagttccgtttgtaatggcaccctgagtatgggtgtctgttcattgtggctgtcgaggcctgaacatctgggtatttgggcgtgaacggtgtttcttctcatttcgagcactaggactcgtttgtcagtagcagaattgcttacccgagtaagagttatttttcgcggaaggtgacgagtgaggtatccatatcctggaggcgtaggagtccctcggctcagtcggccttgccgcttacacgcgctcttactcgttttgcggggttctgttaccgatatagtcgggaaacacgaaagtcattttggtggaaaacttttccgaggaaaattttgacgtgcagggggttccccccttctagcccccgagggagggtcgggctttgctgaggcaaggcgacccttccttgatggtcagactttgtgtatgtaaacgaggtatgtgaactacttaaaacatcttaagggtagaagcgacgtagctgttggatgttccaagcgttgctgtagacctcgccttggtcgttggccagcttgtatgttccgggctttaagatcttggtgatgatgaagggcgcttcccagggaggaatgagcttgtggcgccctcggcgtctctgtcgcaggcgaacgaccaagtctcccacttggaagcctcagggccaaatccttcgggcgtggtagcgtcgtagagactgctggtaccgtgctgagtgtagtaaggctacgtcccgagcctcttccagctggtccaatgaatcctctcggctagtctggttgttttgctcatcgtatgcctttgtcctcgggggaaccgtattctaagtccgtgggtaggacggcctcggcccatagactagaaagaacagcgagaaacccgtggctcggcttggcgtcgtcctcagactccagaccaccgagggtagctctttcatccaccacttgccaaacttgttgaggtcgttgtagatccttggtttaagtccctgcaaaatcataccgttggcacgctccacctgcccattcgtcatagggtgagctacggtggaccagtccacacggatgtggtggtcctcgcagaagtccaggaacttcttcccagtgaactgcgtgccattgtcggtgatgatggagttcgggaccccaaagcgatggatgatgtttgtgaagaacaccaccgcctgctcggacctgatgctggttaggggtcggacctcaatccacttggagaatttgtcgatggcgaccagcaggtgcgagaagcccccgggtgccttctgcaagggaccaacgaggtacagacccccacacagcaaacgaccaggtgatgggtattgtctgcagggcctgagcgggcaggtgcgtctgtctcgcgtagaattgacacccttggcaggagcatacaatcctagtggcgtcgaccaccacggtcggccagtaaaagccttgtcggaaggcgttcccaacgagggctcgaggtgctgcgtggtgaccgcaaggccccgagtgtatctcttgcaatagctcatgtcttcggcgatggatatgcatcgttggagaatgcctgaggggctacagtggtagagcaccttttcatcaccca

SEQ ID NO: 35441 - DNA, 4806 bp, Arabidopsis thaliana landsberg
caggaaagctcgttggaatttgacgtctgaaagtgattgatacttgttcggtgcacggctcttttttggaaccttaaccagttatgacttcttaaacaaatttcggttctatttcgcctttattctgatagtgcattgtattctcctccagagttcgacgataatgtagttaggaacgctatttttaaaatatgaagtacacggatcgccgaggaagcatcttttaaaaccaagattcgtttaagagacaagcatgagacggtggttaggtaaggcttacgggcaatgtgtgtaaggacctgagtgaaattgatgagatcggaaagagtatattcgcgttgtgtagcttgaaacattccttgagagccttgaccattatcgtgtaacaggggctgatacggtaaaattatttttaatggtcatatattaaaaggaataaaatttcgagggcttaaaaagaaaggaatatattattttggtaccaaatcgcgtcctgggcgattggtttccacaaaccacgtgcaaaatgcgattgactaacttacccttttaacagttttttaaaagtttcgtagttaagtcttctggttttcttcttcacagtcacgcctcacgagtcatgattgtcgccgtcgtctctttgataaaggcaaaaattgaggaaccctaataaaaaaatggagcgcactacgagaacgtcgtcgagggagaatcaaatttcgagattcaattgaatgtaaagaacgccggagacagagaggggagaaataaaatgagttagcaatttaaaatgtaaagaaaaaaatggtggttcaagctgagtacgagccagcggaccatagtggatttgtgtggcgtcgaaccgttgtccgtccactgctgagagcgggaggtagtcgctgctctgtgaagccagcctaacgcaataccctcaacctttagcaaccgtacggaccaaaccttcgattggttcgtatggttcactcacagcttggactgggcggtctagaactatgccaacaacaaatccgacccgtgggccgatccagtgttccaccatcttacagtccccacttgggttacaagctctcgttacatagctcgacgttaagaagttgatttaatgagatatataaacaagacaaattatgagtagaggaaccgatgtgggatattggagaagtttcattgtcccacgattagataaattatcgaccaaaacttatatgtagataattacattttaacattgataccaaaaaaaagaagaagataattacatttttcttattagacatatcagtttttggtaattgtgaaggatgctttgactccatcaaacctcaatacaaaaaatctttgtaagtcaaagatttaatgatgaaaattaaccaaagcaaacactgaaacttgtgatagagagtagagattcttccattttcttattttttgtatgatttttttgtaggataagttacataaagcatacaatgggaagaagaaacatagcaccgccctctgttttccttgttcttctctgttttttcctctacatctctttcgtttccgagccctcaaacgcccagtctttgccggcgtttgcctgcaacgttgcaggaaacccttctctcgctgcctttgggttttgcaacaccacactaaacattgaaacccgagttgcggatctcgtcgggagactaacgttgcaagagaaaataaggtttttggggagcagtggaaatggcgcgagccgtttggggattccaacatatgaatggtgggcagaggcacttcacggcgtatcctacatcggaccggccactcgtttcaccgagctagtccctagtgccacatgcttccctcaagttattctcactgccgcttctttcaatgtctctttgttcaaggccattggcaaggtacaagaataacataaaatcacattttcaaaaccattaacagtacgttagatgatgtttgctttcattgaattaactctcattttatgatatggtttaaggctgtgtcaacggaggcgagggcaatgtacaatgtgggactggccggattaacgtactggtcaccgaatgtgaacatttttcgagacccaagatggggaagaggacaagagactcccggtgaggacccaacactctcgagcaatacgctgtggcctacgttaaaggtcttcaggagactgaaggtggagatcctaaccgtctaaaagtcgctgcttgctgcaaacactcaaccgcctatgaccttgaaaaatggaaaggagtttcacgttacactttcaacgccgtggtaaaaactttcaaacacttatacagtttgatatttggtccgactccgaccaaactacatttggatgatctctcctaattgtttggtgtattgggttaggtgacgcaacaagatttggatgatacatacaacgcaccatttaagagctgtgtgattgacgggaatgtggctagtgtcatgtgttcttacaaccaagttaatggtaaacccacttgcgcggatcctgatttgctttccggtctaatccgcggtcaatggaaattaaacgggtaagagtagaaaaagtggtctctaaataacatatctaattctatgttgcgatttttcatttacgggtttgttttaggtacattgtttcggattgcgattcattaggtattttgtatggttcacaacactataccaagactccagaggaagcagcagctaaatctatactggcaggtttggatctaaattgtggttctttcttgggtaaccacacagaaaatgcggtcaaggaggggctgatcgacgaagcagctattaacaaagcaatttcaaacaattttgcgaccctgatgcgtttaggattctttgacggtaaccccaagaatcagccctatggtggtttgggtcccaaggacgtgtgcacggttgaacaccgagaactagctgcagaaaccgcaaggcaaggcattgtcttgctcaagaactcagctggttcgctaccgctctctccttccgccatcaagacgttggccgtaatgggaccaaatgctaatgtcacaaaaactatgataggaaattacgaaggtgaattcataacttatatcaaattaattttaaactcaaacctcgaacgtggatcaaatataattgttatgttttcaggcgtggcttgcaagtatacaacaccgcttcaaggacttgagaggacggtgttgaccacaaagtatcatcgtggctgtttcaacgtgacttgcaccgaggcggatttagattcagccaagactctagcggcatctgcagatgcgacggtgttagtaatgggagctgatcaatccattgagaaagaaacattagatcgcatagacttgaatcttcccggaaaacaacaagagcttgtgactcaggtggctaaggtggcgaaaggacaggtggtgctagtcataatgtccggtggaggatttgacataacattcgccaagaacgatgagaagatcacaagcattatgtgggtcggatatcctggtgaagccggtggtctcgccatttctgacgttatcttcggtcgtcataatccgagtaagactctgttctccgatttgaaccagtgattatcgaccggtttggttttatgattgtcattttcataaccggtgatttttttatctgttaggcgggaaattaccgatgacgtggtatcctcagtcatacgtggagaaagttcctatgacgaatatgaacatgagacccgacaaagcaaacgggtatccgggtcggactttcagattttacaccggagaaaccgtttacgccttcggagatgggctcagttacactaatttcagtcaccagcttattaaagctcccaaactcgtctctctcaatcttgacgagagccaatcctgtcgatcgccggaatgtcaatctttggacgcgatcggaccacactgcgagaaagccgtcggtggaagatcggattttgaggtttaattgaaggtaaggaatgtcggagacagagaggggactcagacagtgtttctgttcacgacgccgccggaggtacacggatcgcagaggaagcaacttctagggttcgagaagattcgtttaggaaagaaggaagagacggtggttaggtttaaggtcgatgtgtgtaaggatctgagtgtggttgatgagatcggaaagaggaaactcgcgttgggtcatcatcttcttcatgtgggtagcttgaaacattccttgaatattagcgtgtaacaatagggactgatatggtgaatttattttttaatggtcaatgtttaaaaggaataaaatttcgagggcttaaaaaggaaaataatatattattttggtaccaaatcgcttcctggacgattggtttccatttcaaattaaattgactaaattacccttttgacaaatttttaaaagttcatagttactagtcttttggttttcttcttctcagttacgtctcacgagtcgtgattgtcgccgttaacggtatctttgccgccgtcgtctctttgataaaggcgttaggttacggaccctaataaaaaaatggtacttgtctcacttttaaattaataaacaaattttaaaaagagaacgacgaccttcgaggaattttataatgaataaaaaggagcagatactacgagaactcactttttctgattccaactgggttttaatttcttactttaggggaaaaagtttcgatctttcttctcttcaattgggtgctttttttttgttggtaggcattgggtttaagcagtg

SEQ ID NO: 35442 - DNA, 4893 bp, Arabidopsis thaliana landsberg
tcatctaccaacaagtctcttggtgggtttaggtgtctgtgaatctctggaagaagattattaatcgcatgaatcacaaactctttatcatcgagccgcattgttaagcactggaagatataaactgtcttcatgaactctgttttgctttctgttgcaatgtagtcccatagaccaaaccagttgtcctcttggtagctagacaactcatgtaaaacatggaacaccacctgacagagaatcttaaacgtgctctcaggaattcctatctctgcaaggcaagagatgagcaacggctggatttctctaatctctgaaatacttatatcccctttcccagcagtgtgatcacaaaataactcataaagtctcgtgatagctatctctctcgacctattaggaacttgacctactgaaacctctctcatgatttccactggagataaagcatccaaaatgtcttctaagtcacaaacatcatctactccaagatatttattctcattgcgaaaagggctaaattcgaaagctggattgtgcacatacttatccagctttgtaaccattcgatagatcttccaagcaacttccttggcctcttttccgatatctgaaatcttaaacgcaaactctgccacaaacctgcattgatcactattccacttaaacttgttcgcgtcttccaccaagaaaatctcaagagaatcaagtccatttagcagaaactcttcttccatatcattccacacaacatcaagagaacatttccaaacaatgtgaagaatgtctcttgtcaaatcaaatctcatttctgaatccataagcaaaatccccattttaacagcagatttcaaagccaagatccaaacttcaactccatattccacaggacgaagcaaaatcttgtaaacttcatcaagaaaattctgcagaaaccggtaaatgaattctccgtagagtgatgatggcaattggataaagacctcaaaagccctaatcggatcattgacaacaagtgagagtatacaatcactcatctcttcccagacaccaactttatcagctactaaagaaacaatgattctcacaatctttgagtcacaatatttagggttttgcattgtcaagcaagaaatcagaagtggtttgatttcatggagagtgacaagagagagttcgaatcgctgagcttttagagtttcagttagaagacagatcgatcgtaatcggaaatcgtcgtcggaagaaaatcgatacaccgtgagaagctttagggttaagcaatttgggaaagtagagacgcagaaatcaaacagagctcgcgctgatttgtgttcgtcggattcttgaggtgtatagacttgttcgacgataatcgctatttcttcgttgcttggagtcgcaagtatagccctagatttcaacgtaagagacgaaatttttgccgttgctgtttcaccggaatcggattcttccattgccattttcccgagaaaattttgcctcttcgtctcagaatcttctggagaaaatgaatgggttcaagggttgaagaatttggaagggtcacctcttatgccactattggagaagaaataatcactcgtgccattcttatgtttggaataatattattgattttttttaaaaaatcaaaaaatgaggaaaggacgaaaaatcctagcgaaaccacgaaaactacaagaaaacttaatttgttgggctcgggcccaataaaaaatgtaaatattcggctcagttgtattatttacccgagaaaatacagaaaaaaactaagtaaaaaaagttcttccccttttcaacttctcgacttcttctctcttctctccgtcgtcgtcttctctcgtctccgacgacaccaatttcgccggaaaaagcaatctcttctcttcttctttcttctccgttttcgtttcgtctttgtctctttcatatccgcaaatttattttccaatggctagagtaaaagactcaactggggaatatgaatcaactagggttgaagcgaccggcgaaattcctccatcagtcgaagaggccgccgccgagattccccaaagagatgaagaaggcgcagagcttcttacaacagaagaggaagccgaagaaattcagcctacaaccggcgattgtgacgtcgccgatttgggtaattcaaacgccgtcgcaggggattcaattgacgatctttcagacccaaatgtcgattttcttgcagaagaagaagaggcaacgaatgcagttgttcaacatgatgatggagcaaataaggtatgagagaagaccgttattttttggattaggctcgttttaggatattatgcattggtaaatgattggatttgtgaatggtgcttcagataaaacaagtagtacaactaggtcgtaaatttgtgaatggtcattcagaaacaagtagtacaactaggtagttaatgtggaattgaaagtattttgaattgaatatgcaggatgatggtgatgatgataacctgtcgcagaatatgcaggatggtgatgatgataacctgccgcagaatatgcaggatgatgatgatgatgataatcaaccattgccgccagaagttatgtactttgatccaactacctacacgaaggtgtgtaagataggaacgaggtgtcagttggtacaaacagtggaatttatagagactttggatgcagaactcaagtggtttaggaatcatgaccaatttaagcacatattccacatgcctaaggagcccaatcacatgattcaaggcatgtggatgcttatggttcgcacggctaagacagaattggcgagagagtgttggtttgttgtcaatggagtacctataaggtactcaattagagagcatgcattgttgactggtttgaactgccgtgagtacccaaaaaactataagactttaggcagtttgaagtttgttgagaagttgtttaagaggactgaggacatcaagattaaagacgtggaagagaagctggaagagtttaagagtgagaagtctactgctaggttgaagttggcaattctgttattcttagctaaggttatgaaagctgattctaaaggggattcgaagatagaggagttgctgcttaggattgtggataatgtcagagcttgtgagacattcccgtggggacgtttttcctatgagcagtgtatggaaggggtgcagagagtaatgaagaacatgaaaggtgtggtgaaacccaaggcacagactgctttttatggatttattactccacttgaggtaagtagtcgagtaaattatatgagtggctagattttgttattgtgaacttgcatttacttttatgtttttgtgtctagattctggcatttgagtgcattccgcagcttgggaagagatttagagaagttgtacatgcagacaaggaatgtccaagaatgtgcaagcacaagttcagtgaaagttgcatgaagggatttactttggaagaaataaatgaagcgcttggagatataacggttagctttgttctcttgaaatctatgtttataatctttgtagtgtttgaaatatatgtttacttgacaggatatttcaagcatcttggaacctgatatggatgagagaaaaatgttgtcacgcgttgtagagaagcatgttgatgatggtattggatatatcgatccaattgttgatagctggagagagaggcttatcgttttcgcacggctaaaattttttggcgtagtctctaccaagcagacattgatggtagacgtattgaaactgttgatgatgttccagctgtacctgaacctaaaatccctgggacatcgattctctcgttcaaggaagctatggagagaggatttgacaagctcacggacaagcttgctgtgatggatagcgaaatcaagcggatttgtgtgagagtacaaggaatagaggaatatgtggcagatcagcttgagaaagaggcagaaaaagacaaatatgaagatatgcgtcctggttcagctgctgattttgtgccaccgtcttatcagcgaagggatactcagagcaaggccatggttattcacagtggaatccgtgacccagcacctccaactattgagtctctaagtgagtttttgttgaacttttgtgtagtgatgctttcacaatagttcttacatgtttggttacatatttttgtaggtgatggcagcgatgagtccgatgaagaggataagaagaagaagaagaagaagaagaagcagatatcgaagaagaagagaaagcatgttggtcctactatggaatctgggaaaaaacgtggaaggaaaccttccaagtataagggggaagagtttacagctgaggggaagcaaacgaggaagagacagaagaattaggactttgacttttctttcttgcttatgtgtgtgtgtggactcgtaggtgtttggagaaataggactttgactttttttttgtgtatttgggaatgttatgcgtagtttatgtgtagaggacaaacttattttctgaaatggtttatgtgttttaggattttattaaaatcaaaacgtttggctaagttgtcccggttggccggtcaataatacaagagtggctaagttgtcccagttggccggtcaatacacataacttaaaatacaagagtggctaagttgtcccagttggccggtcaatacacataacttaaaatacaagagtagctaaattgtcccaattggctggtcaatacacataacttaaaatacaagagtggctaagttgtcccagttggccggtcaatacacataacttaaaataggtaaatacatgtctaattaggttcaaatattacataaaatccagaaacataacataatta

SEQ ID NO: 35443 - DNA, 6122 bp, Arabidopsis thaliana landsberg
ttttttgttttcaaagtggtgaagctaaccatgaaatcgactcaccatcacagagctccactaatatctgcttcttcctcatcttcatcttcttcccaaaaccattcattcgtctctaggctcctccttctccttactctacttccagtttcccttgcttgtctcgcctttatcctccaatggcgaggcggtggtctcgccgatcctgcctctgcttctgttcgttcctcgacgtcggttcctggcggctccgatctcaatcacgaggtctttcccggcatggagactgtttcatctgtctccccaaagtctcaccaatcctcctccgactgctcaaatctagctcgcagctcttctccttcttttccttactatgctgattggaagtttggtgttgatactagcttaaagcctaaggttactactttcaattcccctgatttcaagtctttggatcgatctacacttccaaattccttttttttttcttaaatcttactacaatgtctaatctgaaatatcaagttgttctttttttattggattatagagatttgagaaataccaaagttcattttttgatcagatctgtctttgtaaagtcacctcactttttgtgctccatgttgtatatgattcttgacattgttactgtttacagatatgtatcacgactagcacatcagctggattggatcagattctaccatggatgttctaccataaggttctaggcgtctcaacattcttccttttcgttgaagggaaagctgctactccgagtatttctaaagtgctcgagtctattcctgtgagttgaactacctctcttcgcgtccactgtttattttgttttggctgtatatctctagctctttagtcctgtaggtataaatttgtatttaaggtatgcagttttcgataaatgtagtcccatgtctcttgcagggtgttaaagtaatatacaggacgaaagagcttgaggagaagcaagcgaagaggttagttagttatcccattgcatatttgcgacaaagctatagctcttcaaggcactaaacacatgttttgttgtatattctgaaattgtagcattgttttgttgtattttctactactgatcactttactgtcattcttttttgttttgtttcatcagccggatttggaatgagacctggctttcgtctttcttttataagccctgcaattatgagttatttgtcaaacaatctctcaacatggaaatggctattgtcatggctagggtaagtatttcttttagaccttatttggttcagttttgactcatgtctcatgttacattctcatttttcttgttcttactaaatatcaggatgcgggcatggattggatacttcatcttgacactgatgagctgatatacccagcaggtgctcgtgagtactcactaagacggttgctgcttgatgttcctccaaatgtggatatggttatatttccaaattacgtgagtgatatctcattcgcgcttcttgcattgcttatattcagctagttttgtgagtctaaagtttcttttatgatctggcctctgctatgaataatgcttttggattttgttgtttaggaaagcagcgtagaaagagatgatatcaaggatccttttacagaggtataattcagtttattactgtctttacgtaagagagtaggtttattaatatttgtttgttatgttagtattacttctgagatatgtgtggtgcaagcaggtgtcaatgttcaagaagaattatgatcatcttccaaaagatacatattttggaatgtacaaagaagcaacacgaaataatccaaattactttttgacttatggtaacggcaaatcagttgctcgggttcaagatcaccttcgtccaaatggagcacacagatggcataattacatgaaaactcccaagtatgtctatcatatattcaaacataactaaattttctattggttgaggaacatgataggactttgttgttactctaatatagaaccatgtaactatcttaaaggagttagcagtggagtggagttccggttaacagcgtagttaattttttctgtttgtgaagccaatttttttttggaaatactaacctgatgattcttgctagtgagatcaaattggaggaggctgctgtcctacactacacatattcaaaattttctgacttaacatccaggcgtgatcgatgtggctgtaagcctacaaaagaagacgtgaaaagatgctttatgttggactttgacagatctgtgagcatcttttcttaaaatctctaaaagtccttagtcatttcttaaaatctctatatttcacttcctcttacccttttatgatgctgtatggatcaacattgtaggcatttataattgcgtcaacagcaactgacgaagaaatgctaagctggtaagagccttagcatcgttcttggttacttgtgaaatagataacttctgacactctttgaacaagtttggtcctattgtgattacaaaaagtaatctaccctgtgtaggtaccgtgaacacgttgtgtggggtgacaaagacgtgaagacgaaactccttaggaagggtattctgactcgcatctattcaccaatggtaagaacatactctgcaattcattatacaaaattccaaacacaagtcctggaatgttgagttcttgcaagtcaattgtaaaatattatatacatttgtggtaaaatgcaggttgttatacaagcattgaaagaatctggtgtcttcagctcggttgtctcatcagcttctacaaatctgtcaaagaaaaagttcttatcatcaattcacaaaagcaactcatccaggtctactgcatctgagtcccttccatcaaaggaaagcaagtctgagggcatctctgcaaggcaccttcttgaggctgaatcagccatccctcctttatcgccacctgggatggaacaagctagattttttacagaggattaacaggttttagcacggagctgatgcattcgcttttactgatattgatactggttgcaatatgagtgctgtgtagctttaggatggcaaatgaagtggaacaaagaagagtgaagaaagcggctttgtgtgattcttcctaatcatattgaaaagtcatcgattctcttgtctcattttgctctccctctgcaacttatgatagatgagtttgcagcatttttctgttgtcattgttacttctatgtaagtttattactatgtacagaacttcaaagcacagagccttggactcatttttctacttacatcgatcgccttataactacaccactactgtcatggcctcttcatgggcaagagtaataccaaccttattaattcaagtttaatacaaatcgattaacatgcacctaaccggtaatgactcaacacgcatgttatcatgaggatgacacaatctaggattccaaaaaaaggtatgaagaaagagtcaatggtccataaacgaagatttggcaccaaaaagcggagactcctcaagttatatataaaaagcagagtaagaaggaggttttgatgtgatgattgttgtctgagagagagagaagaagaagatgaacgatgcggatgtgtcaaagcagatacagcagatggtccggttcatccggcaagaagcagaagagaaagcaaacgagatctccatctccgccgaggaggaattcaacatagaaagacttcagcttctcgagtctgccaagcgtaagctccgtcaagactatgaccgcaagctcaagcaggttgatatccgcaagcgaatgtcagccatctcccctccccttccttcatctatctccttctccttttgctatggcttttaattcattccatatatgtttctcttcagcgactactccacacaactgaatgcaagtaggattaagtaccttcaagctcaagatgacgttgtcactgccatgaaagactccgcagctaaggatcttctccgtgtctccaacgacaagaacaattacaagaagcttcttaagagtctcatcattgaggtttgtatatatgtttatcatttctcccctcaatatccacacgtgcttaccattgtataacattactacagagtttgctgcgcctgaaagagccatcagtgctgctgagatgcagagaaatggacaagaaggttgttgaatcggtcattgaagatgctaaaagacagtacgcggaaaaagccaaagtcgggtctcctaagatcaccatcgacgaaaaggtcttcctccctccacctcctaatccgaagctccctgattcccacgaccctcactggtatacttctttccaatgtttttaaaaccgacccagacagtgaaccggattactttctgggtcaaccgggttgaaccacggaccaattgattaaaatttatttaataaatttaatattaatagagattttatagtgtttataaatagaaaacaaaataatcatatcatgtttaatagaaaacaaaataatcatatcatgtttaataaaaaaatataaattcatattatgtttaataaaatataaaatcatttacacccaaatatatatatatatagaaaaaatcaagcaataataataaagtggttaaaaatttgaaatctaataaatgtctaacaccgtaacaaatatattagaaaatcatcaatgacagaaataaattaataaaacatcgtgaattaaaacaactaatctcggttgtctctctcaccattcgattcaattttaaggcggtattgtaaagtcttcaacaaaatctaaaacatcaaatgaatttaagaactgaaaaaacttctaaaaataattgaataaagtctaaaatcccatattttattgtaaaatcaagagaactttttaaaacccacacccgaccggttcaaccggttcaccgggtcacgggttaattgcgagtttttgtggtttttttcggttttgaacttgttgggttttagcactaaacccaaaccggaaaagtgttcgggtcacgggttaaccggtcggaccggacggttcgggtcgggcgtgaaaacactgcttttatgtaaaaaataaactttcattttcactaatgattttttttcctattaaatcaaaacccaagaattaatatatgaaaataattaggggacgcaaaaaaatttaaaagaataaggacaacgatgtaataaatgatttttataataaatgatgtttttatataaaagaggtagattaaatgagattttatgatttcgtttgtaaaaaccttaaactacaaccaatatgaaatagagggagtatgttttactcggtagataggttactattcagtacatcagattcatgtcgcattaattggattacaaagatgtttgttgcttttataaagggtagtcatatatcttccttttgtctatgactttataacatttcaaaattttaatcctgaataggccttcaataacgttggaccggctctaagaggacaaagggtagtcttatatcttcagtcttctacaagccaatggttgaagggttctcattgtcattgatgttcctccttgtttcacatttctttgtctcaggtacggtcacttccacataagtataatttttggtttagtcgctatttgatgaattctctttcttattttaaaattttgtttcaatggcaggagtaatgtcgacaaactttactatagagaacaaatgcgattacactgtctggccgggattcctaaccatgactactgcggtttcgctccccaccaacggcttctccctcaagaaaggggagtcacgtgtcatcaatgtgccaccgtcatggtcaggtcgtttgtggggtagatcgttctgctccaccagctcaacagggaatttctcatgtgccacgggagactgcggctcccggaaaaatcgagtgctccgattccggagcaaggcctcctacgacgctaattgattttacccttgacgctaccgacggtcaagacttctacgatgtaagcgtcgtggatggttacaaccttccgttggttgtggtcccacaacgtctagggagtggccggacatgtagca

SEQ ID NO: 35444 - DNA, 2031 bp, Arabidopsis thaliana landsberg
tttggacgctcaaatgtgataaaccaaaacagattaagagacaagaatgaaagaaaatgcagattgatttcatgaatcaccataagagatcctaagttgtcaacttcaaaaacttgaaagaaaaaagcaaaaaaacaagcctcaggtcaatttgtcattctgtttcttgggagttcttcacaggaaggtttctcaaactccgttacattccacgacagcttcagcagctcgtctcggcttgcttttcctccggcttccattttgtctaaacccaatagatgtcgatctcgtggaatcatcggtgtttggtttcgatcctaaaccattctcttcttcagtcagatcagtattgcttccattagacatcttcctctttctctccttcttcaaatctttacttgttactgaaccatcatcaatctcttcatcttcatcttctacttccattttctctaccatctctttatcatcttcttcttcttcctcttcgaaatcatctttcatcggcttctgtggtcttcctcttctcctgtaagctggaatcttttcttcatcaccgcttccacgatcttcccgagcagatgcattctgcttcttccctttccctctacctcttctcatagtgtctataaacctcaaaaaatactacacagcttataacctgcaagttacaaaaaaacacattgttacattataaaccagctcataagaacacaatcattatgtcattcctcgaactatatccagattaaaacaaagaatcaatcagttaacactactcatttcacatagcagatctaataagtataacaaagaaagtacaaacacaaaagcaagatcccttttatcatcttttaacatacacatttcaaaactaaacatcaacaagaacaacgaacaataaagtaatttgatataaatctcagtaaacttagctacaaaaaaacacagatttaacatgcatgaaatttccttgcgtgactctcaccccaacacacacctcttactgttttagcggtgctactcggaacagtcactgtcgtctttgttgataaaaatgctgctgacagctcaaaaaagcattcagggatattattgtttacttcgtctcataatggcctttttatcgtcgtctttattatatgggccgaaccaaaagcccatatttctgctcttatataaattgggaaaaatatatactgtaaaacactatcatatcgacatgttggcccgacttatcgaacaaatgacactgggctaaggcccattaataagagtcaaaacacaaaattgaagcatctcaaaatcggaagaacgacgaatcaaaaaatcagaaagaagaagcatcgtcgtctcttttcttctctccgagtagcttaagctttcgtcgtcgagctctttcccgcttctggcgatgttcatcctcagagttcattccgttgactccgagcgaccaatctccattgaagaagaagaatcaggtttcacctacgcatcgaaaagagctcagcctcctcttaaactcatacaaccatctctcaaactcaccgaccgcaaaggcttgatccatctctatcgcaactcttcacatagctctctccctaaccctagctcccgatccaccactctcttcatcgtcgctgttcccaattatctctcctctctcgattttatccgtttctgtgattcccgcatctcccaagtctccgatatcctcttcatcaggttcgttgaaactcccattcattgtctgttaggtgatcaaattcgagaaattcatttgtgttgtgattacttgatttgactagaatgattatgttgatttgatgattcttgtaaattatcaggaacgatggaatggaagatagatatagtgttcttatcacattttctgatcaatccgaagctgatggtttctacaacaacttgaatgggaaaaagttcgcaccatctgaggttataatatggaaacgagcttatcgtttattttgtatttgtgttcatttgattgcatgaaattgacttttcttt

SEQ ID NO: 35445 - DNA, 12536 bp, Arabidopsis thaliana landsberg
  unsure (1)..(12536): unsure at all n locations
atggaaaattactgtatctacccgttgagcttgagtacaaagctatgtgggcggtatatcttctgatttnnnnnnnnnnnnnnnnnnaggagaagcgattgatccaactcagtgacctcgatgagatccgtctagaaccttatgagagttctaaaatctacatggagagaaccaagcttttccatgacaagaagatcatcactaaggatttccaggttggtgatcaggtgttgctattcaactctcgcttgaaactctttccaggaaaacttaaatccagatggtctggccccttctgcatcactgaggtccgtccttatggagcagtcactctagctggtaagagtagagacttcacagtaaatggtcaaaggctcaagaaatacttagcagaccaaatccttccagaggtgacatcggttcatctccaggaacttcttaatgattaaaggagtaaaggagtcaagctaatgactttaaataagctcacttgggaggaagtcccatgactatctctgtaaataaatttttattttctcgttatttttgatttatcttggttatgtttgtggttctcaggaacaaaggaacaatgtggagatagagtaaaaattcaaaacttttactctacagaagacctggagatcgagtgtacagcacgttggagtacaaaattttgaaaatcttctgttgcacctggagaccttgcactcgagtacattggtatagtatgtgtgattttaaaaactcaaaattttgaaatcatatttatactcgaccaacagaagctacaaagacttacagaaatttcctacagtttatagtaggttttctgcaaaatattctcaatcaacagtgtgtggaccacgcgctgaggataagctggagagagaatctaaaattcaacctagaccactcattttgaagcgctactcgaccactccaaatacactcgaccttgctgttttcatttcaccgccgacactctaatctccctactccacaaatcgccgtccaaacagctactcgacctctgataattttactcgaccacctcgccgccgtcaccagctcattccctccgtcacccaaccaaaccacttcactcgattccttctgtatactcgaccaattgatccacatcaaccgtcgtctctttcataaaaaatcgctcgacctcgcttcccggtctcgtagaggcactcgactgacgccgtcctagccgacttcaaaaactcactcgacctcgtgaaagcactcgacccctgcaaaattctactcggcttcttgttcgtgaattcagtagagccttccaacttcagagaagctactcgaccactagctttcacgattcactctatctccacgattcactcggccggctgtagcattccaactcgacctgtgagaagatactcgattcaattcatctaagctcaggaacagctcaggttactcgagtacagaattgtactcgaccaattcaatctgtttcattgcctattgacaataattttggtttcattgctatctttgagactaacctattgacatttgagctttgagttctaaatccctacaggagaatcatgagcaattacagtggcagttcttctgttgatcctgactacaacatggaagagacagagtcgtcatcttcaaggccagaaagagaacagagagagtatgatagcttcagatgaaaagctgagatagctcgagggaagagagcaatgactgagaggtatgagcttataaatgaggatctagaagacgagtacatgcctgagcgtactcgcagagccaccagacttctgcacaaacctgatgtattgcctgctgaggattatatcaggctcttcaaactaaatgagttctgtagcacaaggtatccatgctcgaccacacttgcacaacttggattgttagagggtgtttagcacatgtaccagagttgtcatctagacactctgatggcttatccgtatgtagcatatgaagatgagataattcaattcctctccacgctgcaagtagagctctaccaaggtatgacctctgatgagttggattgtgaaggattgggattcttgtgattttctgtgtatggtcatgagtataggttatcaatcaagcgattggaaggattgtttggcttccccagtggaacgggatctaagcccaagtatgaaagagaagagnnnnnnnnnnnnnnnnnnnnnnnnnncagctctgtaccgttgaatgcttccaggtcaaagagcaatcagaaaagcagccctgtcatcaggtacttccagcattctatagccaatgtactctactcccgagagatcacagggactgttactaattctgatatggagatgatcgcaacggctctcaagggaactcttcaccaaactaagaatggtatgcccctccagggtgaaatcaatgacacacctctctctgtacttcttctaatccatctgtgtggatacaagagctgggctgttagcaataaccacaagagagcacgaggcgctctatgcataggtggtgttgtgacaccgattctgatcgcttgtggagtcccaatcacatctgatggacttgagctacgagcaatggatatcgagcatctacgtcactacgaattcctggagttcgcaatggttggcgacttgcaccggttcaggtttaagcactccacagacaagagagttagcatccttctccctatccctaaggttactcggataatagagggagataacattgatttttggcctgagattggaagcctctagtatgagaacgctccgccattggatgaggatgaccttgtagaagaagctgctgaggatggtatggatgaagacagagcagtggagttcgacactagcatgtatcactttggtgaatatgtgcctccagcaagggagagcaagagcttgagtgaagctcataggaacaacagtaaactgcagaagtggtgcaagaagcaggacaagctgctcgccaagtgtttcaagactatcaagcttctgacagataagctgagttgttcctcccccaccactgctattccacagggacagcctcctctggagatgccatcgaggagatttgatgagcttgagcacaggcctgagcttagcgagcagagagtatcacatgtcccggctaggcattcgtcgttcgagtcccgggagcacaagagaagaaggaaggctacactcactcgatctagcagcagatcacgcctcattcactcgagaaggtcactcgaccgcggtgctggccgcagtagaagaagagaggtcgagtatcctcagagcggtgctggccgccacagagctgatgaggtcgagtacccacctgctggagctgatacggaacaaggcggttcgtctatggcttgggagcaatcacaggcagccattgacgagcaactacgttcattcttcgactgaggtaagcgcctcacttcaccattgtattatatcatttgtcttgatttgtttcttcattttgtttctgtgattggatttgtcctgagtactctcttccaagtttattcgcacagtggactgtgtgatttaagtttgggggagggctcaggaagtgtgtgttgcattgtgtatatttttgagtctacattcatctaaggcatagaaaaaccaaaaaaaatttgaaaaatttcagaaaatgatttcacaaaaaaagagtgttcatgtagttgcattacatttaggatcgagtctagagtgtttcatttaggattattgcatatgcataggggatgatgatgagatagccttgtaagcattttgattcaccggataaactcagaagccctcgttgctagttgtctattgcgtagtcaatgattttgaaatgaaactgaaccatgcctagattgctctactagacctcactgtcatgatctgataccatccctatcaatttgaacctgcatctgatctttaattatcatgtctgcatcaaaatagaactcatggataccctaatatactcggattctattattcattttgatcactcttgttaatgcaagtagctgactcttcttattagagcagttaacccaaacccaaacctagactttctttcaagccctatatcactcgtgagtgtttgtgaggtcttattccgattaagcttggtagaaagtgttaggttcgtaacgacagagatagtgtctcatgtagttctagttcgcattcttcagactagatagaactaggtgggctcttatactttgggttgggatgtgtttaaaagaaaaaaaaaaggggttgattcattgataagaaaaggtaaaagactctaggtgaagtaagctaaagaagcagaaaaagtctagtaaagattttgggatttgtaaagaaaagaaagagttcttgttagctattgaagatgggcaaaagcccttggttttagaatgttaaaaacaggaatcttagttgttaaagaaaaccaaatccgctagatgtatcaaagtgttgagaaaccttctcctagagttaaaaaaaagaaaagaatgattagaaaaagggcttaaaagattcatgaatgcaaaaggtagagttaagctcttgtattgggattggagatgggattaccattagagcttcatttgatatactctgggtagatgggatcttatctctgtatgcatagcttgggacttacctttagcattctactaaagcttaatcattttttgagagatcccctgttactgaagcctattatgtaaggcaccatctttgtctcttgaccttttaccttagccaaatgagttcattgatgatgcattgcttgatttacgttccaaaactaatgaatgttaaagggattggtagatttgaaaacatgtgtaggtcgagcatatgagtcggattgattgatgatgaggcatggctaacgtttttaagtagaattcgatcttgcagcttataactttcaacttggacattgatttcatctggtttatctggtgctttggctctgagtccccgctttcaaacctcacctccagcttgttgttgattgtttgattgagggcaagcaaatactaagtttaggggagttgataagtgtgtattttgcatgttttgagcatccatttgtcatcactttagcatcatatcatcactgtttaataccatttctcatcatttgtcatcactttacatgtttaggatagatttgcatgcatgttgcatatttgcgttgatttcaggtgatttggagctgttgacgagctatctggaagaagcgggcctgatcatgtcaaaccactcgaccccgaggtcgagaaggagcttcaagatctcaaaagatcactcgaccccctggtcgagtagaggacatcactacttcaccacatcactcgaccccgaggtcgagtgtcttcatcccatcacctgacaatcactcgatcacattactcgatcacatcactcgaccccgaggccgagtgtctttacctttattgccagaccactactcgacctcatcactctacctggaagtcgagtatcaccatcaccaccactcgactgcatactcgatgacaagcttcagagctttcttcattctgcactcaaccagacactcgagcacaaggaagaaaagaagactccagctattcactcgacctcccactcgaccacatgggtcgagtacagttcttaatccatcccaatacttcgtcgttttaagtattagggtttcggaatatttggctataagtagcatgtacttcacattttcacagacaagtttttatctagttttattccgcataccttgtgttctagaccttttgtaatccggatttctctttatctattcagtattcagtattcagcttttgtttcttgattttcgtttactgctgttcattctgttatcatcttgctgttacactgttgttatcatgttttcaacttgttcaacgtttatgctttctgttatgatgtctgagtagtgaataggtttctgaggatgggttagagtagtgtagaattctcagtatgctaggtgattgagtattgattgatagatcccttctggattagttgttcttaatgcctattgctttctgatcaactggaatttgagcccagacatttccgcgcccaaaaggtgttcgatgaaatgtctgaaccactaattccagagattcgtgaccctgtaccaaggtattggttgcagggagcgttttggctttaacttgttgattcgtaatgcctgttaggttagctctcgtcaatggtgattgagtctaggactaggttagcttgagagtctctgttgcggtggcacttagatttggttaatgaacttgttgtctagggttaatttattgagcatgtcaatcacctgtaaactgaggaaacgaaactactcaattatcccatccttaggaattctttatctgattgattttattgtttactctactactgtttactgcatcctgtcatctgttgtttagtttctgcaaatctttactgttactcgacctgatactcgaccacccagttgtctggcaacaaactgtgcagtcgagtatccctgtttcattttctgtctgttactcgacctgtcactcgacctcacccagtgctctgcaaagagctgtgttggtcgagtgttttactatttctgtttgattttctgttttctgcatgttcacttaggactgctagaacacaccaaaacctgttattgcttggcttgactcagtgacttctgatcacatcttgattgttagcatcacacccatttggattgacaaccttcagtactacaatgacatgattgtgctttaggattaattgatcttaaaaacctattatcaatttggcgtcgttgccaattgggtgtttgtttgttacatttgagatttcaaacttgcttagatcaagttctttttcaattttcaatccggttgctaactgtgtgtttttcttgttgtcttcatgatccaggtacacctcagctgtatgcgaactcgatcaacaggcaatcagaacctccttttcaacgacaacatcgaccgaataactcgcgaactcagagaaagaagaacacaatcaaccttgtacctcagcaaccactcgatatggctgacgaacagaatcaacaaaatggccctgccaacattggtgttggagatgcaacacgggaccatcggcaaaggaaaggaattgctatccataacaacaacttcgagattaagagtggtctcatctcaatgattcaggggaacaaattccatggtctgccaatgaaggatccactcaaccaacttgatgaatttgataggctctgcaacctaacaaaaatcaatggtgtcagtgaagacgaattcaagctcgacatgggatgattgcaagaatctgccccatgactccatcaacttatgggatgattgtaagaaagcttttcttgccaagttcttctctaatgctcgcacagctagtttgaggaacgagatctcaagcttcacacagaaaaacaatgaaacttttttgaagcttgggagaggtttaaaagctacaccactcagtgcccccatcacggttttaagaaagcttcattattgagcacactctacagaggagctgtaccagagattaggatgctgctcgacactgcctcaaatgaaaacttcctaaacaaggatgtagtagaatgatgggagttagtcnaaaatctagcacaatctgatgggaatttcaatgaggactatgatcgcactaacagaggcagtagcgattctgaggataggcacaagaaggagatcaaagctcttaatgataagattgataaattgttgcttgctcaacagagaaatgtccactacattacagaagaagagcttacacaactccaagaaggggagaatcttactattgaggaggtgagctacctacagaatcaaggtggctacaacaagggattcagcaactacaaaccccctcaccctaatctctcttacagaagcaacaatgtggcaaacccacaagatcaagtctaccccccacagaaccaaccgcctcaagctaagccctttataccctataaccaaggctacaaccaaaagcagaactttggacctccaggcttcacccaacagccacagcaaacttcagcacaagactcagagatgaagactctacttcatcagcttttgcaaggacaggcctcatgctccatgaccatggacaagaaactagctgaactcaccaccaggatcgattgctcttataacgacctgaatttaaagatagatgcacttaacactagagtcaagaccatggagggacacattgcttctacttcagctcctaaacaccctggccaacttcctggaaaatctgttcaaaatccaaaggagtatgcccatgctatcaccacagtgcgtacttctgccactgaggacagtgggattcaagaaggggaggttttgagaccaaaatcaagacaggagattgaactcgacttctttgctcggcttgtcgaacgagcatatgacccgagcaacccaatccctattccacctacctatgaacctaaaccatactttccagaaaggattgcacaagttaatgcaaggatcttccagaaacacaagatgatgttcataaagtgtatcaaagagttagaagagaagatacctttcgttgatactcccaaggaagtaatcatggaaagatcccaagaagctcagcaaatagttgaattgagttttgagtgcagcgctatcattcaaaggaaggtgataccaaagaagctaagtgatccaggttccttcactctaccttgttcactaggacccttagtgttcaacaatagtctttgtgatttgggagcttcggttagtttgatgcctttgtctgttgcaaagagattgggatttgataagttcaagcctagcagcattcatcttattctagctgatagatcagtgagagtgcctcatggaatgctagaagacttaccggtaaagatcggatcggttgagattccaaccgactttgtggttctagagatggatgaggaaccgaaagaccctctcattcttgggagaccatttttagcaactgcgggcgctcttatcgatgtgcaaatgggtaagatcgacttgaaccttggtaagaatctccatatgagctttgatattgctaagaaaatgaagaagcccactatagaagggcagcttttctttattgaagaaggaaatttagatgctgagttgttgagtgggttggaaaatcctattccgtactccattccgactcgccacctaggagagcccgagaagcttcttatgatagaaggaggacctagcttaaaggttgagactaaggggaaccatttggatgttggtcctattgctagagagcttatggagctcaggaaacagtatggagctcaaggagagaccatggaaaagttggacctcaagatggaggagctgaactaagctatcctggagcttaaggagatgattaaaggttatccaggtcctgagatcgatgaatactttgaggaacccgatcttggagaagaggactatagtactgatgagaaagaggcttacttcgaggaaagatcaaatgagtactccacactccagctatcaagagaaaatgcggagtatgattcagactttgaggattcaacaagtgaggatgaggacttctcagttcctctcctcaatctcttctctacctaaacattgtgagagtcaagcttagtgactttaaacaagctcacttgggaggaagtcccatgtctatctttgtatatattgctttcttgttatttttgatgtttttgtttaagtgttttgatgtactactcggctacaggccgagtgtgggcttcaattgaccaaaggcccaagattgaatagtactcggcccacaccactcggcccaaggtcgagtatggacctcatcaggcccaacactgtactcgacacgcgcgtcgagtatgtcggccgagttcacacgtgtggagtcaacgcaattcaaatttgaatttgaatttgaatctactcggccccacacgtcaatcctggtccccaaaggccatcaaagctcattctgcaaatagttaaagcctgtccccttgactaaatgaagggtgaagatctagggtgtttgacgggctaggatcaaatcttcttgtctataaaccacactcaacaagctaagtcacttactctctcttttcactcaatcaattttgcattttgctacctctttctagacatttcaagactttactctctcttctctctagaaatcccagaaactgaaccataatttcttgctttctctccatataaaccttttcaaaacctctctcaaagcttttaatcagtttaaaaaacatcaaattctcttctactttcacctactttgggttattttgtggtgactatcttcagtacttcacttcaagaacatggatcctgaagaatcaagacgaagagcctctgctcgtgctgtggctagagggtttgctatgatcaacgagaaagatccggtttggaaccaggatgctgtgagtcctggttttactcggttgacaggccgagtacagtggccgaatatgaccccatagtcttctgtgggtcgttctactgctgctagagaagaaattgcaagaggaaagagggtttgggaggttgagccaactgcaatagaggaagaacatgtgctagagagggaagcatctgaggaagatgtagagattgctgaggaggtcttaccagttcctgcaaggagaagaaggaacaacccaagaaagaagaaggagcctaccattgaagaacactaccagtacctcatggagctgagttttgagggaacaagatctccccatagacctaccatgcaagctttggggatctgtagggacgttgaatacctcatggagatggccaagctggagacattcttctcctataagtgtgagggatacaaggaggagagctgcttgttcctagccaccttgaagctccatttctatgcagatgagagggagaaagagatacataaggggttggctatatcacattcatggtgtttgggattcactactccctccctattaggcagttggatgttgtattcaagttccccaccaagtatgggatccgccaaaacttcagcaaggacgagctccatgatctatggttgacaatcgccggtccactcccctacaagtcatctagggccaagagttcattgataaggagcccggtgcttaggtatctccacctttgtattgcaaatgccttctttccaaagaagacaaccggccatgttattgagggagagctgaagatgcttgatcttaccttatgcttcattttggggcaaacaaggaagaatatagtgatggaaggggatagggctgatacatccctttcggtggtgttgagagatcatttgannnnnnnnnnnnnnnnnnnnnnnnnnnnnnnnnnatccggttatggaggcaccttgtgtgctagaggagtgatcacacctattcttatagctgctggagtctctcttcatactctcaatgtcacagccaattacattgatatggagcatttgaggaaaaaaggcttcctggataggtcagctccagctgatcaatttcagttcaagtttaagcaccccaagctaggtctctctaggctagcacttccatgcaaggagtacaccacagttagaactgaaaacaacattgactttgatcctcctccatcaatcttagtcaatgtccatgtgcctttccacgacgagccaagcataaggagtgagtcacaagaagaagaagcggagttcaaccaagcggaagctgaacaggaagaacatactcgaccgagtacattacagcaggccgagtatggccaggccgagtacgacctgtccgaattcagtcgagccgagcagtttgatgagaaggaggattcgtgtgaaggtgcagcaaagtagtatttcttcgaagactatgctgagtccgatcaagaaagggatcccagccaagtgcacaagaagctaagaatgctaaatggtcttgggaagtttcagaggaagttgattagtgggttgaaaaagaaggtgagaaaaatgaagagggcgatgaacggtatggcggctcaaattcaagagctgcaaagaaggcagagatcaccaccacctccagctgagttcaggagaagcaactcgatgagtgtggcgccacaaaggaacgttcgtttccacccgtcaagagccttgtcttacgagcgtgggaggagctccaccttctcagatcgccgagccaacacacgcccacccggtccagtaaaccagttggttctgaatgccgacccgagccgcgaagagttatactcaggctacatgctcgaccggtcaaccgagtaaccccaccacttccgaccatgataaatgaatacacacaagaccgcctcgacgagttcgtccagaacctggtcattt

SEQ ID NO: 35446 - DNA, 477 bp, Arabidopsis thaliana landsberg
acaatctcgcatgggccctcaaatcttgtcttggatttgatgagagccataatgtaaggtgcataggctaaattctggtttttgtccattttcagatcattaagctgcctcatcatgaagagcacaatattcattacctgaccattcatgacatggtggattatgttccagaacttatctcgaattttgctcttgtccccactcttaggaagaatggtgactctggcaatcttgttgatgacagcaggatgatgtctgagtcctgctgtctctccaaacctcctgggtataccgagcctggctggctcataaaactgctcaaaatcctcaaaattatcttcagtataaagatccagcccagcagaaatggtgccatagtccagactgtttgcagcagcaaagtcagcaaaagaagtagaatagcgcttgaagccagtcatccaggtgatagattcttctgcaatgtcaatctccgag

SEQ ID NO: 35447 - DNA, 939 bp, Arabidopsis thaliana landsberg
gtaactgggtaacttgtcttgaccggtaaaaagtgagcaatcttcataagccgatcaattataacccagatagaatcatacccttttgtagtcctgggcaatcccacgataaagtccatacttatatcttcccatttccatgtcggtattggtagagactataatggaccgacaacttttaggtgtatggccttgacacgtatgcaggtgtcgcattgagccacatagcgtgatatttcaatcttcattttcgtccaccagtaatgttgctttaagtcttaatacatcttagtgtttccgggatgaatagaataaagagtaagatgtgcctcatccagaatttgctgacagagctattcgttatttggcacaattatgcggtttttaaaccatatcacaccttgatcgtcttccttgaaacacttggctactctagcctttatcttctctcgaatgtgcttcatacccagattatccttttgagcatcaattattctttgcaaaatgattgactcaagccttaactgatttagagtcccttgttgaatgatccccaggtttagcttttccatttcttgacacaaagtgttctcgaagatcttcgccataagacagtggcaggcaaccctacggcttagcgcatctgccaccacattggccttgcctgggtgataatggatctccagttcatagtctttaatgagctcaagccatcgtctttgcctcatatttaactctgactgggtgaagatgtacttcaaacttttatgatctgtatatatgtgacagatatttcccagcagatagtgacgccaaatctttagggcatgaaccacagcagctagctccagatcatgagtgggataatgctcctcatgtcggcacaactgccttgaagcatacgcaatcactcggccctcttgcatcagtacacagccg

SEQ ID NO: 35448 - DNA, 820 bp, Arabidopsis thaliana landsberg
taattctttaaaccatacccctgtggaactattcatctgagtcactgactacgcaaacccccacccgacttcttcttcttttcaaccaagctccctcccccatgaaacagtaaccgcggagaggaaaaagggtggtgcggcttaccggcggcgagggaggtccggtgaagggtggggttaggtccgggaggtcctagcggtgacgtcgaggtgcggctcgtcgacggtgttggccggaatcggtctgaccacgtgcgcaggaggtcaggctcgtcggcggcgtgcactccggcgtactcacggtggtattgctcaatcaagtggcacatgaagcttcacaggggtactaaggacgctataggtgcaaggaatcgacaaacggcttaccgtggagctcggtctacgtgcgacggtggtcgattgaagtccggcgacgtcaatctggcacctcagacgatgtggtgttcggtctgagggctcaggaagcttcatgggactccggggaggctagccgagggattggatggggtggaggagggctggagtggccggtctacggtggtcggggcttgggcggccgctggcacgccgtgcgcagagcgagctccggtgaacttgcgcttgggcggggctgagagcgagcgggggtgtacggtcaaggccatggttagctttataggcgtgggcgaggggtctagcgttgagcggtgcgacgcgagcggggccgagcaccggggcgtgcactggcattgccaaggcacgtcgaacacgtggccacccctttccccccaagttctagctcttgtgagcagacatcaaa

SEQ ID NO: 35449 - DNA, 714 bp, Arabidopsis thaliana landsberg
  unsure (1)..(714): unsure at all n locations
actctaataaggttgtcttatgatctatgctcgcctctcataatcttagaagaagatatagagcggttcatattttgttctctctcgcctattaggtttaatgggtactggtgtttcttaaatagcgtatgcctcaagataatatattagggtttcatagataataaacctaatcaccaaaacatttggcataaatgggctaaaagcccaaaatttcataaaactaccttaaaacatctttataggaaagaaagcgtttcagggagtaagcaaatataagcatatggcagcgtcaaggactcaagggatccaatcaaaactacaaagagcaaataaataatcaaaacaaaaactgaaataaactaaattctcatacttgtnnnnnnnnnnnnnnnnnnnccgtcgaagcatgcactcccttgctctgccatgaagaaaacatttttccgatcaattctagggcaccgagaaaagccctcaattttcataagaactaaaatcgaaaagtaatttaagttaaattgttcttgttggtaagcgattccgggactggacccaaatatctggcataaatgggcttaaaagcccaagccagaataaaccaacttgaaaatatcatatcacagcattaaaacgcagcgtgtgaggagctaaacacctaaattttcacgaaaattgcatttttgcctaaaaccctactaatggcactttctt

SEQ ID NO: 35450 - DNA, 1683 bp, Arabidopsis thaliana landsberg
  unsure (1)..(1683): unsure at all n locations
ttctgtttggctatcattgtttcaggatgattacatggttttactttgtctcaaaagttccttcattgttctgtggttgactgtctattatggtgcatgtaaaagtaaagttttcttaggtattctagtctgtctgagttttttccctagtttcctgtaagcatctttttgacatgggcatcatgtattgctgaattgatggttttctacaatgttacttacttcagctgtatctttttgcagcctcctgctctcaagatgggtacaatgatnnnnnnnnnnnnnnnnnnnnnnnnnnnnnnnttaggaattatatattatatccgcttcacatggtaagactgcaaagtccttgatgtttgacaaaagactgcaannnnnnnnnnnnnnnnnnnnnnnnnntcaatattcaggattgttggcatggctggtatcggacaaggcctagtattggtatttctttgtggcttatgtacattcttgacgacaatatctttgagtgctattgcaacaaatggtgcaatgaaggtaattcttttttctgttatatcacctaaattttctttgaataaaactatgtaaccataattaaagatattcctccctctcttgggtctctgcctctctggtccataattgacaccccttattacttttctatttcttttgtgattgaacggtatttaagacatcaagtttattaataacttttgggttatctcagggtggaggaccatattacctcattggtcgcgctcttggtccggaagttgggattagcataggtttatgcttttttcttggcaatgcagttgctggagctctgtaagtgtaaatcctgtcaatgaatctacctaggaaatagtcttaagcttgacacgcattgcttgatgttgctggtgctctgttcagtttcacatggtcgccaagtgcttctatttactactttttctgctttcctccttatcattgtaggtatgttttgggtgctgtggagacttttctaaaagcattccctgctgctgggatttttagaggtattagttactgtggaacttgtaagaattgaaacctaaccattgaactaaagcaaagggcgactaggacttctgacaagagtaatttgactgttttttattttctctattactcttatctaagccaccactttatcatgctagttttgacacctgagatttgtttcattagttttttggaagtggcaaaatgtatatgcaacctgagttttttttcatcagtttgtaggataaacaccaaacaaaagactatattattgattaccaactactcaattttatttgacaaaaaagtttacttgttttccctgaggacataacctatatagcccacaagtcgcattcagtcatttagctgtgtttcatttttaattgcagaaactatcacaaaggttaacggaannnnnnnnnnnnnnnnnatacaaagcccgaactcacatgacttgcaggtttatggaattgttgtgacgatccttctttgcttcattgtgtttggtggcgtgaagatgatcaatcgggttgcacctgctttcctcgtacccgttttgctctctatcttctgcatattcatcgggatatttttggcaaagacagatgatcctgacagtaagttgtttctttatattgttggaaacaggcgtggcgt

SEQ ID NO: 35451 - DNA, 5498 bp, Arabidopsis thaliana landsberg
  unsure (1)..(5498): unsure at all n locations
atagtcaaagaggatatcaaagctgttgatcttctcagcctgattttgaatgcaagcttcagcggcagccagcttcgcagaaagtataaccggatcatcactaggaagtgttggaccactatgagctgaggatgcttcaaactgcagagatccaagaccataaatccttcctttctttctcggagcaacctgcaaaggtcacaaaaactcacaaggacacaacagaaaacaagtgagaaaacaagttcaacacaagacaaaagaattcaaacacaataagctgtcaagatttcagacaacacaataagttgtcaataagatttcagacaacacaataagttgtcaataagatttcagacaacacaataagatttcagacacaactagacaacgctaacagtgattattaagtagacaacacaaccacacttgcaatagaaagcaattcaaacacaacactacacaaagtataatgaataagctgtcaagatttcagacaacacaataagctgtcaataagatttcagacaacacaatcagatttcagacaacacaatcagatttcagacacaactagacaacgctaacagtgattatcaagtagacaacgctaacagtgattatcaagtagacaacagaaagagcacataaaatttacctcagtaaatatcttgtttttgacatgaacagaaagtccacctgatccagtgctctccggattgtcccctgaactcatatgagactcttcctcttcaatcctagatgttacttgcttgtagatctcctctgacttcccatcgatgaagcttccatccgcttttctgtgtgtctcatctagcagctcaaggaaatcaggagttttttctccagtcttctcacactgaaacacaaagagataaacaagatgtcagtatgtaattctagattaagtaatggtaaggagagaagaatacttatcttactcgttttcttgcacgagctttgtatgaggtctggcctgaacggtgtttatagatgcctttgccatccggatcatgatacctagcatttctgctgttgttactcttttttttctgactttggatcttgccaaaacagtacaagacctttccacacatcaggatcaatccattttggcttggcttcatcacccttctccttccaatttcccttccaccttgacacttgatcagtcatcctagactttagctttgcttcaaactcaacccttactcttttgttaattgaacggtcccagttatatacttgctacaaaagagaagctaacatcagaaatgaaaccatacacaaaacaagcataaacatcaaaagagcacagaacttaccgcaaatgtttcataccatcgatcgattgtagcctttgatgtttgtgaccaattggcatgaggttctttgaaatctctttcaaagatgctgcggactgttgctgcaactgcagcatcatcgtcaaacctacaagaagaccaaccagcccacacataaggatttctatgtctttaaacttctaagacatcacaatgctaagtacaaccaacctaaatccagagacttctaaggcaggaccaaacttctaaggcagaaccaaccaaaatccagagacttctaaggcagaaccaaccaacttaccaaacttctaaggcagaactaaccaacttacaagacctaattccagagactataagcttaaccttaccatagagttcccggaggacgctttgggtctagccttgtcaagccagcacgaccannnnnnnnnnnnnnnnnnnnnnnnnnnnnnnnnnnnagacggtcagcttgaacatcagaatgattgacagaaggctgagtcattggcgttgaaggcgatggtggaacggttgaacctgaacctgaacctgaaccttgaacccctgagatattcccaccactaagcggagaattgacatgcaacgggtcacgttattgtctaaaccggacataagtattatctgacggcatcttgcacaaaaaacaaatcaagtgttagaactgggaaaaaagaagtaagatcggatcgaagaagaataggtcagatttgagagaagaacttagatcggagaaacagaggttacctttgaggcaaaatagatcgagtcagagaagaagagccgcggcggttctggagcacagatcgaagaagaagagaggcggcgaagagagtttgcgccgtaattagatcggagaagaagagaggcggcgatgagtataacagattagagaagaagaagaagagttagatctgggaaaaagagtaagatcggagaagaagaataagtcggatttgagagaagaacttagattggagaaacataaattacctttgaggcaaaaccgatcgagtcggagaagaggagacgcggcggttctggagcacagatcgaagaagaagagaggcggcgaagagactctgcgccgtaattagatcggagaagaagagaggcggcgatgagtataacagattagagaagaagaagaagagaggcggcgacagaatcggatcggagaagaagagatccggcgccgaagagatcagagaagaagaagagaatcgaagaaaaattttagggttagggtttgatgcggctggtttgagtccgctcaaactaggtcttcgagtatatataggaatttatttcctcgcaaaaccctcgcatagtttgctttgaaattgcgaggaagatttttaaaccaattaaaacgcaccacatattgcgagggaattgccagaactcctagcaagtccctcgcaatttatgattttttataatttagggtttagggtaaaatttgcgagggaagtgcggttgggcctagcaattccctcgcaattcttcaaccaattaactcaccattttgattcagtgtttgaatcagatctgatttagattctcctatttcgaataagactctcagcaaataaaaacatgagtaaatattttaaataatttaaggtttatagtaaatatttgcgagggaactgctacgacagacttgcaaatctctcgcaaatacctcgcaatgttgagtcaatttgaaaaaatacaagaaaacactaattaaaattattcggattagttattctgaatcattaggaagttaaatatctacattagaatctaatttcatctcaaaaacttcaaatgtgcatttttcccaaatacatcaatgatgaacttatgtgttttcaataatatgatgaaagagtgtttaacatcttcattatgaaatgttgatattgaaacatatacaatatgtttttgtgcatcaccatataatcaacttgtatgattatacagtcatttagatttacatttataaataaaaatcaaagatcccaaatcacttctatgtattttagggtttagggtaaagatttgcgagatttttgcgagtggtttgcgagggttgatattgttcattgcaaagtactcgtactttcctcgcaaatttgcgaggaagcagtctctcgcaatatttgcgagggatttgcaacgtgcgtccgtggtcttgcaaaatacctgcaattccctcgcaaatttgttcctcccccccgactgttttcttgtagtgttaaatgcctaggctcatgtatgatagttcaaataacaagtacctatgggggtctttcctattatctaatattaagttctagttagctactctagaactagcattaagaacaatcaagatgaagaatcctacagataacctatcaagggggcaatctactaaatcatctataaccctaataagaaaaccctaaaccaaacaagaagactactcgagcatgatgaatgaagcaaacaacatgattgaataagaaataaatgaataaaagaaaaggagaagagttaagaagaatcttctctaaagggagtctccatagggttttgctcccaaagtacaaaagagaaaaggagattagtctctccaagcttatggtctaaacaatgacctaaaaactgaatatatatgtcttaaaaatgtgttgggccttcattaaacatatgagaaagttctgggccgaattttgaatacttgaaaacatcaataagttgcatctcgaaattgccgtcaggtattggtgtcgttcgacacctatgtgcattttcgtctccggatttcttcagcaacttaagttgtcttttaatctccagaatattccataatctccaaatgcatcccaaacatgtaaagacctggaaaggactagaaaagactccagaaagaacaattagactctaaaacctatacctaaaacatagttaaaacggtaaaaatcgggatatatcaactcccccagacttagcttttgcttgccctcaagcaaaacacaaagaaactcccaacattctctagcttattgccatgatcatccaaactaagtccatatgcctaacaagtctaatcaaatcctaaccaacatgtacttctctgcaagcttacacaacattctagattccatacctaagttccacaactatatccaccaggctttcatcgctgggtctcatcaaacaggctaacattcaagatccttctagactcattcccgtactataccatgataaatcgaccattgtttatatatttgttttctctttttcggtgttctttctctcccccagactttttctttttagagagtaaacaaaggggaactcgcatactggatcgacaccctcagcatttttccaacctttgtaattgatcattccaaataatgtataataatggggtcataggaaacattcctacccctatacactatctgaaaatcttctcaatctctcattatattttttgttttataaggagagaggagcacattctttttatcatattggtctcaatatcaggtatgaacaaggagtcaagatctatgaatactaaccgtttgaagaggtaaaaagaagagtagtgagattagctccagccttagtggttgagttggaaactaggatatccttaagtctgttggtttgccatctagattttccaatagttggattgactcaaacctgcagcactcatcaatcaggcaataatcaagagaaatatagatcatgatttctaactaaactaaagaaaacgttttttttttttttttttttgttaaaaaaggaaaatgactcaataaactcaaaaacgaaaaaatgataagaaccaaaaatcaaagcataattagtaagaacctcctccagacttaaacgacactgtccccagtggcaatcaaatctagagaaagcgagaaaaataaatcaaaaataaaagaaaataaaagagagggaaaataaaaatcaaacctgtgggttgcctcccactaagcgcttgttttgagtcaatagcttgacttggcgggattcagggtgtgggtggagcgatggaggattgatgttgcctcctcgccttcgaaggcggagtgaaaacggatctggttagagcagctgtaggtgttg

SEQ ID NO: 35452 - DNA, 2365 bp, Arabidopsis thaliana landsberg
ctcgtgatcaaagtgagacttcaagtaacaattttgggtcacttacccctttcgttcatgtgtctccatccgactctctcccatgctcaaaaaagtatgtcatgatatttttcatttggatcaatttgacatttgatttttttttttgtaaactgtactatctgacataccagatttatataaattattgtaaataggttagataatgttctttgtcacatgaaacttacatagccataatttttcttaaactgattttagatacaaatcttttagagtttttttttgttataatgtatcttctactagtcactacaagcggctttgataatggcttcaaaatgccgcttctcatggataatataatgtccaccatcagggacctcatggagctttatccatggcagtttatcgcatatatagtgtaaaacatcgcgtgaaatttgtttgtcttcgagtgcacaccacatatgaaccgaccctttgttactatccgaaaacggattcttcaattcggttggatcaaattcccaattcccgtaacccgctatgatgtcttgttgtgtggtcacatatccaccttgtcgtaaagcagactcctatagtaataatagcattcatgcatgaatgtttacttctttcaaaaaaaaaaaaaaagagagtggatcataaaagttcgaatatatataccttgatataagagtgtttggtatgcttttccgcgagttctaggtcgcgctcggtcatagtatctttgggatttcgactattcgggaaccatttctgagtcatccaccaatataacaaccatggagagtagtgtgcgactcgaagtgtcaattgaaatccaattggcaatttcttcatcgctgcattcaataagttttgaggcacacggctccaccaaaaattcactaacggaacaaccaacgaagctccactaagcctatcgatgttataagaaaaacaattaaggctaatatacaaaccactacattataatcttatttgtataagtgaaatatctaagtcggtcacttggtcttatagtataacgtcacttatggacttatggtaattaaacgatgaggatgaaacaagagaattcttatcacaaatggataaagcaaatgtcttttacgtaagaacttgttttgataagtattgagaagtgaccatcacaaataatatttcaattttttgataatgttcttaagagataaccgattgatatatttacctattaggaatgtatttgaggcaaccgtaaacagggtaagctccaagtgacatgcctataacgtggaactttggaccgacttgcaatttgtcagcaagttcttcgatatcgtatgtatctgttttcagcgttcgtgttggattaggatcgctttctccataaccagctctatcgaagaacaaaaagtatatcttgaattcatcaatcatttcctgaaagccagaggagcgttatcattgcaaatagtattattcattatacataacaatcattaattgtaaaaataaaccaccaaaaaagtattaaaatagttgcggtctctttctttatttaatttcgttcttaattcaatccttgtgtacctgtgtgatgtataaatcgacgtctttggagtttccatttccgtggacgattattattttgtttttggctttgtctttcggaaaccctaattccttatacgctaaatgtctcccatcattgagcttgattcttggagatatctcggaaacattttccggcagtggaatcggtggcggcggtgttatggacttgtagacataatagcttataaatcccacaatcacaagtagaagcaccattatttagcctataagtcttggaaccaaaagactagaattgatttaaagaaaatgaaagaagaagaaactcaggaactaatatatgtttaacaattattatagagaaaaatgcgctgatgtaatggtatctttggtccaagcaacttaataatgtagtactattatttttgttggcaagtaaagcatgaccacttttgtttacaaatgtctttttttccttctctctttgttacacatgtcttgataacttatcttgcattactattattgaattggttgtccttttgcatttactatcaattgtgtaactccctttaattatttatattgcatattgaatattttttggatttattagacattttcatttttagaatctgtaagagaaagaaaaacaaacttatcttcatagattttaagaaactgctttgtaactttgatccaagtgtcgtggcacggtggtagcagtttcaaagcaaaagaatatagactttattgcacggtgacccacatttgtcaacca

SEQ ID NO: 35453 - DNA, 3708 bp, Arabidopsis thaliana landsberg
acgtcgttgttgagcgtttcggtgacggagaaatgcttgaagcttctggagattttagcatctacaaaggaagggagatcggaaatttgcggcggagatggcgagtgtttgaagacggtggtcaagaagctgatgaaagtgtcaacggcggcgacggagcacgccgtgacggtgctgtggagtgtttcttatctattcaaagaagataaagctttggaagctgttacaagtgttaacggagttacgaagatactgttacttttacagagtaattgctcgcttaccgttaggcatatgctaacggatcttcttaaggtgttcaaggtgaactcaagatcttgcctttcggtatacgaaaccaaaacgacacatattatgccgttttgattatcccccctccgtattaacttctttagggattattacttgttggtaaaaaaaattcaagttgtaaggaaagagattttttggaaggtgaatggaattgttatcacggccaatgccattagaactttgagaataaattgcaatgttctttagtactagtatcattgcaatgttgatactctaaaccagaattttatgtttggacttggcaaaatcgtattaaaagtaaagctatcaatatgctctatcaagggagatgttgtctttgtatctaaaacaaactgaatcttgattgattgagcagtcaaaaacaaaattggatttaaaagattacaagaagtggatttggcatttggaggaacgttaggataaggaaggaggtctttggtgagttgcaatttcttgtcaacatcaaccttagtaccaatttccactttcattacttgaagaaattcactttccgacagaacagcctcacttgttcgacttctctaagattccctctacacccgtataactccaacaccttcaacgtatttccatcaatgctatacccacaagtacttacacactgaaaaccctgaaacaacggatagaaaagaaaagaacacacagtaagtgaaactccgagattaaatttataattgagaaagagaaaaagagatcatattatacatacaaaccttgaggatcaaagtttctagattgggagagctttttatcagagtccaaagaactttccaaccttttttcgtcttagactcaaacgatagtttaacaaggtttttaaacaagggaaattcattactacgccaataatcgaagcaatgacgcatcatctacaacacacaagcaaactggtcatgaatgaaacacaaacaaattggtcaagcatgaatgtaacaagatacatggagaagagagagacatcatactttaacggtagtagaagcaaggtcaagaatgtttttcatattcctcatattcatagggacaaaactcataaggcatagaaagatcgatgcgggcttctcgaagggaatccattgtgatggaccagtaatagtcttatttctttgatttttttggaatactatgacttaaacagtattagtataagcaaaacttacatggcgagcatatatgaatatcttgaagcatccaccgatgcaagacttaagttttcatccttgtgaagaagtgcaacaaccttaataaaggacttagccacaaaattacctagcatacaccccggttcagaaaatatgataagaaagttttgctctcatcgtcaagaatatatcaaacaaccatttcacttgttccaattatgtatattattctttatagtctataccataactatttcattaacgctaacaccgcaatttcttattaattaaaaaccttgaaaaaaatagagaaaactattcatatataaaattataagataaaaatttacaattgaaagatattatatatgtatataaaattatgaaaatcaatatggcgaaaaattcttaaatcggaaacagaaaattatgttaaaccataagacataatttattaaattttgtattttatagattcagatttatgtaatattacattgttggtcaaaccagaacactttggtttagcttgtcaaataaagaacttgagcctccaatgaggcggaccgactgttgggcttggcgttggggtggctcagttgacgaaattgacgtttactgtgtttgtattgagcccaccaacatatattttttttcaattgaaagatatctatttttgtaattacgtttgtatagtatagttaatactgtattaatttttatatcaatccctagtaaattaaataagtaaaatttagttaagaaatttagtaacaattaaaaggctttaatggttgtaaatttattagtatcacttacaatgtttaaaccttttaagacataccagtaattttgaatttgtcaaaggtcaaaaaaacaaaagagccgataaagaagagtctcaaaggaagaatcccaaattacactccaggtgatgcgcacatcagttttcgtgcgcacacgcggcggtgcacattagccccaaccaatcaaaatcatatatcccgttctccggcgactcttcgtcgtgagcttccgtcatggccacatggaacgcatcctcccctgcggcgtctccttgctcatcgaggcgacgaacgaaagctccagcgagacgcccttcctccgaatctccaccaccgaggaagatgaaatcaatggctgagataatggcgaaatctgtccctgtggttgaacaagaagaagaagaagacgaagacagctacagtaacgtcacctgcgagaaatgtggttctggagaaggagacgatgagcttcttctctgtgacaaatgcgatagaggctttcacatgaaatgccttagacccattgttgttcgtgtccccattggaacttggctttgtgtcgattgttccgaccaacgacctgtaagaagtatggattttttgtttcttcgcttttaaatttcctaattttcttgtgttctttgtttaataaaaaaatggatttttctcttgtccggtgaaatgtttagggttatctcagaagaagattttacatttctttcggattgagaagcatactcatcaaacagacaaattggaattgagtcaaggtgcgatttttgtttttggatttcatgatatgatcataaagttcttgagttgatgaatctgacgagatgtttcacttgattaaatagttagatgaatatgaaatagcttaactttggcctattatatgcttgaaattttgttgcaccttatgtagggttaataagcattgatgagaacttatacatatcatatacatagatcatagatgcttcaggattaaactaataacaagtgtttgagattgagatttctttgttttgaagaagaaactagaaagcggagacgatcttgctctttgacagtgaagaaaagaaggagaaaactcttacctttggttccatcagaagatcctgatcagaggcttgcacaaatgggaacacttgcttctgcattaacggcattgggtatcaaatacagcgatggtttaaattatgttcccggaatggctcctcggtctgcaaatcaatccaagttagagaaaggtgggatgcaggtaataaacaaaaacaatctttcagccatttatccataactctcttattttaagttacttccttgattgtttatctcggtttttacttttcgcaggtgctatgcaaagaagatttagagacattggaacaatgtcaatc

SEQ ID NO: 35454 - DNA, 1013 bp, Arabidopsis thaliana landsberg
ttgggcttggtacttgttgagggtttgcggggcaaagacgtggtctccgtcgataaggtctttggacattggttcgtctacatcggggatgactgatctgcttgttcagggtgacccatgttttatttcctgtggggtcatggcctccgatccatatagtagacgaaaggggtgaatccagttgaccggcattcattcatgtttagtgcccagactacttcagatagctggtcggcccatttacccttcctgtcgtcgagcagccttttcttgatagtgatgaaaatccttgccgttggcgcgctcgacgacgccgttagattgggggtggtataccgaggcaaaggcgagcttggtgccgatggagaagcagaagtccctgaagtcctggctgtcaaactgtttgccattgtcgactgtgagctcagacgggactcctaatctgcaaataatgttttaccagaaaaatttctgggcagtctttgacgttatcgtggatactgctctggctttagatccacttggtaaaatattctgacggcgacgaaggtgaactttaggttcccttgagccgtagtacgtggtccgacgatgtccagcccccaacactgaagtggccagatgtgggcgatgacttggtgaattgcgaaggggcgcctgagtgaggagagaattttttggcatgcttcacatgtcctggtgactcggttggctgtcatattatcgtgggccagtaaaatccttgacgaatcaccttggctgcgaggaccctgggccctgagtgtgactcgtaggttccgccgtggactttgcgaaggatctctaggccttcggtttcggttatgcatttcagcataggctggctgattccctttttgtaaagctgacccttgactattgtgaaatcactgctcctgtgtttcagtcgattggcctcgttgcgatcggttggatggtaatggccctggaggtatagtgttattggggccaccagtcttcagccattatgaggt

SEQ ID NO: 35455 - DNA, 2824 bp, Arabidopsis thaliana landsberg
gaattggtcttgaccaccgaccaatccaaaggttcggttctacgcatatctttacttcgcggaactcgaaacactagagaagaatgagactagaaagatcaagattttgtggaatggttcccctgtttctgaaacttctttcgaaccttcttcaaaatattcaacgacgttttctaatccaagagctttcactggtaaagatcactggatttctattcagaagactgtagattcaacgcttccaccgattctcaatgctatagagatttttaccgcacaatctctagatgaattttccaccacaattgaagacagtgagtttccactttcaatctctatttagatagaatgagatttctactgaaactcacatagtcacattttctcttggtaatgcagttcatgctatagaaagcataaaagcaacttataaagtgaacaaggtttggagtggtgatccttgctccccaagattattcccttgggaaggtgttggatgcagcgacaacaataataatcatcaaatcaagtccctgaatcttagctcaagcggattactaggaccaatagtctttgcatttagaaatctctctcttcttgagtcattgtaagtatacgtatacaattgacactttcaccactttttatgcacatgaactatcagagagttatgcattgtttttctcagggatttatccaacaatgacctgcaacaaaatgtgcctgagtttttggctgatctaaaacatttgaaagtcctgtaagtaagcacaaacatacacagtatcgttcaatctaaataatgaaattacttactgacacatttacttgtgttgtaaggaatttgaaaggaaataatttaactggatttatcccaaaatcccttatgaaatagttaagggcgagtttacttacgctcaggtaacagtttctagcattattcagatagttattcaacacaagcactctctctgaatcttgtgatttcctctgttttgcagtgcggatgagcaaaacctttgtaactcatgtcaagacaagaagaagaagaagagcatggtcgtgccaatagctgtagcagcatcagtgatcgttctcgttgtcgtcttggttatcatatggatcatactaaggcaaagaaaaaaaggttagatggctggaatatttacttcaggattaatgaattgaagttgttttatgctgagaaaaacgagtgttttgatttcaggagcctattcaggaccactcctgccttcagggaagagaaggttcacatataatgaggtctctagcataacaaacaacttcaataaagtgattggtaaaggagggtttggtattgtgtaccttggttcccttgaagatgggactaaaattgctgtaaagatgataaacgattcttcattggcaaaacctaaaggaacttcatcatcatcatcatcccgggcttctaaccaattccaagtcgaggtaatctaaagaacaccaaaaacatgatcagatattttagaaattaaaatggtcaagtactgtaaaatgtttgcaggcagagcttcttttgacagtgcatcaccgcaacttagcttcgtttgttggatactgcgatgatgatcgtagtatggctctcatctatgagtacatggccaacggcaacttgcaggcttatctttcaagtcatcttattatatatctctatatctctgttaccaattgttgcttttgcttcctatgagctcacgggtattatgtttatggacatgcaggtgagaatgcagaggatcttagctgggaaaagagactccatatagccatagattctgcacaaggttggtcccggttttggcaaccttgattcctcagggcttaaccaagaaaccaaacctggtttagcctagttctgtattgtgaaacctggttttatttccccctttgcaggtttggagtatttgcacgatggatgcagaccagcaatagtacatagagacgttaaaacagcaaacattctaataaacgataacttggaagccaagattgctgatttcggcctttctaaggtcttccctgaagacgatctcagccacgtcgtgactaccgtcatgggcactcccggctacgttgatcctgagtaagttccttttcacaatcaatacagatcacatgttctggctggtagcttcacaaaccagagcggtttagtgagactagggttagggttggccaattcagttcggaccctttttaagtttatcaggaatacatggtaaccaatttgcgacgtgtggtgacagatactacagaacatttgtgctgaacgagaagagcgacgtgtacagttttggggtcgttcttcttgaactcatcactggccagcgagccatcatcaaaacagaagaaggagacaatatcagcgttattcactacgtttggccgttctttgaggctagagaactagacggcgtcgtggacccgctgcttcggggagacttctcgcaggactcagcttggaagtttgtggatgtggcaatgtcttgcgtcagagataaaggatcgaatagaccaacgatgaaccagatcgtagcggagctgaaacagtgcctagctgctgagctggaccgtgagccacagagccagtgaaagtcaaagagattacggagaagtaggacgaagccaaatggattaaaagaggtttggataatttctatataggttatttgtgttgtatggtcagattcatattatgattgactacaatttctaaaaggtttctactcaaattcttttgtataaaattcgatcgttgtcgattccgttaaaatcctacttg

SEQ ID NO: 35456 - DNA, 1924 bp, Arabidopsis thaliana landsberg
gggttaggtcttcgctccttgtatttggtatgtttttttgtcctctctaatctttggctctggagtcgaatagcacttgtttcattcttaaccgtaactggtttttttgtaaaggttctgtatctcaactcttatatatatcctttcagtgagaaaaaaaaaaaaaagtataattaatatagatggaaagttggaatgatacttttgaagtgtttaactgaaaaaggaagctaggtgcctgcgcttactgacaaatcagtctccgtttcttgtggcccacgtattgttccacattattattttattttgtgataaacacattattgcatttcattatttcaattgagtaatatttttacacatcagaaaacaatattaaatacatagcgtgaattctttgaactgttttgggcagtggtccaatttacttcaatcagaaaacgaaacgataaagctttctcattatctttataatcatcatatggtacataatttagtttttgttttaaatgtattggttgttttacaagggaagattaatgaattagtacgttgtatgtatctttcgaacctcttaaaagttaaaccttaataagttttggcaaagaccattttaagttttttaaaaagggtatgtaacccttctgttttttgtttacaatttacacatgtacataaccaattttgaacataaaatatgttataatatgttcaaacaaatcactacactatatgcatgttttggaaaaaaacttgcgaatcttatttgcctaattattggccattcgggtgctatgtacacccattttctcatttcgtgatccatttttaaatcaaaattaggagattatgcatgtgttcattcttacattaaaattattattccttggtgtttgttcattcttactgttggtattaactatatgagtttataattgcttgtttcagtgaaatatttgacaaaaacgaaagttttagtatctataaataaaaaaacgacgttgattgattaggaagtttgggtttcttaaataagaaatttttgttttggatttgatggatattttctccctcattattggtatataaatatactataatgttgaaattttttattgtaccaaattactaacaacgttatgttgataataaacggcatgagtgatccgttttgtaaagtaactaaataagattctttacgtgctcaacaatgacaacatcacggggttttgtttctaacataccccatctctttccaagcttttaaactcatatattctaaagatacattgtatttaaagagactatcataatacttaaatcatggaaataatggaatgatggaagaattataaccagtggcatcatgttcgagaatatgaaagtccataaaacaaaacatcttataagaaggttgcgattttggaagtatccataagtcaaagcagagcaaccataatcagttaagcaattggtcaaattatgctaacctataccactatctcaggcttttggttccaatccttttctttttggatatacataaaccataaaaaaattgaaaacgtcagtgactataatcgttttttttttctcagacactaaagacagaaatttaaaacagttaattgtgttcacattttaagccataaacagtcacagaatcgtaataatgataatgtgaaaacggttgcaaccgcgtaaaggattatgaagaaaccgtacttacccaatatcacaccattctttaatcaaatttgaatgacatgctttaagcgacttctatcagaatttcaaagacttttacaaactcagtacttttttggtaatactattttcatattttaaaataaagaagtaaccgacacaaatagttgcgcaagtgacaaaagagttttgggcattgaaagtgtgttgtgttata

SEQ ID NO: 35457 - DNA, 1834 bp, Arabidopsis thaliana landsberg
cctctcttatcaagattgcaatgctcagctgaaacctcggagattcataagactcaatgctacctataccgtacatcaccatctgcaactgtgtttcagaccctaacacgaggcgaatctgattcgaaacctcaggagacttaagctgctccaagaatgttgtgtaaaaactcgagctttcgattttcttcagagagatttccatcttctgctttagtcttgcttgtctctgtggatcaatttcaagatcatctgatttccatggttgctcttcttcttctgcttgacctttaggtttcggttttcttcttcttccttgtcttcctttactaggtaagactactttccactcaccatcactgcttgagtttttaacagtcgtttccattgaagcttccacaagaaactggttttcctgatctacttactccacagtcccccaaaattagggtttctactcaatgcaatgattccattggttccgattacctaaacatcacaataaatttcgattcctaaacctaattatcaatctctttgcttaactctgatctatctactttgagattgacaaaaatcttcgataccgagcaaaattaaacttacgattagagacgaaaacacaggaggaagatcgaagaagcttgcttgaaatacagaggaagcaaagaacgcttcgaatatgtggtgaccgagtggactcagtgagacatttgtgagtttggtgcgccgagtcgcgcggcgataaagtgaatcagatgatttgtacgcgaagatttggtaaacaggtattgggctagaggaaatggaatgggtctagatacggcccaataaaggcgcgagatagagacaactgaagtcttgtttcctgttatttcttttgattttgttttactaatctaaatatactaaatcagcagtcacttttctaataactgatgcatttagtgattgacacatcagcttagtactatttttttattttttcattttcacgcaagatttttatgtgtcgtttttatttaactttgtttctttataaaacgactgtctttttcatccccacgatctccacatctccactttctctcttccaaaaactccatgactactgtgtaaaatctcaaagatgggtttctcaacatcattaatcgattactcagaaatcaagtattttgttcatctcaatgaaccaatttaccatcttctatctttggttgtaattttgttttatatatatagaattctccatagatccgaaaatcatatatcctccttctagatttctatggctttctttttctttttttttgctttgcttctgctttatttgactgaattcgatttctctcatacatctccatttttccataagaatattctttaatacaatcaatgcctatgcttctcctgtctcacaaacactcaaggaacaacgacaaattttggcttctcatctgaacagttgccttaaaacaagggtgagtttaatatcttaatggaagctcaagtgtttttttaatggtaaattaattctcatactttttactaatcttctttcatctcttattttacttttttatatctgcaatttcgtttttgtattatctcatgctacaaaacaaaacaatgtcttctgtagcaatatctcactcgcttgctttctctttatctcagtgtggtcttcttttgaaacttctgtagagaacgtaacatccaagcatgggacggccattagttgacaagttctttgtaagtttcttttcagcatcctctttctccaggtgtatttactgacaaggttgttacattcatgtttgatactttgatgcat

SEQ ID NO: 35458 - DNA, 1285 bp, Arabidopsis thaliana landsberg
  unsure (1)..(1285): unsure at all n locations
cctttttggtgcaccggacactgtcccgtgtgccaggcccgccaacctctgaaccagccactcttgggaattccagggcagccttcgctataattcaccggactgtccggtgaaccagcggagaacgactccctacacgccaacggtcgactatgcagagctacagtggtgaacagtaccacgacagaagtcagagcacagaagtcagagggcactggactgtccggtgcagcaacatgacgagcgactccaatggtaacctgctctgaaccctaacggttgcgctgacatgacgcgctgacagtgcacagtggttgagggatataaatacccccaactaccacattcattggcatccaagttttctgaaggtcacattcaatacagagctctagcattcattccaagacaaatttcaaaagatcaaattctctccaagtcccaaattcatctcaaccacttagtgatttgtgagagagagattttttgttcatttgcgctcttgttgcttggattgccttcttcctttctcatttcttttctcaagtgatttgtaaatctaagcaagagacaccaagtgtgtggtggtccttgcggggtctaagtgacccgtgtgattaagggaaggctcactcagtctaagtgaccgtttgagagagagagagggaaagggttgaaatagactcggtctttgtgacctccacaacggggactaggttctttggaaccgaacctcggtaaaacaaatcatcgtgttcactcgccttgatttttgtttgatttgttttcccctctctaacgtttccttgctagtgtgaatttgtgttggttcccatacgtcatctgcaatccttgagcaactcctagcaagagagatattcttttggacttgaatttaattctaacactaacccccgaccttagtgtgtgtttaagtttataaatttcaggtttctcctattcactcccctctaggcgactttcactcacgccttccacacacatgcggaccgctccgcaatccctcactctcgctaaccctgtctcacttcatcagggacgcgctgcctcgctgctcaaatcgctcgttgcctgttagggccttaacgtcagtcatgaccaatctctccctcacccagtgtgacctacacatgcgcctagctcgttagatatatcttctccatcgaaatccttcacgtagactctttagaaaccgcatcgcaacaagctcagctgtatacacggatctcccntctctagagtataatcctgaaagtgcaccttt

SEQ ID NO: 35459 - DNA, 851 bp, Arabidopsis thaliana landsberg
gacgagtacgctcacggacactagcgctctcctctctctcgtcattgttcttcaaccaaacaatgaacgaagcggccccactctattctactcattaaccaaataaaaaatagagtggttcacgttctgtttgccgaacaccaaatgaaatgactccattctcagaaactagaatgaaaccgatctattatagttggctccccaactaaacacaccctaaaggcatatttggatccacggtgctaaagtttagcactacacttttagtaaactttagcacttagaaatccaaacacgagtgctaaaaagtgctaaaagatactattaataaagtgctaaactttagcacctattagcacaatggtgatgaagtttagcacgtgggatccaaacgagccttatgtttgaatgcactatagttaatggttagctactgcaaaaggacctctagctaagttgattaaatgatctgagtagcactacttaggttctgggttcgaatctccgtgggagcgaatttcaggttgtggttaaaaaaatccccttgtctttctcacgccaaagcacaggtctaagtctcgccccccggtcgcggtcgttctcatatgggctacggtgccattgtgtatgagtggaacaggaatttgagggttttcttgacctgtgtgagaatgtcttctacttaataccatacccgggctgtcttaccccacaagtccaatttttttaatagttagctactaaaattagctaaagacatttaaatagtctagataatcgtttcccgactactgattcttttttgagctttatttttcgatcaagttgatctgcaaaagtggtactttcgg

SEQ ID NO: 35460 - DNA, 1028 bp, Arabidopsis thaliana landsberg
tcagaacttgatgtaaaataagaccttacatgttccttataaattttatttataaaaaaaattgttgttatatatggatctgtttaattgcactcagccatgttaaattataaattttgtttaccaaaattgttctacgaaatatgttagagcttcatttttgtatagtccaacaatacgaaacactagattataatccgcagtcaccgcggtgacaattattttttaaaattagtatatataaaagtgtataaattatatttatctataaaatatttatattttatagtttacaattgttattaagtaacatcctaccaaacccgtctcgccaaattcgtcccgtaaaaaaaccccgcggtacaccgctaatttaaatatataattaaaataaatattttacgggattgcaattgtattttggtttgtcaaacaaatatttgttttaaatagttgtcaaaatctagttcaaattttggagaaaaaagatttattggatagataaagaatgtatttaggtgtgttttgctcattttaagggattgcaattatatttttgtttgtcaaacattttttgttttaaatagttgctgaatatatttggaatatttttagtttgttaatcaatttattgctgaaaaaaaatcaataattaaaagttaatggcagccattgtaaataagtctcaactccaggatttatttcacaaaatggctgcaaaaatgtatatatagataattttaatgtggaaaataggtttttctttttattatttgtttattgttgccataaatttctgaagtcaggtataaaacaataacatgtaattttgtttacataaaaaaataaaagcaagtaaagtatataataaaagggtagtgtgatgtattaaactctatatgtttgaatgatgtactattggaaacaatttttcaaatgtgtttttccttgaaatagaatcctaaactagaagaatatttgacactcccaaaaggactagacaaaaaagatttatctgaaaacgaaaa

SEQ ID NO: 35461 - DNA, 1855 bp, Arabidopsis thaliana landsberg
tgtacggattccatattcgtatagacccggatgacgaatcctcatataaattatgaaaacgagacttgtgaagatgatgaatgatgatgatcaatgctttgcagcgcagagagagagagaaaaaaagagatttctggttgaaactttacagtaaaattacatgattgccactgggttttggagttaagtgatcgtcagattctcagacaaaactattaactctctcctctcacttgttcacctggacacctagacagacccacctctaataaatctactattttttggatcattactgtcaatttaattttttggatatgaatacctaacctaattgatgtatttctattatattttgggttatttaagcaacttttagtctctttttttttgggaacaaaaagcaacttttactttcttatttacttcacaaaaacttctagtgatttcatgactattttaggttattcaacataaattaatgtaaattataattttttttgtaaagttagctcattatatataaataaattataagttctagaaaatgcaatatcatgattaagaaaatcttcatgatgaattcgtctaacataaatttcctaacaattttctactcaatgtttataatcatctttatagtattgatatctttgataggctgtgaaactctacaacatgatggaaaagtatttccaatgaaaggtcctcttactagggttgtgatttataatgacaatgattatcttttaggagttcattgtaaatcaagagatgatgatcatggcttccatattctacaaaaaggtggattatatggttggatgttttccgtgcattttatgaattcgacactctacttctgtggatttagcttagaacaagtaaaaaaaggtgtgttcgatatttataaagcggttagagattcttctagatgtagaaattgtacttgggaagcaaaggaagatggtatttatggatatggcgagattcctaagaaaaatcctttgttttataagtggctaatgtaatgtgaaattgagtggttataaaatcaaatttgaatctaaatgattcatatgcaaatttcattgttatttatacgagttgtaattcatcttcacaagttgtaacggctaataacatcaagcccaaatgcagatgatcctaccattgttttgacttaagaatcgagcatcgattctaaactattgtatattacataatttccctttgctacaccactaataaagcttttattggtcttctaccactagacttaacacccactttgtcaaaaacgtttgctaaatttattcaacttcatcataattctgccaaacttctgctacttagataagcttttctctgaatagttcgtatttttagaaaaattaatgtaaaatcgattgcctaactaaccaaacgctttgttaattacaattagattcgtggtcgatttacttagtcaattaaatatgctcagaactgaaatgtttcgttagctaggaattttcaaggattagtatatgaacgtaaatcattaaatttagaactcagattcggtaataaccaataacaaagcagatggctcctttccttcattgttacacatcttcacactttgatttttcaagtaaccaaacaaaaaaagctttagcccaaagaaacatcacataacgcaccaattataatatcatgaaactgaaagaaaaaataaattagttccacaaaggaaagacaagtgatgccgcagctttagcccaaagatctctcctttatatgagcttgttcttcatcttcttctccaaaaatcccaacattcttctcttgtcccggtttcttgatcccagca

SEQ ID NO: 35462 - DNA, 3030 bp, Arabidopsis thaliana landsberg
  unsure (1)..(3030): unsure at all n locations
catacatgttcaggccccgacagccacaatgaacagacaccggcaatcaaggtgccattacaaacggaactctggctccgtccccgcgggtatgaacaacctccacatcggggagcctgcggggcgacaagctctgggcgactcgccaacgacctctgcagcagcaaccatggtcccgggacggacgcagccactggaagactctcgttcgcgtccccactcaagggacgcgaaccatatattaaagccaaagagctgggggccggtccgtaggcggcgctgacggcctcgacggtggggaagcttcctccaactgccaccacgtcagcaccgacggcggtgtccgctctccaccaacgtcgcaccagtgagcgcgggctgctccaaagcgcaccggtagtcctcgctcccgtcctcgccacgaaagcgaggaggaggacgaaatgttgcaccctggctgggcagcaacagttcgccttccccggcatggctggaggtcgcctcctccgcagagttggaggatggtttccacccccagaagctgaaagaagaggtggcccgccgacccgcgcttgaggtagagctccggctcagctcgctctccgccccagcaaggatgatgaagatccttgaagctgagggcggggcagaggccgcagcccagctcgcttctccccaccatcgaactggtggtcaccgtcttgggtgaccaccagcgaggggatgcagccgggctgcatgatgaaaatccttgaagccgagcgatggctgaaaggtaccaacttccgcgaagttgcgttcctccgacgacgacaagacggaagaaccatgggcgctccccatccgggggctcggaaggtagaaggacgcgatgcatgaggaaagtgcgaagacatggttgccatccaagggggccgccctccttttaaaggtgactctcccctacttgcgtcctcagccgtcgcggactgagtcttcaccaacacgctccaaggtcctcccccttcgacacgagggctgggtcccacgcgtcatgcaagctggcccaggacagaaggagccaaaccgccgcgtgcggagccgaagctgcccagcggttacaagcattcctccactatcgcctggaccagcgggtgaaagggcggaccgccatttaggcgacatgcaaccgcaccaagggggcgcaccctttcgacttcgacgcgtccagcatggaggcccaggcccacacgtcatgtaactggcgcgccggttactacgtgcgagaaactgcaccgccacttgcgccagtaccgcgcctcctcgactgcggaaccagtgccgcgactcgaggcgaccctgcgcacggcccaacagtgccaaccgagcacatcggtcacgggtcagtcagccgcgggagaaggcgcgacagtcgatacggccagaaatgggccgacagtaatggcggtggcaggcgggcggaagcagcggtcaagtcgtcagcaagctcacgtcccctcctgggacagcaagagaaccctatcccacggcatgaagacgacgtgcccgtgttccgttcctcgaacgggtcgcgcacgcacaacggccgccccgcgaaccattcgtcccgtcgcattaactctacggcaggacaggcgacacctttggcaggcgaagcgggcgacgcttcacctccgccataatgaccgcgtcaaaaaaggtgcgccacgtcgttcaatttcatatccttttcctcttcccctttctctctcttgctacagggaccgggaaaggggatactctgaaagggatccttctccgcgaaagaagcgggccccgagccctcctactgatcagaggttcgaaggctggcccctcggaagggttcgacggccgcctcagagcactcgggtccgcgcccactactagtcaggggttcgaaggctggcccctcggaagggttcgacagccgccccagagcactcgggctccgagcctattactgatcaagggttcgtaggctggccccccggaagggttcgacagccgcctcagagcacgcagagcaaggatgactctggtacgtccgatacatggccgaggcttgactacgctcctgaggtaccctaggacatttccgagaccatcaggagcgattctgtaacggaatcccaccagagggaggcattgagccctcagaccctatcaaacgggactgggtccggcaaatcacctgcatgtacttttggagcgcgcctctgggccactagccgacccttatcgaacggggcacgggcgtccactcagatcacccgctagcaactcactggagacaccatgttcgacgccctccgagggcaacatggtgctttcctccccgtccttgtggaaaggcgacgcaggggcttatgaaaaaagccaagtcagtccttgaccgtcttctcgctctgtgcggagcctcgggggctgctctcgcatacccggctccggccaaatcgttgacagcgtcaacataccagcccgagaacttgggccccgaccgtacacccgggctacggccagttcgcatgagggaacaaccagaccagccgaagcgttacgcaaggcattaagacctcgaaggagtgaaaccactcctccgaggcctcgggggctacacccggcgggtgcgctcgcgcgcacccaccgtaacaaaacgcaaccgagaaaggctggtccccttgcaaaaaagtgcgacaaaagcctccaagctgagtattaacactccattcgaggcttgggggctactgtcggggaccataattaggggtaccctcaagactcctaaatctcagctggtaacccccatcagcacaaagctgcaaaggcctgatgggtgcgactaagtcaaggatcggtccatttgagggacgcgatcacgcctcgcccgagcccagcctcgggcaagggcagccgaccccggaggatttacgtctcgctcgaggaccccctccagcaacggacacaccttcggctcgancnanncccagtcttcgccaagaagcaaccttg

SEQ ID NO: 35463 - DNA, 2195 bp, Arabidopsis thaliana landsberg
  unsure (1)..(2195): unsure at all n locations
tgccttggcgaacgcgatagacgcacttttccgggtttaggcggagtcgtgcgtctcgcatgttcgcgaatgtctcggcgaggtcagcgagatggtcctccttgctcttgctggcgacgacgatgtcgtccacatatgtgaatatatttctgccaacttgcccttcaagcactgttttggtaagcctggagaaggtggacccggcgttcttgagtccctccggcattctgatgaagcaatatgtgccgaagggtgttataaagctggtgctagccttgtcttcctccttcatgtatatctggtggtaacggagaagcagtcgaggagtgacatgacttcgcatccggccgcgctatcgactattttgtcgatccgcggcaacgggaagttgtcctttgggcaggccttgttgagactggtgaagtcgatgcacattcgccacttgccgctcttcttctgcaccatcactacgttggtgagccatgtagggtaggcaattggctcgataaatttggcctcaagcaggcgatgtacctcacgcttggcggcctctgtcttctcatgggacatcttgcgcaaccgctgtttcttcagccttacttaagggtcaattcccaagctgtgctcgatgatggagcgactgactccgaccaggtcgagggcggaccaggcgaagacgtctttattcttggacagacagcagaggagtctttcctcgtcgtgcggagtgaggtcttcgcttatgatgaccgtttgcttgggtgttgcttggtcaaggggaactgtcttggtcccatcattgctctgcagttgtgccttttcatgctcgttgacggttgggcgggtagcttggggacttcgcgctgcgtcgtaagacagtgtacgtttctttgccctggaacgaagtctctttcaatgttgcgtgcggtctgctggttgccatagactgtgatggcgccttgcagacccgagattttcgtgcacaagtaaagtccgtgaatggnnnnnnnnnnnnnnnnnntggagccctgacccattatagcgttgtagggataaaccatgtcgacgatgtcgaaggtgacctgctcacttcacgcattgggtgctacgccgaatgatagaggtagttctatcttgcccacagggaaagtgcccttgccgtcgaagccatatagggggttgtccaaaggcttgagtaagttgtggctaatgcccgtgcggtcgaaggcgtgcaggaagatgatgtccgcttggttgtcgttgtcaactaggactttgtgcaggtcccagcctgctacgctgcagttgatcaccatggcgttgacgtggggtgcgcggcgcagatcaaacatctctggcatcgaaagttagtggcacatgtgaccacctcgtttgtaccactgggccgatgagggcgacatggttgacactccggtaatgatccctcttttgtcgcttcgtctcaaagttgacgctggacccccctgttatcatgtgaatgactccgcgatatggttgatcgacgaagtcttcctgctttggggcatgggggatgttctgatgttgctggtgtggtggtgggggtggaggaggtacgatttgtacttcctgatggtgttggtaagcgtggtgcggtggatgcggagcgggagcgtgaatatatggtggagggggtggctggtaattatgcgcgacaattctgggattgtcaggctgattgcggcccgcgccattctgtctctggtggccttcgtctcggggcagtctttggtctggtgggcgcagtcttcgccgtggaaaaggcaatagaatcggcgcggcggctgttgcgcccgccctcgacccctgccgcgagttccgtttctgcggccctgggggggatattcctggcggcgagggggatcagcagcaggctgttggttgacgatgttgtgcacttgctgctgactgcggccatctcgaccggagtctggctgcggagtccttgtccacgtgcggctggactgcggggcatctttgggtttccgttgtgactcgaccttgcgctggtggagctcttcggatttggcatatttttcgaagagctgatatagctcctgcaagctcttgggtggatctctgatacaatggctgtagaggacgccagcccgaaggccattgatggcgtagtggatagcgatctgatcgtcgacaga

SEQ ID NO: 35464 - DNA, 1815 bp, Arabidopsis thaliana landsberg
  unsure (1)..(1815): unsure at all n locations
gtttgtattgaatatgggatgatgaaacgatctattttccatttttagtctgtaatacacaacataataataactacccaacgtgtcaacgctcccggattagaccactaacaatctaccatgaaccctaggatatatatccttcgaggatacaatcactttttcatgcggtaaatcgctgtgttacgatttgtatcttatgttattcgcactctaagactctgaatatatatcattttttggcggaaaagctaatcgcataacatgagattataatatgcgacatgtcaaattgttatcaaaacattttatataataagaaatttatttggtatagtatcatatgaaacaaagagtcaatacaatatcaatgtcattatatgtgctcattatgttaagttgagtcaaggcactttactaagaacacttcaataattatatttaactatttccgggtattcatacgtatgaaacaagggtttgatgttctatatactttatcctcatcccttgaattttagttgggccaaaataatgacattaaaattataatatgttgctatataaaaaattgttacaatttggatgcaacatagagagatcattagcgagacattgggtggatcgtgcaattcatttctgttttgtcaactagcaattcaaattatggcgacattatatacattagtccatattacacaaaaactaataaactatatatgtcttggattcaaatagaagaaataaaagtcaacgagtttgccctataaatgatctatgctttcaaaaagttagctacaagctcatcaatctctgctctattaaaaaaagaagaagaagcatacacaaaacaacatcaaagaaatttggcaaagctcatagttaacttctctgctctcttgatgatcatcttgttggtttctaatggtaattttaagattttcttaactttctttgtcctatattaatatcgatatggatgtgaaaagattaatgtgagaatggttaaaacaggactcccaaaggcggtagcccaaacatgctttaaaggtgaagctcaagagggtgtgtgtgttaaagttgacggctcaaaattgggtgaccttttttgcaaggcaaccaacacaacttgattttgtggcatgtgatgttggaagacaacgagacgcnctgtcactgctacggaccttgttaagtatctcatccggacgcaaaaccaaatatgaaaggtgaataattgtgtatcagtacctaaataatgtgtgcattgcttatgatcaatgtcacatatctacatgtgtgttccatgtttgtgtgtttttattttatcgctttcaataaatttgcatcagcaccgtaaatgtagctgatgcgataaatgaatgtaacattaaatctgtttattatgtttgcttttggtgttccattatctctcctatatatatgtcctcttctttttcttcattcttgtcattaatctatatgtatgtgctattttttgttgaacaaaggctaatgagtcttatctataacaccaaatcaactcctaatagtaatagaactcttaacctaaactcaaaagaagtaaagtacaaggaaaactctaatcaaaagttcaaaaccatattcctaaaccatgaaacataaaggaatatcacaacctcgaaactcttttgccgtaacgactagagttgctttttgtttttagttaattcaaatgatgacattattgctccaactatgtaatgtagccaccacatttttcttgtaattttttttgtttccttcataaaattcatttagcaaatttacaca

SEQ ID NO: 35465 - DNA, 2222 bp, Arabidopsis thaliana landsberg
tgtactttctgaagtcagattgttcttttcctttgtccactagcatgcaatcgcctattctggtgaatcgtggatgggttcctcgaagttggagagagaagtcacaagaatccgcagaggctgagttcattgcaaaccagtcaacaaaagctaaatcaccgtccaatgaaccaaagtcctggtggaaattttggtctaagacgccagtgattaccaaggttggtcttgttcagaaactttttcctttgtcataaggttggcttctcatatatttggtttagctcgaaactgtaattttgtgggatacatctgaatagaaatgtcggatctatgcagagacagattaaattcagctatctgcaaagtttcacttctttgtttattgtctttaacaaatctcttgcatacattgtgactcgtgaaaactgaaatcttgtaggaacatatatctgcggttaagcctgtagaagtagttggcgtaatcaggggaggggagaacccgagcatatttgttccatccaatgatccaagtaccgggcagtggttctatgtagatgttcctgcgatggctcgagccgttggccttcctgaaaacacaatctacgtagaggacgtccatgaacatgtagatcggagtagaccgtatcctgttccgaaggacatcaacaccttgatccgtagtaaagtcatgccacaggaccatctgaactactcaataacatggtaaactccatacagatacatgaggtgttcttggcattgtctggtcttaactgttatggtcaatgagtgacattatgtttgtgtctgtttattgatgaacaggtattctctctcggcggctgtcactttcatggcatacaagagactgaaagcaaagcctgtccgcagataagcactcgctgatcaaaatcaaatcgtattctttttgacacttgtctgctgaagtaataattgcagtggataattggttttaggttataaactttcataagaaaaagggacacaattaaatccttaatgttgtggtaacttaatagaaatttgcagttttctttttctacgatggaaggaaagttcaaaatggaagccatttgtaggtaaagaaggttgcaacgaatgcttgcaatcaccattgttctttctgggagactttcagcagaatttgtcggtgcgaattatgtattacctacaaaaagtcaatttacggttcaagagagtttgtttgactatatctgatatattgtgaaacctttttgaaatttatctccgagactcgaaagacagcataaactatgaactgctctcacgttaagaaagaaatagagacatgaacttaaaacctcattttacaaaaaaaatagtgttaagacatcttattcagctaaaatctcattattccactgcttttcaccaaaaaaaaaaatcttattatttccctgccgacaggatcttttgccgcctttgacacctttggtgcaaagttttaaattatttcatcgatctggtgtacctttaatattttacacgaaaggtttatgattagctttctcttacaaattaaacaatagtcaaccattgtaaacgaaagtagcacataaagtgaaggaattaaaatgaaacgaaataatctgagtgaggtggaaatatccaatttcaaatgtgtctttgaagtctctatggataatttgtcaaaacgatagtatttgataaaagaaatggaatgaaatgaaattagtagttatcagtaaatctttttcttacttaattcatcaaatgtttttcatgtgagtgtgttttaaaattacgtaatcaatgattacaaagtaagtaattatctaaagcaaattgtatatatatagtaattagtataataagattagatttaacgcatgaattaggccaggtgttaatatcagtcttgtcccagattgttcgccagagagaatagaatcatcctcgctgtttcctatttaccatttgtttccaccaatcatcatcttctcgcatcagagccaatccatggcgctttctttctttagctccgtgtaatttctctattctgacaagtcaaatccctaaaaacttctcgattctcatggccatcgttaccggagatcgatatctagagaatctccagaggttccttgacgagaaagctgatttgcttattgatggtaccgatgtcctcaagcttaatcccgcgggtcttcacttatgtc

SEQ ID NO: 35466 - DNA, 895 bp, Arabidopsis thaliana landsberg
ctgcaagagacccccacacgcgcatcgcttgtccctgtagagccccctagtgagcggaggtctctctctccctccattcttggcgtgtcactgttcacgcgcactaacactgtttgatattgtagctgtgggcccgcgattgattgtcagtagatgaaaaattgatagtgaatgaaaagtaggtatagaaaatgatatttcatggatgtagtggggtatagagaaagatttagggagaatcgctgcgggaggtataagaaaaatagatttattgttgacgatgcgacgaaaaacgatgatatagcaaggtcccgtttgtttcctttcattttgaggtattgggatgttactaataggatgggctatttttaaagggatgtggcattccaccacttttcaaagttatcatataaggctatctcaaatttatggggtgagagatggaaattgattctatagatttacatgctatttttccgatgtacaacttataacacactcttctacttgattcgctataacataaatgtagcatataactatctctttcatattatttaggataatatacaaatatattacatatataaatatatgaacttaattagttttgtctaaattataattattaaaatggaattcaattccaacgacacaaacagggtcttatatttaaaactttaatatataaatagtgtattgtataatgcaaaataacgttttacgcgtacacacatttagggtctgtttagttgggctgtggctgtgaaaaaattgctgtgaactgtgagctatgggaaaagctgctgtaggctgtaagctgttaaaaagctaaaaatcgtttggtaaaaacactaatagtcgttaaaagtttttcgatatatgtttttatagt

SEQ ID NO: 35467 - DNA, 1199 bp, Arabidopsis thaliana landsberg
gttttgtcatatcagatggaaaccgtatgggtgggttagctaaaaagtattatctgaaagactgcaaggtaggaccatggagcagcaagatggaactatcacaagagcacaacttagggggtagtttctctttataacttgtcatgcatgtgtgcagaccagtaggccgggtttacggggacagaccccaccgggttgtcgtacacgtatgcgttacctagttacaaaaaacagatttgacccctcagacttgctttatggatagaacttacagagatgtttcagcatcggggtaaggcactcctccggtcatagctagatagctgcccctgggtcagcgtattcccgtcaccttgaagggtccttcccagctgggggagagttgtggagcccttcttggtttggtacttgccataggactaggtcccgaccctggtttcccatctgcgtttgatgacggagtcctcgtcctcgtgttgtagccatttctgcatggacttgtcagaagcctcgacccttggggagtccagaaggttttccgggggaaggtaggcttcggccccatagaccggggagtacggggtccctctgggggtccatcttgttgtctgcaccggagtatgagtcttcggcaaagacatccttcaggtcccgctcgggtgactgatacccgaggtcccgttcagccgcggccacctcgccgtcgtcgaccttttctttgccaggtcggcgacgaggtggggagccgtccctggaagactactcgcgccgctcgctgacacgtttcgcgaggtcaatgatctcgcgacactccacggtgatgtggcgaccgttggggtgcatagggcatgagccgctgttacccctctgcgaccgtgggcgtttgttgcggtcgccccggcccccggtcacggctgcaacgactagagaggtggaccgtggcttctggtagtcgcggtccttcttctttttattcttaccgtcccgggggacggcacccgagccacccgactgggtagccccggtttgtggggccgagtgccatgcacggccctcggcggctctggcgcatttgtcggccagagcgaagagtgtggggacagtctccacgtcatgcgtggccaacttctccaacattttctcatcacatactcaatggcagaaggccgtgatgatggaagcatcggaaatgcgaggta

SEQ ID NO: 35468 - DNA, 5632 bp, Arabidopsis thaliana landsberg
tggtaaaggatcatactagaagtctttgtcttttcgggtatttaacgttgaatgtgactgccaaatccaccaacagagatttcaagttgaaatctagaaccttttgaagaaattcatgcggagagatccacttcctcatgtaactcagaatctcttctttgaataactcaatttggtgtttttccacctcttcacgccgaggaagtgtataagaatggttgaagtcgcaactgtcacctttcaagcatactccacgtccaccgtcaactttcaagcatactccacgtccaccgtcacctttcaagcatactccacgtccaccgtcacctttcaagcatactccacgtccaccgtcaactttcaagcatactccacgtccaccgtcacctttcaagcatactccacgtccaccgtaatacaagtttgaaattttgccattttggtgtcaaactttattttttctgatgattgtcggtgatgagagagagaaaaataagaatcgggaggtattgagcatcgaattcatgattgattatagtaagagaagagattttggaatttcttgagagatcataacacatatcaaatcaatcgatcagatattgcacgaatcatgtaaacatcataggtaacctaacttgatttatctcatatgacttaatggcttttatttcttcgtctacccacgtaggaaaaccattatcctaactatatcaccgagggtaaagtctcaacataagggatgatcaaattgatcttttatatatccggaaacattaaaaatcgttgaatctaacaaaaagtcttaatgaagactctttgtagcctaaagcaaatgcatgtttctacgagagtctctcagggtgaacttgtcacctctcatttttgtttgcttcattaagtcgaatcttgcttcaccaaaacaatcatttgcaatgtcatgggtaatagaggataatcgatttttggctaaatcagttctcaaactatatgagagtttacccaagattacatacattctcaagtaacaaaatatgttcacatgtatcatctagccagaaatcttaatcattattagagacatttgcatgtgttgtttctattttttacggtattttggttttataaaaattgtaactatatgtatattggttctatatgtattttggttcggttcggttttggttaaagttttttatagaggtgggagttaacgttgccgtgacaacgaggacaggaagctctcgttcaagcaatctctaactaaccatagagtgagcactgtatactactttggaagcttgacttggagtgaccgatcattcctgtgtttgtaagaactcagatcatgcagcgttactatgatgaaaacagattagatctttgtattaattcgttatatctcgtaattgtaacttcagattctgcattcctttgtttgtttgtttagtgtaccattatatatattgatgattgactaatacacaaaagaattatcgcgttcattggaccatcaaccagagtgatctcgtgttttgtaattcgtctttcttttgctttaccaacaataaaatattttttttcaaaatgggaccaatcatattctataaaatggaacaattgcttttcaaaatggaaccaatcatagtctataaaataagatgaaatcaataggccacttcgtttctacgggtgtatagtgcggcagaaagtcactaagattataatagtttgtagatttacttttaaatgaggaactttcttatgtgattccttacatataaagagagaaaataaactaacaatataattgtaatgaaaacatgctcaaattcatattataaaatgatttaatatatttcaaagttcaaacaatgtcaccttaaaccctttttcataacaaattcaccctaaaagctcaaccttatctataaaaacatgcatcaagtaaattacattacatctatctctctcatggaacccaagatgacgagagcactgattcttgtggctatatgtctaatgcttactctaaacaatgctgctgagactaaggtactttatccgagatctgaatctcttactcaatcttttggtggttaaattagttcttcaatgaatttagagttcatgcaaacagctaaactttgtatttttttttattatgatttgctagctaggttcacatagtgtatctaggtgagaaacaacacgatgatcctgactcagtcaccgagtctcatcatcagatgctttggtcaatcctcggaaggtaatagaatttacaactttgaccaaaaaccatttaaccaaaatgcgtaactctttttgctaatacatcacagtaaagaagctgcacatgactcaatggtgtatagttatccccatggcttctcagctttcgcagccaaactaaccaattcccaagtgaatcaactctcaggtacttacttataagacacaaatattgattaggatttagaatagttgtagtttgatttttttttaattgccatggctaaatgaaattattattttgttataaaaacagaattacctgaagttctccatgtcataccaaatagattctacgaattacagacaactaggacttgggattacttacaacacacttcaaaacatccaaagaatattctaaaccaaactaacatgggagaccaagtcattatcggcgttgttgactccggtaaaccgggattcttgcctcttaaatcgattttggtttttctaaagttacaaaattttgctaaactggtttggtttatacttttaaaacaggaatatggccagagtctgaatcattcaatgacaatggtcttggaccaataccaaaacgttggaaaggaagttgtgtgtcaaaacagagttttaacggctcaaccgtttgcaacagaaaattaattggcgccaaatacttcatcaatggatttcttggtgccgacgaaagcaactgggacacgacggagaatccagaatacatctctcctagagacttcgacggtcacgggacacacgtggctgcaacagctgctggctcatttgtcccggacacgagctacttaggacttgggagaggaaccgctagaggcggggccccacgggcacgcatagctatgtacaaggcttgttggcacttagttacaggagcaactacttgttcagctgcggatttgttaaaagcaatagatgaagctattcacgatggtgtcgacgttttgtcgatctccaacggcttctcggttcctctgtttccggaagtggacactcaagacggtgtggcggttggagcgtttcatgcagttgccaagggaattcccgtcgtttgtgccggtggcaacgctggtccctcttctcagactattagcaacacggctccttggatcattaccgttgctgcaaccactcaagatcggtcttttcccacatttattacacttggcaacaatgtcacagttgtggtaattaagctttgcaatagttcaaaaaaggattaagattacttctttcacaatctttgtataacgtttttaagttttagggtcaagcattgtatcaaggtccagatattgatttcaccgagctggtttaccctgaaggttcaggagcaagcaacgagacattttatgggtaattgttttatctctcatcttctctctggttaaacatttcaagagtctttcccgaatgagtctaactccaatcttatacaactttcagagtctgtgaagatcttgccaagaacccagctcatataatagaagaaaagatcgtcttatgtttcacaaaatcgacgagttacagtaccatgattcaggctgcatcagatgtagttaaacttgatggctacggcgtgatcgttgcaagaaatccgggccatcagcttagtccatgcttcggtttcccctgccttgctgtcgattacgaactaggaacagatatactcttctacatacgttccaataggtatattacagtcatacatattttcatcaacttgtaaccattacctagttattgattctgtatatcatatggttggttttgtagatcacctgtcgcaaggattcaacctacaagaacgttggttggacttcccgtggccacaaaggttgcgactttctcatcgagaggacctagttccatttctcctgcaattctcaaggtaaattctgacctagctgtttgattctttgtttctgttaaaccctaaaactcaactagattctttaaatcctgaactcaaaaccataacctatacgagattcttagaaaataagcatggactttatctcttactatgtggacaatctaacaataagttcatggcttcttgctatattagttagatttaaggttttctatgctctcactataaatagggtataaatgtggtcttcagtttaatgtagttacttttgactgaagtttcatctagtttcttttgattaaattacactgattgctttctcggatacagcctgatattgcagcacctggagtaaacatactcgcagcgacttctccaaatgatacattctatgacaaaggatttgctatgaaatcaggaacgtcgatgtcagctcctgttgttgcaggaattgtagcactcctcaagtctgtgcaccctcattggtcgcctgctgccattagatccgccattgttactacagcatggagaacagatccgtccggtgaacccatttttgcagcggaccaaaccgtaaattagctgatccatttgactactgaggaggcgttgtgaattcagagaaagcagcaaaccccggtcttgtttacgatatgggagttaaagattacatcctctacttgtgttcagttggttacacagattcatctattactggactcgtcagcaagaagacagtatgtgcaaaccctaaaccttcagttcttgatctcaatttgccttcaatcacaatcccaaaccttgcaaaagaagttactatcactagaacggttaccaacgttggaccagtagggtcagtttataagcctgtgattgaggctccaatgggtgttaacgtgaccgtgacaccaagcacattagtgttcaatgcttataccaggaagctctcgtttaaggttcgtgtcttaacgaaccatatagtgaacactggatactactttggtagcttgacttggaccgactctgttcataatgtggttattcctgtgtctgtgagaactcagatcatgcagcgttattatgatgaaaactgattaggcctttgtatcttgcaactaaaactttagattctgcactcgtttatttgttttggtttcctttttttgtgtgttattttgttaatgattgattaataatatgattgatgtggttgttgaatatttcataccatctactaaaagcttattccaaaatttcttggggaggaagaaaagatggtcaaataatataggttgagagatccaaacgcagagggacgtgttttactcaaatcaccttagactattaatgatttcttcgtacaaacacatagagatccataaataatcagttctcatcatagtagttttgcagaatctgtgttctcacagacagaggaatgaccacattatggacagaatcagt

SEQ ID NO: 35469 - DNA, 1219 bp, Arabidopsis thaliana landsberg
agaccagatgagagtacgcagaaaattctagctcaactacttacctccgagtatgcagtatcatgaagacacagaacccaatacacaatgatagatgacatcagcggccaattcttcaagagagactgagaagcctttctttcgttttttcctgccttcccggtagaaggagatgattcatgagatgcagcttcaagtatatcgtatgaatcatcatgtgataagctgtccagcttatgattgtgcagtgtctcctactcagagaaaaaaaggagactagtgagtgaactctgtacgaaatatattaataaagaagagtcatcaatgaatacaaggttctcagaacgctctcaaagaaaatagagtaccgggatgaagcagcatagtactgtcacaagcaaggcaaaagctgaaatcgtaaagcaaggcaatgcataccggaatctgcatcagaattcgcatattatttcatgagattccatattagatcccttctacacaacttttaaagagaggagtatgaatggacacctgccaaaaagagattcttgggagaacacatttggatatttgtctgccggctgaagttagagaacatcgaaaagcattaattagaacactagaaagctaaatatgaatcaatgaatacgcaaacaagttgtagcaaaggaagagagatggacacatgataagcttcacatttatatcataacgtatggcaaggtttggaaagctaagaaaatataaaaacttagatacgatcgacttacctgagctaaacatccaccaagagcagggccaatgttcagtccagtgagccaagcagtgctaacatggaatacgtagagttagacatttgatgcggccagtagtcagtcaacacatatacaatgtatgatatggagaaccttacagctgacgttgcggtagcttgatattcatcacgaaatatttttgatgcataggcctcaaaatttacacattgacaataagatatgagaagatgcacctgacaatgtggtgtgcagatcaaaaacataaaccaagagtaatagcggtaacaaagaagccactttcattgttccaagcaagcagttgaaactcccaagaagaaaccttgtgccaattgccatccaataaattcagctcgaatcaaaaaggagcgttgaaaattgaaatcaagtattcttcatacatcagcatctagagacgaagatgg

SEQ ID NO: 35470 - DNA, 1603 bp, Arabidopsis thaliana landsberg
cttttcccggcggtctggagaaagcagtaatcaataggacttccctaatcctcccttcctgaaaggaagaacgtgagattctttttcctttttgcagggaccatatttaagtgacaccatacattaatcaagtactgataagtcactgtctaagttttactttaatcaatgccacgattgtttctttgcgtttgtgttccatggtataacgatcagaacactataacatggataagtatatagaaacacagaataattgtgacctaaaggtggttgacactccacagctcatacaattctcagtatacctcactgtttatgttttgttggttgctgcttcataattagaatacagtagaaggtgcatatagaaaagagttgttgatgcaactgagaaggcttgtctgtaacaccaagagtttctatatatttaggatgctcactttctctgaaggtatgtgcaagttatgatattcaattatgcgaagaaaagggaaatcttttggaacagacagaattctatggtgtgaaatagaatagatgacttatcgttgatggggtatatcttacatgtccctatatcaataaagatatgcattattttctgtatatgggtatagtgaagctgatagcttgcttgttgcattagctctctctcacttattgtattctagttgattttggttcgttgtactgacacggagttaactcgtcattggtttcttcgtgtgaacctggtgatgttggaggtacttatcagacaacatttcatgataatgcctgcatcttggctgattctgatagtaagccaaagttggaaactattgctgggaaagtgaaagtaaagagcgtaccttcctcagttactgcttttgttgtagattgttttaatattctgcaaacaaaagatcatgtctgctcagcttattggattaatggttttaaactgttgctttttggtggaacttactgagcagtttccacttcggcatgttgctgtttgtttttccatgtaccagctgagagaacccaaatgcaaaactcgtttctcgctgttatcatataattccattccatgcacaatcatgctaagaagaaagtgttgctttcaagaatctcttgtgaaatttcctttggaaaagatgttgaattgatctttggtgatatgatttgttgttttgtctgtaatgcttaaatggtctgtcccggtatatgacaagattataactgttgttgtctttaaatggatgacttgacttatctacatgattctaccttggattgtgatatattcattaacagtttacaggtaaatgctactggagcttcagaggatctctactggttacttgtgaatgccgacagagtaagaactgttcgctctttctatattaatgtatactgtacagttgctctgtggtcagttggctaacaatttacaggtactaaaaatttccaactgtacagaacaaaatagtttatagaaagtcatagagtttccatgattaaacaccctgcaatgagtttccattagttccttgtgaaccataatctagtatggtctttggcatcttatgtattcagaaaataccctgtaaagtct

SEQ ID NO: 35471 - DNA, 1437 bp, Arabidopsis thaliana landsberg
  unsure (1)..(1437): unsure at all n locations
ggagaggatgggcattatggatactgtccggtctagttatgttggtctgtttagttcaacagttaccgacatggtgtctaaaaatcgtttccgcaagggccaatgtatcgtcctacagatagcacgtggagtggcaagggcattgaatattccagaagatgcggtggaagtgaggactcttcagggtagctggacatgctatgagattgtgcacacggtgaagaccccgatggctgctccacccaaaagagggatgccgacggatcctccggtgagcacgatcacacgcttcaaagtcactcgcatgagtgcaatcgtggaagtcgcctacacgagggcactacaagaatatggagtatttatagcactataatatagcagttaaccatgttctgctataatttataacccggctaaacttttataccgtttggtaatttcaaaacgctataatctcataaccgggaaataaaaaatgacgcgggccatgtttttggatttagggttattcttctatagcattaccattaattaaacgctacctaatgtaatagcgcggattaatttttgttgcccgccgaaacaaataattgacctcaaaataattctaagtactgaaaaacatttctcgactctttctcttcctattcttgttcttccctattcttcttctctctgtcttctgctctaatcgattcttcttctctctgtctctctttgtgttcgtgttcttgctcaccgactctgttcaatctctctcgaagacgctcgctactcttcagcttctcagtcacagatctggttctaatttgagaaggttagttgccttttgtcatcgatttagggtttgcattgtgaaatttctcatatttgagtttcaatttggggttttaataagatttagggtttgctttgtgagcttttcatgttctcaaaagcttttgatatcttcaacggcaaagaatctttaacggcgaattgaatacacctccggagaataaagacggtgttgtgccaaaagaaatggtcgtagatctgggcgtggagaaaaccgagacgacgaaagaaaaaaagagacagttgaaggcgaggaaggtctgttgagttcaaatgttcaatctctggtttcgatttaccatttagcatattaacgagattaatatgaagaagagatctcgttcgatgaagaagagattaatgatttgttcaaggcttgcaatattaacgaggatatgagaattacatttacagaattcattgttcttctttgcctcgtctatcttcttaaagaccattcatccactctccaaaaggtacccgcaaaatacttttatcgatctcctaagctcgggttgatatttcgtttagattttgattgggtattcaatagttntaaagctattttgtgtgatgaatagaaatggcaatgggaatgcc

SEQ ID NO: 35472 - DNA, 886 bp, Arabidopsis thaliana landsberg
cttagatgctgagagaagtttgtgtggatgcatgaaaaatgatttatcgaatagtaaagtttatatttatagtgtttagaattatgttgctttattaaggttttacgaaaacatattttacaaatcttctataagtaaatagcgtatatgctaatcgcatcaaaatatctaaacaagattaatattagtttccatcgttaaagatcttgtagcatatttgttttgcaattttgcgatttttataattttacaataaaccaactttatcactttctataattaaagatcatagtgaatattcgatggttaatctgatattcagaacattcttatattgtaagcgatatactttccctgaataacgaagaagttaccatatcttcagaattgtatatgttgatttaatatttgattttgaattaaatatttaacgtaaaagttaccatataagtcgggttaggttgtattttccttatataattaatttgaaatcgaattgaaattaaaagatccaattagccaaattacccgtaaatccatttaagttgaagcttaatttttaatttaacccgccccgttttctaaatgtacttctcttttaataatatagggatttcaaacaaatctaaaaagacaaaaaaaaaaaggaattttgaaataagcagagattgacaaacaattctaaaaaaaaataatgttggagaattctaaacaccaaatgaaatatttctgaacaatgtccattagatgtgtagagaaagttttatcaattccatatttcaaggtttgttgttaattgtataataattctagacaacatttgagataaagcaaaaatatcagtgcaagagtcaagatctttcttggtttttcatcataatgtcaa

SEQ ID NO: 35473 - DNA, 2014 bp, Arabidopsis thaliana landsberg
  unsure (1)..(2014): unsure at all n locations
gatgagtcatccttctcttcagtctctgtctgagaaactgggcgttcacttgctcaaacagtggtggcagcaggtgaagtcggcgcagcagcaggggcagccacgggcttggcagtctcaacctcctcagcctcagctttaccctgagaaaaagcctcttgaagctgaagagcatattctaggttccacaatacatctcccattgttggtctatcaacaccataatctgctaaacatttctctgcagcttctgcaaactttttcattgattcaggattgacagcaccaacgagatgagggtcgatgatcttttcgagtaaacctttttgtttccatagcatagcccattcggctaagttaacttgttcccttggaagctgaggattaatggctggtcttgcacatagagcttctagtagaacaacaccaaaggaataaacatcggatttgtctgtaagttgctgtctcctgaagtattccgggtctaaatacccaaaactacctttcacagccgtactaacatggttttgtccaaaggcaacgtctttggatagaccaaagtcagcaacttttgcaactaaagcttcatcaagaagaatatttgtggatttgacgtcacgatggataatgccttaaactgttcctgtgtgtaaatagtgaagtccacgagcagctgcaatgcagatctccagtctttgtttccaagtcaaaggagaaagattcttcccataaagatgatctctaaaagaccatcggacatgtagtcgtatacaaggatcatctctgcgttcacagcgcagcatccaatcaaggagactaagtgtctgcgtctaagcttagatagcaacggaagcgctgaaagaaactctgcgatccctagctctgacnnnnnnnnnnnnnnnnnnnnnnnnncttgagttccatcgtcaatggtaccaatgtaaacgttaccaaatccaccaacaccgatgatctctgatgcatcgaagttctttgtgacttcttgaagctcagagagggagaaatagcgtccgaggccaagcgcggaattgtacaagttggatttgtgagaacctgttttgcttgtcatgaaggtactgtcaccagcgtgtattggaagtaaccaagaagagaaactgtttctcttctgccaatcttgtggtctcttcttccacttgtaaaccattgctccaagacctacgaaggctccaaacatcatcacaaaacccgcggttgcaaccatcccctgcttccccatactcgctctttgaccatccactccaaattctccatcaagactgttcacagagttgctcatcttcaagacctcgacaccgttcaagatcgcgttctttttcccagtgtcttctcccataggaccaatctggacctgaagctcagatttcataagtgtcgagttcaccacaatgtctttgtagtaaggagcagaaagatctccagctacagtggacaaatctagcccggaatagcggtctttccattgatgtaaacgttgaagtagaggtcattaagagacttgctgatgatgtcacagaaatgaagacgaatgaagtagtgaaatgatgggtttgatgggaaattccatgtaacattgaagttaggatctatggtttgagaatcagccatctctgctcctgttgcgtaaaccgtttgtggcgctatcagcggtgtaactccaggaggatagatgatcgctgtagggtttgttttgacatccttagccatattctcatctttcaagtattctttgtcaggtgtccaggttcttcctagtgtgtcattctgaggcgtgatcaaggggccaccaacattaaccctgtaaaccgactggtatgcgtaatcagacaaacccgaaaaaccgttgacagggaaaagagaagtgcctgcatcagagataagttcgtctggagctgacacaagttctataccgttgatgaaagccgcagagcctttcataggcttgaacctaagggcgaattgtgcatcggtcatg

SEQ ID NO: 35474 - DNA, 4638 bp, Arabidopsis thaliana landsberg
tatgttgagtaaataggtcagaagaagatctatgaaccatctggaaaaaaaggaaaaaaaaaagaaacagatcgatgaagaagaagaagctgaatcaagggtaaaatcgtctagtgataaaaaagtgctcatttacataagtccacatgaaaatgtccattttcaaatatttaaggtaggtagtacctatttttataaaaacctcttataaagcagtatgaaataataatcttaatgaataatttggtcttcaaaattaaatcgaacgtttattaaaaaaaagaagccttttgtagttctctatttgtatattggtatcgtgttgtaagtttcaattggaaaagccgggaattcatatacattactataaaggttattgacaatatatgtgatttttttttttgttaagcaaataaacgaagtagccatatgattctgatttaaaaacagggcatttcgaaattttaaaataatcggggtctgggtcaataaactaggggcttttatgaatataggtatattttggatcaaaaatttgaaaaaagcatattcacttgggcttataagtttgtccttggatttgttgttggctaatgaaatgacaattttgtccttggatttgttgttgataatttcacttcattttttccgctgcgtcacagatttcacgatcatgaaacctcgcttctcacaatcaactcttgcctttttcaacgtcgactcagtattccatcaacatcatcattttcaacttcatcaataccgtttctctcgtctttttagacttaaaaaatgttgcttcccctaacctcttccgattaacccaattgctcaaatttaacgagacttttgatggaaggaatctaaaccctaaggggatagtatttagggaacccaaaacatctaattttagacatggatcgaatcaattaaactccaattaatcaatatttgtcaaccaaattcgatcggtgttgtcaaagatgaacgattatagcgtcgttctctggacgaatatgatcacaagtgttcttattcattgctttgtgtgtctttaaaattctacaaaagagggttttgggattgagcttatatccaaaatgggcattttaagaaagtttctttcaaaagaggtatcttctacagtaggattcaacagtagcaacttattgactcgattctgacaattttgactttggtatgaaagcgtgaaatatatattatatctaaaacttctcaattatcagtatggaaatggtacacactctaaacattagtaaaaactatatactagtttgggatttagaaacccaaacaattcaatttacactatgtaaatgttagataggtgagatgagaaaatttgtgaactaagagaattgcagtttcagtggagaagaggacgccagtaaatcacgaaattctgattgtggattccgacatacttcagaacaacgatcaaactcaccatgagtaggaacgacggtcagagttctggcgaccaagcctccatcctcgacgacatcaagcagctgcttcaaaagttgtccaagaagactgaccgacaacagcttgctgtgacgtctctctccaacaagttcgtgaccttccaagagcaatgcaacgaccaactcgcagcattggcggctaatcattctgaaatcagatcggctcacaacgcgtacgcagagcgagtcgattcactttctgcaggaactacgcggactaccgaagctcgaacgcgactcaatttttagggcaccgtcagcccgagtgtccaaaattcccaggaagcatctggccaatagactccgccgacaccggttgaagtcggagcgacatcgactcagaatcctgtcacctcgtcttcaccagcacgacttgccgcagtttcagatagggcgatagctcggacgccagttcaacttgatcctgccatcagactcccaacctccgatcctcgacaagagtcaaacgcaatcaattcggaacttcaaaaccttcaagatcaaatctgggccatgaacgcaaaagtccatcaggccactacttcggctcccgaagtggagaaggttattgaggcaacgaggagaacacctttcaccccaaggatctctaagttgcgtatccgtgaattctgagacttcaagcttcccgtttacaatggaaaaggagatctgaaagagcatttgacttccttccaagtcatcgccggacgggtccccctagagccgcacgaagaggatcccgggctttgcaaattgttctcggaaaatttgttcgggcctgctctcacctggtttacccaactggaagagggctcaatcgataattttaagcaactctctactgcgttcatcaagcagtacggatacttcatcgatagtgacatcactgaaggccatctttggaatctttctcaatccgctgacgaaccacttcggacgtatattaccgcgttcaaggaaatcatggttcaaatacccagcttatctgacttagcagctcagtccgcactcaaaaatggtctttggcatgagtcacgattccgcgaatctttaacagtaaaccgtcctgagacgattcaagatgctcttcatcgagcaacgaattggataaatgcagaagaagaacgggcttttctagccaaaaagttcagtgcttcaaatgctgtaccaaaggcgcctcagcccgcaaccaccaaaaaacctaccaaactccgaaaacccgcagcaggaaccttttccgttgaaaaagaatcaccgaagtcctctcctaaagcttcaccatccaaaccacctttctctcctaagggcaaaaacggcgctcttccgagtaataaatgggtccgagatccaaatgcgtattgcgatattcataaaatgaacggtcatgcaaccaaggattgcaaagctttgggaaggttgttggcggcgaagtatgcttcaggagaaatttccgaagtcgacatcacagcgatcgaattggctcagaccgcgaatgaaacattagagtcagaggaagcttcacctccgaacaagaaacagaaaagtgaaccagcccccgtaattcctaaaggtccgaagaaaatggtcaaagtgattatgggaggttcaaaactttttcgtgattctattagcgcgataaagcagcatgagagaagaactgtcactccgatcgcaaagaaaacaaaagcaagccgagctgactggcccgaaatatcctttactgaggaggaaaccagctacttggacaaacctcacaatgatgcccttgtaattacgttggatatagcgaactgtgaagtgcaaagagtactcatcgataccagaagctctgtggacctgatttttctcgataccctcgtgcgaatggggatctcaaaaaatgatataagagttgtcccaagcccactcgtctccttcacaggcgagacttcaatgtcacttggcacagtaacactccccggcactgcacaaggagttgttaagatgatcgaattcacagtattcgaccgactagccgcatacaacgtcattctcggaactccgtggcattacgagatgaaggccgtcccatcaacttatcatcagtgtgtcaaattcccaactccgatcggagtcaagcaaattcttgggagtcagcgcacttcgaggatgtgctacatgaccgggcataagctcaaaatcaaatagcaaccacagcttgaggcagctctgaacccgatcaaaaaagtcggagatgacctcgtggagaaagtggttatcaacgcagagcatccaaatcaacctgttaacattgggccaacctaggccaaatcaactccgatctgattcaatttctcgagaagaataaaagtacttttgcctggactatcagagaaatgaccggaatcagtacagaggtaatctcacacgagctgaacgtagatccaacctttaaaccggtcaaacagaaacgtcggaagcatgggccagatcgtgcataagctgtaaacgtcaaagttgttagacttctcaaagcaggtttaattcgagaagttaagtatcccgactggctcgcaaatccgtagtagtcaagaaaaagaatggcaagtggcgcgtttgtgtggactttactgacctcaataaagcttgcccaaaagattgctttccgctccctcacatcgatcgacctgtagagtcaactacagggcaagagatgctctcttttatggatgcattttctgggtacaatcaaatcatgatgaatccagatgaccaggaataaacatctttcatcaccgagcgcgagacgtattactacaaagtgatgcccttcggactaaaaaacgcgggtgcaacataccagcttttagtgaacataatgttcaaagatctcctcgggaaaaccatggaagtttatatcgacgatatgttggttaagacagccttttccgcttcgcacctcgatcattttcaacagtgtttcgatattctcaacgagttcggaatgaagctgaatccttcgaagtgcactttcgctgtcccttcgcgggagttcctcgggtatattgtcactgcgcggggaatcgaagcaaatccgaggcaaataaatgcgttcttatcatgtcttcacttcgcacgataagagaagttc

SEQ ID NO: 35475 - DNA, 2716 bp, Arabidopsis thaliana landsberg
atcaagtttgatcatgcatatttgttaaggcgcctctctcgtattgtctccaccacttttctacgtgttttgttttctccgatgttttactttgaaaaatctatttcaatcaagcaatatcgtgtaataaaagcaaggttctcgaacctgcgggtaaactttttattttgaataatttattttcaatcaagcattcttttgactttttgctttaaccaaatgtctctagtttcaaagaaaattaagaactcaaagatataaaaattccttttttattaagcttactttcttattaagcttaggaaaattactcaaaacctaaacaatctcaaagtcttaatttctctaaactcatatagtcaaccaacacatatatatagagattaataaaccaacacatactaggattagcattagataactcctaacatatatctttagatatctcctaaagatttaacataatccttcttattctttaatgacttattgctcaagtcatttcaaacttattccaaccacgttaagtttctatgtttgatgtatctttcgctttgttacaaggaatacaaaacaaatgttttgaatatgtttaatccctacaccacggggtgatgttttttcgaagtaacattagttaatactccctccgtctaagatgaattttttagaaatttcacattctttaagaaatattgtataaagacaattttaacctcttaatatactttaaaaataataataaatatttatctaattatttagtaagggtaaaacgggaaaacagttttaaaatttgcattggaaatataaaacttctatctttgtgggacaaatatttttcctagaaaatttatctttatgggacagagggagtatttatctttattaatgatacaagattaccaacgtacgtcttgatgaacaaagtcttattatataaaaatattacatatcgtataaaatacccaggaccgatatatgtgttataaatttgacggtgaatatggattcagtatcattttgtagtggaccaaaaaatggaagccaaatttggatctcaaatttctcttcattttcgtaccaattcatttcctttaaggaaactctatggctttccccttaccacattttccggtacgtctttaaatcatcttcgtttaaaggccactaatactttaaagggtgatgatcaagagagtattcgcaagttcaagaagttaccaacttccgaatggactcactacttccactcgtttgtcgtcgatgtctcggtgagtccatatatatatttggtgtttgtagatgtatagaagcttaagtgtgtttacatatcttactttgaatttaggaaatggatgcgcttaggaatgagatcgatgcactaaagccgaaagtgaaaaacacaatcatgtcttcccaaggcattgactcgacaaagaagagaatccttatgatatatttgtgggtgagccttgtccttgcacatcattttgaggaagagatctatgaaactctaaaagagggttttgtcaacatagagaagatgatggtcggtgaagatgatttgtacacaacttccatcatcttttgggttttcagaagatatggtcaccacatatcttcaggtaaaggagtctctctacctaagctttttgtgacttgtcttggcacttgtgtttttcttttatatacacgtgggacagttagggtttctctcgggtttaactcgttaaagaactccgttcaggcctcgcggtttaattcaaaacgcgggtcgttacactttttatcatcattgatgtttaactctaatatgttgtataacatgttgcgttttggtcaatagatttctttaggagattcaaagggaacgacggaaacttcaaaaaatctcttattggagatgccaagggtatgttgagcttttatgaagctgccaatatggcgacgacgaaagattatatactggacgaagcattgagcttcacatcgagccacttggagtcactagctgcaaatggggcgtgcccgcctcatatgtcaaggcgtatacgaaatgctctcaatgcatctcagcattggaacatggagatgctagtcgctgtggaatatatatcattctacgaaaaagaaaaagaccacaacgcgatgctactcaagttttctaagctcaatttcaagtttctacaactccaataccttcaagaactcaaagttcttacaaagtatgtaacatcttctcaattacttagctacgattctttgttaagagttattctaaccatctatgtttggatggaaggtggtacaaggaggtagattttgtatctaagttgccaccttacttcagagacagaatcgtcgaaaaccatttctttatacaaacgttgtttgtggagtcacaacactcacgtgcaaggattatgatggctaagtacttcattcttttagtaattcaagatgacaccttggacagatatgcgtcccttcctgaggctgaaagcctcgtaaacagcttgaataggtacactttatatattaacattccagataaagaatgatcatgatggtggtggtggtgatggtgatgataatggatgatttagtcgatgatgatgtacaggtgggctcctgatcatgccatggataacaacctgattatttgaaattcgtgtttacatttatattggatacatttgaagaggtcgaaaaa

SEQ ID NO: 35476 - DNA, 2225 bp, Arabidopsis thaliana landsberg
  unsure (1)..(2225): unsure at all n locations
tgcctttgctaacctacccctccgcctaacaaggcccagaggcgttggcgttttgcctacgctgccatctactctatgagggctatgctctctcttgttaaggagatagttcccgcaaggattgatcccaaaacctcagatgcctctctctctctctcctacacagccctcgagtccggtgagggagcaaagatcaactctatgcctctctcttacnnnnnnnnnnnnnnnnnnnnnnnnnnnnnnnnnnnnnnnnagggtaaggacttaccgggcatccaagcgctgggcggcgtggagggtgtcgccgcttcccttaggactaaccccaccaaagggatccacgggaatgagcaagaagtcagtagacgccgtgacctctttggctctaacacctaccataagccaccgcctaaaggacttctcttctttgtgtatgaagctttcaaagacctaaccatcttgatcttgttggtctgcgctattttctcccttggcttcggtatcaaagaacatggcatcaaagaaggttggtatgaaggcggaagcatctttgtagcagtcttcttggtcatagttgtctctgctctcagcaactttaggcaggagagacagttcgacaagctgtccaagataagcaataacatcaaagtggaagtccttcgggacagcaggcggcaacatatctccatctttgacgttgttgttggtgatgttgtcttcttgaagatcggagatcagattcccgctgatggtctgttcttggaagggcattcacttcaggtggacgagtctagtatgacaggagagagtgaccatcttgaagtggaccacaaggataatcccttcttgttctcagggacaaagatagtcgatgggtttgctcaaatgctcgttgtctctgtgggtatgagtacaacctggggacagacgatgagctccataaatcaagattccagcgagagaacacctttgcaagtccgtcttgacacgctgacctccaccatcggaaaaattggtcttacggtggcagcacttgttctggtagttctattagtccgttacttcactgggaacacagagaaagagggcaaaagagaatacaacgggagcaaaacacctgtggacactgtggtcaattccgttgtgcgaatcgtggcagctgcagtaaccattgtcgtagtagctatcccagaaggcttgccattggctgtgactctgacgctggcttactccatgaagagaatgatgtctgatcaagctatggtcagaaagctctcggcatgcgagacgatgggctcagcgacagtgatatgcacagacaaaacaggtactttaacactgaacgagatgaaggttaccaagttttggcttggccaagagtcaatccatgaagactctaccaaaatgatctcaccagacgttcttgatctgctttaccaaggcaccggtctgaacacaacgggaagtgtctgtgtgtcagactcaggatcaacgcctgagttctcaggcagtccaacagagaaggccctcttgtcttggactgtgctaaatctgggtatggatatggagtcagtaaagcagaaacatgaagttctccgcgttgaaactttcagttcagcaaagaaaagaagcggagttttggtccgaagaaaatctgacaatacagtccatgtacactggaaaggagccgctgaaatggtcctagctatgtgttctcactactacacaagcactgggtctgttgacttaatggactccaccgcaaagagcagaattcaggcaataatccaaggtatggcggccagtagcctcagatgcatagcattcgctcataaaatagcgtcaaatgactcggtattagaggaagatggcttgaccttgatgggaatagtgggtctgaaagatccttgtcgacctggtgtctcaaaagctgtggaaacttgcaaacttgcaggagtcaccattaagatgataacgggagataatgttttcactgcaaaagctatcgcttttgaatgcggaatcctcgaccacaatgacaaagatgaagaagatgctgttgtagaaggtgttcaattcagaaattatacggacgaagagagaatgcagaaagttgataagatccgggtcatggcaaggtcctctccctcagacaagcttctaatggtcaagtgtctgagacttaaaggccatgtggtagccgtcacaggggatggcacccg

SEQ ID NO: 35477 - DNA, 1469 bp, Arabidopsis thaliana landsberg
aaaaacaacgaataatcataaaatgttttctttatgtattgagtgttgtttaaaactagataagtcatttacttacctgtatgttgtccattgacaaaaccgtgaagaacatgagcagtactgttgatacgaagagacatatttttttcccaagccggatcttgttctttgagattaaccgtagtcatgtaccaaagaaaatcactttcgtcattgcttactactttttgatcaaacaattgtctcactgtagattctcattttcctttcaagaggacattgtctatgttctctggtctccatgaccatttttaaatcgaaggctcgttctcagcttcattcattttcttaaccatcacagaagtttgagtgttaatcagaaatatataaaaccataaaaaaaagccaatgtattaaggattataacttgaatgtaataatgatcactgttaagaaaaactgtaaaaaaaactttgaatgtaacaaagacaaaccttggcggtattataagactcagttttgcaataaggtaaaatgctcacataccaagccgggacatcataaaatgttccttggaaattgatttttgcatctgacgtttcattaacgtttccaatgaaacaacttgatctttcttctgtttgataaactgttgcctataataatatgtgttcaagaataaattcaagagtaacacatttaaatatattaactgaaaaaataagcagaaaatgagaattaccgtgactaaatttccaaaatcaacggtggaaatgtttccataagtgagagttttctccatagcatgaagaacatcatgaagctgtttcaggtgtccgtattttggttggttcaaattacctaataaatattcatcatgttagtactttttattttaaaatttttaacctaatttaaatatgaatatagtttttatatatttaccaaattcgtcaagaggagcattgtaatcatatgttgttgtgatgaacggaccacccgcggttctatcaaagttggtacgtccatgatactacaaaaacaaagataaacattcattatttttttttaatgatcattaatgtatgttcttactttatcaattaagttaaagtttcattattacttttttaacatgtagatattataatttttttttttacgatgtagtagttttggaaagctcctcatctttggaaatatcttgcaacagcaaaagcaacatcttcggttgttctttaaggatctttacctccctaattcttatacctatacaaatacagaataaatatatttttacagataagaataaataaaaactaaccatgagaaaacatctctcgatcaaggacatatcaatgaggtcatttataaaagtttggggtcaatatattcagattgcataaaattacgttcttattattagtaaagatattattcagcaataactaacgaaaactaccatcagt

SEQ ID NO: 35478 - DNA, 843 bp, Arabidopsis thaliana landsberg
tgaacggctacaaaatttccccaccaggtgccggcaggccacgcaattgttgtgccatgaataggggcttttgaatctccgtacatcggagaagcccgaacttctgctcgataacgtggatccattcaccgcttccagaggatcttccgccttgacaaacaacggagggcgtgtctcagagaaatccaaatacgatgtttcacgggtccttgctgatacgctcgcccgccttgttgctgtaattgttgacccgccatctcccgcagaaagcgagtgttgtcggccgtagcgttaaccaaggcagcgatagctcagctaatgttggagggactgggggtgggttcggagttgcttccctcccactggaggtccctgctccatcctgtgaacgagtcttggaaggcatctgaggcaacaaacatttagaagaatataatatgccaaagaaaaagccattccattttacattactaaaaagggtaatgttacagactcaagactcttacaacaagatacaatacctattatacaatagcattacctattatacaccagtacaacctacaataacactactctacttctacttctattacaccattagtcctgcttcccattgctcttggcggcctcgtcgtcaggtgtgggagtccatacgtcaaccatcctcatggaaggagggggttcaaaaaggtctaactccccacccatcgcgtgtcctgcaacacgggagggtccggcttccgcctcaatatggtgcacaggtgcactatggtgtaattgcgaatacagtacatggacttcctcatgtaacatattgcaatagacctgtaggtcgtcgac

SEQ ID NO: 35479 - DNA, 450 bp, Arabidopsis thaliana landsberg
aactttttcacatccagcctcaagcttaaggaaacctgcactcttctatagagtgccgaccatctttgccccaacgccatctcgaatacatcctaaggctccttcgtcaattccaccaaagagcatagctcctggctggtagccacaggatatcccatattcttgtatctccttcttctcagcctcgaacaattcttgacccaccaggttccgaaggtcaaagtccctttcttctgcaacagcatcaacaatctttttccctttgccaggcactgcaaccatgaccttctctgcagctgcagctgtctcttctgcatccatatccaaaagaagcttatcaatctctgacagagtactttcaagattgacagcttccgtggcagctgcatcttcggcaaaagtatcatcttctgaagtggcctccacacttgcaatatgtgctattttgga

SEQ ID NO: 35480 - DNA, 2718 bp, Arabidopsis thaliana landsberg
tttacacactacgtgtcgtttctacgtaatgccattgtcgtaatttctagagtttattcagggtgttttcgtcagtctagtcagatcaaatgtttccatcaaacgttagtactgtttcctttagattttcagattttgaagaagaaagatttcaaattaaaaaatctttcaaatttcttcaaggaggtgatcaaattgaacaatttgatctacaatggcttcttcttctgctgacaatcttaccgacaaaaacattgttttcagaaaactcaaatcaaaatctgagaacaaggtaatcaaatttttttctgaattcttctctttctttgagtatcgtcaatttgatattgtgtatgtttagatctgagagttgtttgactagatctttgattcatttatgctaattttggttttgatttgccaatttaggtctgcttcgattgtagtgcgaagaatccaacttgggcatcggttacatatgggattttcctctgcatcgattgttcagctactcaccggaatcttggtgttcatatcagcttcgtcaggtaaacaattcatcatctgatccaattcttcggcattactctagctcagattttggctaaggtttaagcttttgaggcctttataagggaattagcttaaaccgtgctcaggtgttcagaattgttggctaatgtgtagcattacgttgactttagtgtggttgaatcatcagattatgttttaaggtttcagaattattgacttcaaaatttcaccagtgtcttgaaattagactcattcaaattatcgattcattgactagataatattgaataatgccacattacgttctcaagatgctaccttttccgtttttgtttagatcaacgaatttagactcttggagcccggagcagctcaggacaatgatgtttggtggtaacaaccgtgctcaggttttcttcaagcaacatggatggactgatggtggcaaaattgaagctaagtatacttcaagagctgctgatttgtatcggcagattcttgctaaagaagttgcgaaagcgattgcggaagaaactaattctggtcttctgtcatctcccgttgctacttctcagttaccggaagtatctaatggggtttcttcttattctgtcaaggaagagttacctttttcgaaacatgaagctaccagtgctacttcttcgcctaaagcttctaatacagttgtgcctagtacgtttaagaaacctattggtgctaaaaggacaggaaaaactggtggtcttggtgcaaggaagcttactactaaggtaagtcttaggagtatttttttggagcatttacgtttttgttctcttgttcagattaaaagattggattttgtttttggtgaaatgtagccaaaagacaatctctatgagcagaaaccggaagaagttgcaccggttattcccgctgtatcatcaacaaataacggggaaagcaaatcatcagctggttcatcatttgcctctcggtttgagtacaatgacgacctgcaatctggaggacaaagcgttggtggtacacaagtgcttaaccatgttgctccaccaaagtcgtcaagcttcttttcggattttggaatggacagttcttttcccaagaaatcaagctccaactcttcaaaatctcaagtaaacacataatttctcagtaacaaaattaataaatcgaaattccaaacctcttctaaaccatttctttttctcttactaggttgaagaatcagatgaagcaagaaagaagttcacaaacgcaaagtccatatcttcagctcagtactttggggatcagaacaaaaacgctgatctggaatcaaaagctactcttcagaagtttgcagtaagtaacaacattcaccacaatctcaaaggaacatataacaacatcttccgattctaatgccattgttggaaattacagggctcagcatctatctcaagcgctgatttttacggtcacgaccaagatgattccaatattgatataacagctagtgatctcattaaccgactttctttccaggtaaaagatccatacacctgaatctctggttcttcttcacatttttaaccttttgacgaatttttgatcaggcgcaacaagatctatcgtcgctggtgaacatagcaggagaaacaaagaagaagcttggaactttggcttctggtatcttcagtgatattcaagacagaatgctgtaagaagaccacgagtctctcacatgtttttgatattgacagagaaaaaaaagtaagaaagaagctttgtcggaaaacttccaatgaggttcacgtttctctgtttttattttatagaacttttttttgaaaactattgagacgtggctattgttgttatcatcaaaatctatattgatactattatactcgatatgttatagactttattaaaaaaacctttgtttgtttgcagaaagtggatttttaatcaaatttaattgtgatgattacaatgtcaattggttatgcaagatattaattaatatgtttaagatttttcacttttaataagtaaaataaaatacgtcaaacaaatttcctaaagataatgccaaaaggttaaaatatagaaattaaacttaaatatattaaaagttgacttaaaaatgcaatgttgaccaccgacctaggggaaaacaaatttaccgtatctgggata

SEQ ID NO: 35481 - DNA, 1352 bp, Arabidopsis thaliana landsberg
tagctatgacacagcaagagctatagacatagagagagagagaaagatgatgatcagtgaagttaggctaaacccactttctatttatgtataattaggtcaatcacatcaccaatctcctcctccaattctcctcctctccttccaaattctagggttttgtttgtatctcaccccctttctcaattccctagggaaactgtgaatttcatcaaattccattattttttggtcacacccttaaagagatctgagagttctaaagatgatgacagatttatctctcacgagagatgaagatgaagaagaagcaaagcccttagcagaagaagaaggagcgcgtgaagtagcagacagagaacacatgttcgacaaagtggtaacaccaagcgacgtcggaaaactcaacagactcgtgatccctaaacaacacgctgagaggtatttccctttagactcctcaaacaaccaaaacggcacgcttttgaacttccaagacagaaacggcaagatgtggagattccgttactcgtattggaactctagccagagctacgttatgaccaaaggatggagccgtttcgtcaaagagaaaaagctcgatgcaggagacattgtctctttccaacgaggcatcggagatgagtcagaaagatccaaactttacatagattggaggcatagacccgacatgagcctcgttcaagcacatcagtttggtaattttggtttcaatttcaatttcccgaccacttctcaatattccaacagatttcatccattgccagaatataactccgtcccgattcaccggggcttaaacatcggaaatcaccaacgttcctattataacacccagcgtcaagagttcgtagggtatggttatgggaatttagctggaaggtgttactacacgggatcaccgttggatcataggaacattgttggatcagagccgttggttatagactcagtccctgtggttcccgggagattaactccggtgatgttaccgccgcttcctccgcctccttctacggcgggaaagagactaaggctctttggggtgaatatggaatgtggcaatgactataatcaacaagaagagtcatggttggtgccacgtggcgaaattggagcatcttcttcttcttcttcagctctacgactaaatttatcgactgatcatgatgatgataatgatgatggtgatgatggcgatgatgatcaatttgctaagaaagggaagtcttcactttctctcaatttcaatccatgagaaggttcatcatctttctggttttgaatctttttttatatggttaataataatttttttaagggtttagatt

SEQ ID NO: 35482 - DNA, 2000 bp, Arabidopsis thaliana landsberg
cacttctattcttggattaatctttgacactgtggattctcataatgcagaggaacccccaccatctggtacggatcttctagtttctatcaataatcagagtactcaagaactcatcatctcgaatatgtattaacgtctatattgtatgtttcaattcagaaatcagtaaactctggtattttgaagatgaaccggtccctaagtctcacatggataaatttacatcctggtacgagaattaccgaagtgaaatgtcccaagcgatgatggaaactgataaggttaagaggaatcaattaaccaatgaagttatccagaggtacaagcaggtaagctctcgctcaatccaatgcaaagatctgaccaatagatttcatgaatcattttttgttgattagtccatataatgcttcttaacacaactcatcggttgaacggtttcttctgtctgtatcaggatttctatggcgctgcagggtttgaagacagcaataaaagtctggaagaactctacccccaagccttggcactctacaagatcgtttacgattatgccattcatgcaggtgttgcgaaatgtgcatttgtctggaaggtagcaggaccggtactgtgcagattctatctaaataagaaaatgcaggagaaatgtttagtgtgtgcaccatctgtgcttaaagagctttggggttgaagaatacaagcctttgttgttgctacatgtctaataataagaagcgtatgaggcaagtaagttaactaataggtgccaagatgtgtgtgttgtagtgccttttggtttggttttaatgtagatttctcctctggtgaatattttttgtgaatcttttgcctatgaaatgaataaaaatatgttacataacgaagcttttctattaacgaagctcttacctctgcaccagtgttttttgtaagattgaaatttgtaaaataaatgttgagaattttaaacaaaattttgatcgcgagattgtttgtttacttggcgtttaaagcgacggcttcaaagctatggcaactttgtaattttggtgactcgtgttagggtattttggtaaattccaaaataaataacaaacggctatattgtgtagcctgtataaaaaatcttcttcaagtcaaatccataaaatcgattcacaggaaaaaagctttggactttatttttgtttttcccgtgtgttgtcagatcatcaacgtcgcatcaacagcgcaatgaagaaatttgaaaaattgagaacagttccttcttctcactgggtacttgcttatttgtatgagaaccctaaagagacaactgtttttctcgttgggaaaaatgatgaccaccactatggattataacagcagcgatcaaggtttttcgtggtcagaaattgctcttctgggtagtgttgaaacaatgttggagaaagtctacgggaaacacaatcatcatcctccgataaaagtggagacaagacggagactttcttcgatttctgaggaattggctttggaaacactcattaaagttctcaatatgccgaatgtgaagacccgggatgggataatcatatattttcttaacgatgcggtcaccgttgatggctctcctcgcctgtggtctggcgagtctccagtacactttcctagaactcccgggaaaaaaagttgcagggcttctcaaggtcagtgttaggatagaatctgttcacatactttgggtttttttttttccttcttgtgtgtttagtagtgaaattctcttcttgttgaccgcaatattatgactatggttgattgtttgtagcagaggtgtctcttgatcgtgaagatccgtctcctaagttcttgagaggagatgaaaatggaaaatctaagcacatttctcttttattagctttggggggaactttgaattcaagaaggcctttttgttgcttacctattcttgaagggatttttaggcctgagatttttccatacttttatat

SEQ ID NO: 35483 - DNA, 3498 bp, Arabidopsis thaliana landsberg
  unsure (1)..(3498): unsure at all n locations
agaacagagttcccgcggaggaagaaccccgatggagacaagacggagaagctcagcttcggaaataacagacatatggttacctgcaaagggtaactgactgttggggtcgattgcggggatcactgcagaagacgagttcgcaattttcctcttgggcgccatcttgcttctcactggcgaacagagtaggagacgagtggcagagaagattcagatgcggaaatgcaagaactagggcacggaaagcaaaggcggctaaaagcgcaactcttatgggatactcttaagccagataccgcttcaaaaagtgcccagtcatcacccggcggttatttccgaaacctcagcatgccacatggacatctggcagttatttccgaaaaagtcggcgtgccactcatcactcggatattatctcaaaataaccgcgcggctggctagtactcagcgttgactctaagacgctgacttcgtattcaatcgctcggcattacttctaaaatgccgatgccgactttcaatcactcggcgttacctctaaaacgctgaccacgtgttcaatcgctcggcattacttctaaaatgccgacgccgaccttcaatcactcggcgtcgcctctaaaacgctgaccacgtgttcaatcgctcggcattacttctaaaatgccgatgccgaccttcaaatcactcggtgttgcttctaaaacgccgaccacgtattcaatcgctcggcattacttctaaaatgtcgatgccgaccttcaatcactcggcgttgtttctaaaacgccgaccacgtgttcaatcgctcggcattacttctaaaatgccgatgccgaccttcaatcactcggcgtcgcctctaaaacgccgaccacgtgttcaatcgctcggcattacttctaaaatgccgatgccgaccttcaatcactcggcgttgcttctaaaacgtcgaccacgtattcaatcgctcggcattacttctaaaatgccgatgccgaccttcaatcactcggtgttgtttctaaaacgccgaccacgtgttcaatcgctcggcattacttctaaaaatgccgacgccgactttcaatcactcggcgtgtcctttaacacgccgatcacgtgttcaaacgctcagcattacttctaaaatgccgacgccgacattcaatcactcggcgttatttctaaaatgccggccccatattttgtcgcttggcattacttctaaaatgccggtgccgaccttctatcattcggcattgcctctaaaacgctggtcttgtgttcgattgctcagtgttacttctaaaacgctgatgtcaatcttcacatcgctcggcgttgtttctactatatcaaaagaatcagttcaacattcagcaaaagcaatgacaagtcatcgagaaggggagataaaacgacagttcttcattaaagggaagttaataagtttacaaaccaactcttcgcgagttggtgcttccctacttctactctacattactactactactaaactacactatactactctacattactactacattattctaactacactatactaatatctaaagaccagtggcgtttaggccctggccttgctgctgctgccaccgccgccgcccctggtgctgcccttgctgtgccgcctctgatgctgcccttgctcccgtcgccgccgctgctgccccacgccgtgccgctgccgtcaccgtcgccgtcgccaccgtcgtcgtcgtcgccgtcgtcgtcgtcatcatcctcgtcctcgccgccgtccgagtcctcctcatccgaggagtactccgactcatccgagccctcgagcccggagcgctcgatggcccagatgtacgtccagacttccgcggcaatcccctgggagtcgtctgaatcatcagacgacgccgggggagagacgggagccggagacccctcggactcggaggagaactcctcctccgagtattccgagtcgccgaagtcctcagacggaggagtcagctcgcgtttgcgtttgttactcttgcccatggtggaaatgaagggagaagaagaaagcaagcagcagagagcagcaagagatgtgaagaaaccggagaggcaaaggcactatttatagaagaagaaggcaaccgttcacctcctaccacagtcactgaacagtcgcaaaaaattcaatacacacttcaaaccgtctgaagatacatctantgtgacgccgcttcacgcaacgcaacacccattgggactccagtcaactgcgcgagcgatatgattacacccgcggtcacatcaaattactacccagaagcagctggctaaaacactcagcgtaccaagccgtcccttgcccacacccattggggggggacgcccaggaattatcagtatatttttcaaaactgtcacatccgtgcaaggcatgcaatgaatacctcaagacaaaaatgagatatcagtaaggatcagaggaaagccaaatatagccggggaagtacaaaatttgaccgacagaagcgacgtgaagactagccagggaacgttcatcaaatgtccaatcagtcgcagagcaaataaattgcaccacctagcaagatatgggcggatcacgaactcggctgcaaaagacaaaatacatgctgacctctgaagcataatattgatgacataatgctgacctctaaagcattcagaaaaaagaaaggattattctcagcagaaggacacgggataaaagaccttcgagcggattattttcaaaaatccactcaaagctcgggggctacacccattgggtgcaccttcggtgaccgnnatgaatcatctaccccgagaggcagaatgctaacctctaaagcatagagcgaaactaagacaaggctgacttctgaaaaagcacaaagggaagataaaagtaatttttgagaagacttaagatgaagacctttgagtggattatttacaaaaatccactcaaagctcgggggctacacccattttgtagcaccttgagggtgttacaaaaagtactcacgccaggacgccaggacgtagggtgttacgcatctcaaagcggcccgaacctgtaaacattgcctattttccctcgtgcatctagcacgaaccattttgctacagtcggcgacaccatcctactcctaaaaacacctcgaggggcaaccccgggtgtgcggtcggacccaaaacaccgacactacggatcctcgggttccgaggaagatgacgagcnnnnnnnnnnnnnnnnnnnnnnngggctcggtaaccccggtgccatgcgggacttcatgaccgcatgcgactactgcctctccgatnnnnnnnnnnnnnnnnnnnnnnnnnnngacgaggactgcggcccaagtcgtgaatgtttcacgtcgatctagggggtctggcgaagcgaacatcttggtatacggaaacggcgatcccctaggcctggcccgcgttgacatatttggg

SEQ ID NO: 35484 - DNA, 1085 bp, Arabidopsis thaliana landsberg
caacagttctatccggctgaaccgcagtaatcattcaaatccttaataatgacctccaataaattactaaaattatttagaataagtgatgttaattaaaagactaaaaagtagagatggcccatttggatactaaaggaagaaaaggttgcagaagaaaagtcacacgcttccaaagttcctaaccatcaaaaccgcctgcgaccctcccatgtgctttctctctctccctctagctcactaccaaatttgtgttagggatgctcgtgattatttcaaaactttgcagctacattttaaaatctttactttttttcttctaaatacctccaatatagtagtagaaatcatcacaagaaagaaaagaatccgacctttttttcttcttgctttggtggaggaatccaactttttgtgaaatttaaccattgataaaaacctaaaatttttgaaaatttaaaattttgttgaaaaatcaaagtttacctctatatatgtgtaacaataaattatgaaacgaatcataaaaataaatatgaaagttaatgtcaaacgtgtaagaacaggtgaacaagccaacaaatgtaacaaaacattcaatgatgtttgggtttatatactccaataactaccaaaataaccatttcttttttctttttcttaaaaccatgattaaaagtacatgcgcgagcgcccatatgttttgctgcaaaataataaattcaccattgaaaccctaaatataactttttttttgcagagttttttttttaaagtaaagaaagatcaaaaagtaaaaactaaataaaaggtagggaaaacagttaaagcagtaaatgaacattctataaattccacttcaaccatcaaccttcttcactcccatcaaagcaaaactatctttctccttctcattcctttttctctcactctcctccattaaagctctgcactttctcaaagagaatgttcatgtaatataacatcttcctttcaaagtctttcttttactgttttttttcttctatctttctaataaccaataaaggtataattcttgtttgaaatttgttctattgcagggg

SEQ ID NO: 35485 - DNA, 4119 bp, Arabidopsis thaliana landsberg
gtacttcttcttcaatcaattcttatgtgtatcggtagccaaatccttctctccatatgatcaaggaaaagattttgacatcgtagggtttacaaattgagagaagaaacaggaagagagataagcgacaagatctagcaaacttttctgaacagggcagaaaatgtaagagatctataaaactgaaacgacttggtatacatttaaacttctaaccaagagtccgaaccaatctatgaggtaagttttcttccttgaagacacaacactgtgcagtcagcttcttatataaggaaccacgcaccataaactggacatcacaagtataaaactcgtcgtagagtgtaaaaagttgcgtaatttgttcaaacatcccaggagcttcgaggtttgtaggaccatcctcgtcagcatatatgtccatctccttcaaactaggaaaatagtccaagaaatgttttatcatttgcatctctttctttgtccctcgaaacccatggatctctaacatatttactggacaagatgtcagcgaacgacctttgtcctcccaaggaacgcagtcacaagcatccccgcatttatctgtgacatggtgcaagagtccctgaaagcataacgaaacaataagagattcaaagtatgaactttatctctgtatatgtttggcaaatgatttgaatttatacctcaatgagtagaaactctaaatgtggacaattccttagaagaactggcattgcttgccatcctcgaccttcagtacttttaatagctaacgatttgaggtttttgaacactggcattgactcacagcatagagaaagcacctaagaacaggataaaacacaactaaatcacatatgaaaagttaaaacatcaactaagaaccgatcgattgagttacaaatcaaaagatgcctaggaagtagtctggttaatatgaccattgtgctccaggaattgagaccaaggcctaatttctttctgttatatcctcgagaccaggggaataaaaaaattaaaagtgagaaaagaaaaaagaaaaactgacctcaagagtattggcagacaagtctagacactgaacatttcgtatgccattcatgagcttccccacatttggaaaccggagaacaacctcgtcattgttatttggctctcttgctcgtctgatttgaccctcagttaccccaaggttgatcctagcctcaagtaagttttccatgttaactaaggggtagtctttagcaacatacttaaagtgactaaagtaaacaagactaggtgtatcaaatgaaatactgcctgaataaatattggaactcattgttagggtcttgaggcttggatttgacacggtgacatccgtaaaggtcgtgaaccagaatgcatcaacaatgactaattcctctagcgcaggtaaagctctaagaaacaacaaatcgccataaaacccaacataatcaagttcgagagttttaagcattggtaagaaaatctccccagccaaccaaccaacagttttttcccgttggccaatacaaagtctgtgtaatttcaacctaactagattcttgctctcgaaacgttttgaagacaacagaaagtattcatccatacacaaatcgattgacagatcaagttcggaaacaccacgtgccaacacattacttatccaaccatcaactcggtctgaatcaagcttaaatagaaacttgatggagactttcttaaccggacaattaccttgcaatgccaatattctacccacaaaatctaggaagctctgtcgaatttcgttcctgtcacgcttaccctcttcgggatgcagaaagatagagtcatcaatgtgaagattagagacaaaagcaagcagattgcgccacctcttggagagaaccgatgtcaaagcagcctcctttgttgtaaggaaggacaatatatggcaaataagctcgtctggtatatttcttaagagatccatcttctctacacgaaacaaagagagtataaactggtaaactgagaacaggaacttgtaacttcaatagagggaaacttggagttcacaacgcaaataggaatcttatggactaaggaacccccaaaaaaataatcagtaaaacctcgaaacctaccttgttacaaaagctttatccaagacctaatatttaggggtttcagtgaaaaagagagttgggatttacttaatggcctgcgtttctggctctcaaacgaagaatataaagaaaatactcaagctttcaggtttcgacaagacatgcaaaggaatcgaaaaattcaatttttaagttttcatgttctatttcatccagttcttaaaaatcaccggtttaatttcgataaaccagagcaaatagggatctgccccaaaggaaacgtgtgaactaagaaaccccaaatacaggatgagttaacttcgaaacctactgatgtagcatttctttcaattaattatcgaaccacaatttgcaatttaatcaactcaccaagaatacacacacttgcttaatctaagctaacaagatgattttgagtattctaaatcttagtaacaatgcattatcaaacaaacaatgcaaaacaagataagagaaagcaagaaacaaaagaccaacaagtttcgaaagtaaacaaagcgggaaattaacaaattactaagcgaaaactaaagacgaattctcgggttaaggtaatcgattagaaatgataaagagatggattatggagcaacaaacaacttctaacaagcaatgatccttaggccatagaacactagactaatacatttccatgatattgatccctttactaatcaatcaatcatcaacaatttccataggcaatcaaatgatcaataagcataaataacaagtctatctagccactaatcaccctaatcaacaatttccaaaggtaaggtatgaaaagcacttaaagattttggttcgggaatttcatcgaacactttccgggcatgaaattcctagtatctaaatcaacatgatcaatgttgatctagccttaaaagcaaccaataagtaagaatcttaagtaatctagccctaaactccataacccaacatctaaaccatcctaatctaccctaaccaaagaactctaaaagactactcactcatgatcatgatcatacaaaggaattggtttgatatttgtaaagccatgatcattagaaaatatatgagaaatttaaaagaaatacttgatatagaaacttaaaaactcaagattcatacaaaaacctaagataaagaaccttaaagagaagttttgatccctaaacaaaaagctcccttctctaaaactagattaagagtatttatagtaatgctagaacaaaccgggttttgacccggttaaggaaggcaatcgaccaagcaatagatcacttggtagattcaatatcgtccgcaacattaatccttgaccagtagaacatgcaatcgaccactttggtagattcatattcctccgtagctctagtcctgacgaatcaaacacgcaatcgaccagtttggtagattcatattcctccgtagctctggtcctgaccaatcgcccattttggtagattcaaatttcctctagagctctggtcctgaccagtcgaccaagcaatcgaccacttgatctattgttctacacttctcctctttggtcactttgcattctcttagctcctttgtttgctccatttgcttcgaagactctaaactccactcatgtacctaagaaaaccaaatgcaaatgcaaatgcaatactatatgcgcaaaatatgaattcaaagcaacaaaaaatttaagagaaaagaggttttaaaacaaccaaaaacactagatatcagtgattaaagctaaatattatcctagaggtacacttttggaaggaagcacagctcggccgcagaccgagtcatgcgtggagaagcatatatcaaggtacttttcttattaaacaaggtctaaaatggcaagtaggtgatgggaataccatacgaatatggcatgatcaatggctggataatccggcaagaccaaacttaacaaactactagtactaaaccatatttaaaa

SEQ ID NO: 35486 - DNA, 701 bp, Arabidopsis thaliana landsberg
tgggcctgtcgtgccggaccgcacccgatggcccaccagcgcaccacaggtcattttctgggtgcggggcgggggccatgcgcggagtaggccaaagtcgcggtgtgggcgggccgaaccatagcggttgtcgatagggatggcaaacggatatatagtgcctgtttgttttggcttttcgcagcttttggccatcaaaagctgctgcgaactgtcaaacactcaattttttagccagcttctataaaattcgtttggataaaaaacattcaaaatcaacataaacatataatcggttgagtcgtcgcaatagcgtcactttatagatcctgagtcacatggataattttatcttcatccacacgtaatcgtaatgatactcagattctctacacagccagattctcttcacagccagattttcagaaaagctggtcagaaaaaagctgaaccaaacaggcccatagacagatgagtgaaatacccagtcttctggtggtgtgagcttcgctttaatttgcaccttgtcccttcagttaccaaagcactacatatgactagatgaagtgaagaccttagatatacaatttaaacaagaaagagcctcaagcaccacaataataaagaggcaaaacatactaaagacttgcctatgccgtcattgttgagagagccaccgaggcttcaagtctcttccaact

SEQ ID NO: 35487 - DNA, 1833 bp, Arabidopsis thaliana landsberg
ttatgcacaccaaaataactttatatcttctttattaaattccacttgtgtatatatagctaatattttgcaaccaaacgcaataatttcttaccatttttttcaatgatggaagaaatagccaataatctgaatatcgatcatataaagcatttgagttcttttgatatcaattagtattaatatatcaatattcatatatgtaaatcttactcattaatcaagactttatcaatctcacaacttcaaatctattaactactttacaatttacacacatactataatcaatatgatatatacaattatgaaatcttttactcagagaaatattgcatatcattttcatatatttaaataaaacacaaggcttatcttgtatatcaatattataattttttttttttgatcaattcgataatttttaatttataaatacccaaaataattttagattataattcataaactaaatattaagtttaaaactaaaatatcataatcacaatatttatgatattttttattgaatgtattataaaacaatttaatattatattaatatatattagttatagacatatatttcactacattcatttcacccacgcatcgcgtgggacattttctagttatgttatatatatgagtgtttttgttccatgatctaaatgatgacatttttttttttttttttatctaatgcctatctttaaaatattttctggatccaccactaacctcaattgcattcaaaaacgaccaaattggtgtatcatcttcggaaaacacctaaaatatatagaatatcggttcaaaagaatgacctggacctcttttttactcattcacccaagcgaactttgggcatgtttctatacccaatcgaaaatatatcgaacagccaaaaaaacgaatttttagatacaacatatatttgaaaaagttcttatttacaaatcattggtgaaaaatttagacactactcgacacaaatgcatgagtaggtttacccatttgttcacacccaatgaacacgttataaataacaattttaatatatctgagcgctgagtactataaatactgtcatgtgttagccaaaaagaacataacacaaaatcctcttctcttctttaataacttttagaaacacaaataaaagtttaattacttttaagcccaacaaaaatgggttatgctaaatcagccatgctgatcttcttactagcattggtcatcgcatcttgtgccacggccatggacatgtccgttgtttcctccaacgataaccaccacgtgaccgccggtcccggccgccgtcagggtattttcgacgctgaagccaccttgatgttcgagtcatgtatggtcaaacatgggaaagtgtacgactccgttgccgagaaggaacggcgtttaactatttttgaggacaacctccgttttatcactaaccggaacgctgagaatctcagttaccggcttggtttgaatcggtttgcggatttatctctccatgaatacggagaaatttgccatggggctgatccaagacctcctaggaaccacgtcttcatgactagcagcaaccgatacaagactagtgatggtgatgttcttcctaagtcctgtgactggagaaacgaaggcgcagtgactgaagtcaaagatcaaggcctttgcagtaagtgtactctggtctaactattctttatttattttaattatagtaaatagtagaattattgcaaatttattttaaaacaccttttaataaaaaaaaatatacacgtctttgatgcatgtttttttctggtgtgagggagttgt

SEQ ID NO: 35488 - DNA, 538 bp, Arabidopsis thaliana landsberg
  unsure (1)..(538): unsure at all n locations
agctatcagcttaccattttcacagctgacacgaatccgcgagatcggtagcgattttccgatctaggcaatttgtcgaccgcttggggaatatcgcgctgctagcttcgtcttcacccgatttttttggatttcttgatgacgcataaaacgatgacgagatcgtgtttggagcgagctggtgaggtgggggtcgaacaaaggatgacgggttcgacgactcgacggtaaacgcgagcacgcacgaaacccgacgacgaggacctaggatgtgcgacacacgacacgcaattagtctgtcgtgcgaccgagcgatgacgacgaacatagagcttcgagcgcggccaacaggtagcttggcgcacggcgatgggcggntaaagagtaggacgcacgccggcgagttgagcgacggcagggagctcaacgcgcggcaccaggagagctcggccagccatagagcagggaacaagcgctggagctgggcgcgacgtacgtgtgcagagggctcgacgacggccggcagagggagcctggg

SEQ ID NO: 35489 - DNA, 2039 bp, Arabidopsis thaliana landsberg
ctctccggtgaggttattacttttgcatgtgaagctcctcgagttgagggagctgcgtaatggaggaagggatacttccctcgaacttgttatgatcaagaaatagtcgcttgagctttgacatgtccttgaaaaaatcgtcacggatctctccggagaagctgttgttagagagcatgagagattttaggccacggagtttaaagaaatgcgggagaggaccggagaggaggttgttgtcaagcctgatcgtctttagatttgggagatcctttaaatcatccacggtgatggttcctgagagaccgagacgtgtgacgtgaatgcctgagactgttagacccttttggcaatagatcccaaaccatttcccactgcaaggatctgtcccttctctccatgaatttaggtcccctttggttatcttcaccgagtttttgaaccgcacaagcggttcggactcgctcacatactgcaaagaaggggagattgagaaagataagaggaggatgaggagaaagaaaccgggattcagaacagcagcagccatggattgaagagaggagatgctctttttctttttcttgttcttgttgggatgttacgtcttaaaacaaggacaatgtgcttgacaatgatgatgatgctgtatagttagttgaaaggtgagggtgtgtttagattgccttagttgctccaaactttggacattgtttgactgtgacagatgagaaggaaagggtggcattttttctttgattgaattagttgtcaaagtttagacttttttttaagtccaaaaatagtgtttttgttataatttttgtaatcctatttgcttgtttctgagagctttgagaattttttgataaggatcttgaagtgtaatcttatacatttgcatctctatctatttctttttcaacaggtaaatgtctcatcactgttatagaaactgaaataattacaattactaaatttagtatcttaaaattcggacaaatcgaataggtttccagtcgattcatatgtctcgggttatttgcgcacatttaggcagcatcaaattcatgcttttaaggaaaaatgcttagtgcttaggcagaatccaaacgataacacatgaactatttagaagtaactctaaaattttcttttaatcgatcaaagacaaattccaagagttagaatctgttctataaaatatggtcgaaaccaaaccccggtatggttacgataacgacaatacgtctatgatacccagagctttggttttgtaccaaaataaatactaacttacacctcctgccgctaaaacttcaatgtgtgttgtagaaagctatcaaaggctggctttgatttggctcaagccctttctctgaacttttctgttgattgatgcaacagctgtaacttgaaaacttagatcattgcaaaaaggatttcattccacgtatcaggaacaccgggcaagcaccaatggaggcaatcctgaactccccgtgaagccgagatactgaaccgtgatatgtgaccttcgtctctaatatgagataaggctgttatgtctaaaagcttaacccctgtacctttcactgcacgacccgcgctgtagtcgcttgactcctcttgcaaaacttctttcccgatagacattggggttgtgttattgcagctccctccggtgttccattccccacccacgaaatgtctcggtgaaaggcttctgtagaatgccttgagaccgggatggagagggagttgtgagttaacccaactaactgtgctgtggattgtgaaattcttggcgttcccaagagcagctaacttcctgttagtgttgggaacgccattaacatgcatcacccatttgttcccgttgagcttcccgcggttccaatggtgacctgtgttcattaccaatacgtcgatcttttgaaggtattggcgtaaaaacgctggtgggcgatcaagatgcatagcgtgttcagttgcggggtcagtgatgttgagcggttctatgtcgcacagtgtaaatg

SEQ ID NO: 35490 - DNA, 5244 bp, Arabidopsis thaliana landsberg
gattgattctgtttgtcgtgagttgcttaattgcttaaatcttattggattcagttgtttttggattacttaatcgaaacatttaaaaaagatcttgataaaccattgtgaaggcctgaaggttattcataaccctaactaatgtagaggagataacgagtgtgacacaaagtctgattgagacactgaaaaaagcaatcaatttcgtgtattttcatatgttcaatatttgatttatgttatatgcatgatttctcctttgatagttaattattttgttttcggtttcaaaataatcttccagaaaaaaaaaatagcatatgttcctatagatttgtgttagataaggcggttgtgtaacttttaaagtcttgaaacaagactgtacatctcagttcctgtacacttcttcaaacccttcccttcccgtatcttttcattaaactggttgtagattttattttatcctactactaaattattgaaagaagccacatgccgtcatccaacaattagtatggaaatttccaactgtcataataatttttagtctgcttcatgatttcatagaaatcattaaagatcatggattatagtagtattaattctaagagttgacaagataaagtgataatttgcaaagacttccatcaatcgtgtttagtttatgtctgcaagcctggaactagtcctaaatacatctggattaagagagaaaacaaaagacttgcctaagttgactttgtaatggaactggtctttaaactctagttacatcttataaataaaaatgacaaatttgggagcagaaaaattcatcatttacgagttgaaaccatttatttgcataccctctcatttgctttctcccttcattccaaagaaacccatatgggactacgtcgtccttctgataatggttttaagccacctccttatttttctacatctgaacctacatgtcgtttgtccgatccggctcaaccccacatgctttgccggcggagaccacgatctcatggtccactttctatctgcttttgcaagcatttggagggcagtatatactattactactgtgctacttgcaatttggaattccacaaaatgtgtcacttctttttgccggagataagacacccttttcacccctcccaccctctcactctcatttccttaaaacctgaccttgatctttataagctagccagccgctcgaattggatttattccttttcagatttggaatatgacgatgagcacaaagacgatgttgctgctgctgatgacgaggatgacgatgctgataataatgatgttgttgctgctgctgctgatgatgacgatgctgctgatgttgacaatgatgctgatgacgacgatgctaatgatgacgatgatgatgatgatgatgttgatgatgatgatgatgataatgatgatgatgatgacgacgatgatgatgatgatgatgatgatgatgatgatgaccacaataatgattattggaaatgggctttgggactcagcatcaacaacgatgatggtgcctctaaaaatgaattggtatacaaagttgatgatgactacgaagaaagcgtcaacagtaataccgtcgctagtagtgttagtgatgacaacgatggtgatggtgatggtgatggcgatggtgatggtgatggtgatggtgatggtgatggtgatggtgatggtgcctgtttatctggtggaaatcacctgaaatgcaaatgttgtcagaaacgttttgaagatatatactatcattgttctatctgcaacttctatcttaatttcacttgctcgatgagaccaccacctcccactatcactcacatcaaaagtcatgagcacaccctcaccctcttccctatacgacttcctttaccttgtgatgtttgtgggttgtctctcaatgacgctcatgatccagtttacgcttgtcttccttgtaactacatggttcatagagcttgtattaatctacctcgtgtcattaagatcacccgccaccaacaccgcctgtctctcatttcctctcttatttccggtgatttttcttgtggagtttgtcgtaaaaccatcgacattagctacggacattattcttgcattaagggatgttgttatggtgcccattcaaaatgtgcaacgagaaaagaggtttgggatggaaaagatcttgaaggagtgcctgaagaacccgaggaatatatggagtcatttgttaggattgatgaggagacaattcaacatttcagccatgagcattatctaaagctttatgaaaagaacaatatttgtgagaaagacaaggtatgtgaggcatgcacccttccagtaatgatctcacagagatattatggttgtatgaagtgtgattttgttctcgatgaagcatgtgcatttctttctcgcaaaaaataccacccattacataaacacccacttacgctccacgctttcccacttggtcggatctccgggttcggtcatctgtaccactcggcaagcaacatattcatatgtgatggttgcagccgaattggttgtggttttgtgtacaaatgcggtgaacaagattgtacatttctcgtagacgtcaactgcgcttctcttgcagatcctttcattcatggttgtcatccacatgatctctttttcaatttgacggaaggtaaatgcatggggtgttcaagtgattattgttcatcctattacctagaatgcattaaatgcacttcttttttgggtattagatgtgctactttgcctactaaagcacactacaaatacgataggcatccactcaccctatgctacggtgatgaagatacaacaagtggccaatattggtgtgagatatgtgaatcaaaattagatgcaagcaaatggttttatacatgtgaattttgcagcatcactctccatgtcaactgtttacaagggaaagatatgtacatgaagccccactacatcttcaaattggtttctggtagatatgaagttgaaattgctcgaaatgatggtaacactcggccactttgctctcaatgtaatcttctttgtgcacagactttggtattcaagcagataggcagatacgaaagttgttgtactcttgattgtctggcaaattacatttggaaattagcattggccaaaagagaaaggtgagagggcaccttgacaaagaaatctaatgctagacgagatgacaagaaatgcgtaacgtctgagtctgatagagctaaggtatttcaatttcaagaatttgtttttaagtcttttggtttccgctttgtttgttttcactgttatgttcagccgttcaggtttatttgtgtgtttaaactaaattttccagaataataagaatgcatttgtttgcatatatagacttgtgtcggaacgatgagagtattttcactattttgggaatcgaaagcggcagcaaagaaaaagaaaaataaaagtctctgaacatgtcaatgtatattaacatacagtatgtatagatcgaagctaattggtattattacaagccaattagttgattttaagaaacatataactcggcttgtccgtcaatgaaaagactcatgaactcttctccatccacagtttctttctcaataaggagctgtgcaagcttgtgtaggatatcaatttgtgttgttatgatctctttcgctctcacgtacgccttctcaacgagctctctcacttccgcatcaaccacatccgctgttgccatcgagtaatccttctgcgatgacatctgcaaacaaaacatgttttgagagctggaaacaacacaataaattatgaaaacctgagtatcgagttttatatacttacactttgacccaagaaagggtttcctcctgctccaccaacagcaacttgtccaatctttttgctgaacccaaatctctcaatcatttgacgtgccacacgagacacctgcatgaaatcatttgatgctccagtcgtcacattctcatccccaaagatcacctcttctgcaaccctgacatagccaacacaacagagatagagatggtttaacataattaaacccttctctgtatattcaaagactggcttttgtgacgaggcgtggaggccattactaactaaccttccgccaagtgcaacagccatttgattctcaaggtagctcctactgtacaatccagactcaagtctttcttcgcttggagcaaaaaaagtgagcccaccagcttggccacgaggaatgatagaaatctttgcaaccggatcatattctggcataagagcacccactagagcatgaccagcctctgtaaatttaaaattcatttgaggtggtcagaaaacaagaatcccagctgcgtactccattacatatagttagataaaatgctaaccatggtatgcaacaagtctcttcttctcttcagagacaactgcattctttttctcatgtccagcaatgatcctctcaagagcatcagagatttcatccttgcttatttccttaagctcacgcctagccgcaagaatcgccgcttcattcatcaggttttgtaagtcagcacccgtgaaaccaggggtccttctggcaaccttgtcaaagtccacatctttaccgagtgccttccccctagaatgaacctaaaataaaaccaaaccccatagagagaaataagaatcattcacataactccatagacaaaccagtaacctttataaaacagctatgaaaagaacctgaagaatcttgactctgccagccacatcaggcctatccaccgtgacctgtcgatcaaaccttccaggcctcaacaaagccgaatcaagaacgtccggcctattcgtagctgccaaaactatcacaccagagttgccagaaaatccatccatctctgtcaacagctgattaatagtctgttctctctcatcatttcctcctcccatcccagctcctctctgcctacccacagcgtcaatctcatcaatgaatacaatacaaggggctttagacttagccttctcgaacaaatccctaactctcgatgcacccacacccacaaaaagctctacgaactccgaggccgcgcaagagaagaacggcactccagcttccccagccaccgccctagccaggagtgtcttacccgtaccaggcggtccaacaagcaaacaccctttaggaatcttagcacccaaggctgtgta

SEQ ID NO: 35491 - DNA, 1874 bp, Arabidopsis thaliana landsberg
  unsure (1)..(1874): unsure at all n locations
catgaacactttgtttttgtgaaatcattttctgaaatttttcaaatttttttggtttttctatgccttagatgaatgcagagtcgagaatatatacaatgcaacacacttcctaagccctcccccaaacttaaatcacatagtacactgggtgactaaacttggaagacaaatcatagaaacaaaataaaaacaagagatgatatataacaatggtgaagtgaggctcttacctcagtcgaagaatgaacggagttggtcatcaatggctgcctatgattggtcccaagccatttacgagtcgccctgttctgtatcagctccagcatgtgggtactcgacctcatcggctttgtggcggccagcaccactttgaggatactcgacctctctccttctgctgcagttagcaccgcggtcgagtgatctcctcgagtggataaagcgtgatctgctgctagagcgaacgagcgtagccttcttcctcttttagtgctcccgggactcgaatgataaatgtctagtagggacatgtgagactctctgctcactaggctcaggcctgtgttgacttggctcacgctcatcaaatctcctcaatggcatgtctagaggagggtgtccctgtgggataactgtagtggaagaggagcagctcaacttatctattaggaacttgatagttttgaagcacttggcgagtagcttgtcctgtttcttgcaccacttctgtagcttgttgttgttacactcaagctcttgctctccctcgctggaggtacatattcactacaatgatatatgctagtgtcaagctccacttctctgtcttcatccatcccatcctcagcttcttcttctataagatcatcctcacccaatggcggagcgtcctcattgtataggttcccaagctcaggcctaaaattaatgttttctccctctattatgcgtgtaaccttgggctggggagaaggatgatgcctctcttatccgtagagtgctcaaacttgaaacggtgcatttcgccaagcattgcgaactctaggaattcgaagtgatgtagatgcttaatatccattacccgtggctcgagtccatcagatgtgattgggactccacaagcgatcagaatcggtgtcacaacaccgcctatgcaaagagcgcctcgtgctctcttgtnnnnnnnnnnnnnnnnnnnnnnnttgtatccacacatgtggatcagaagaagtatagagagaggtgtgtcattgatttcaccttggagagacattttgttcttggtttggcggagagtgcctttgagagccatatcgatcatctccatatcagaattggtaacaatccctatgatctctcgggagtagaggacattggctatagaacgctggaagtacctgatgacagggctgcgtatctgattgctctttgacctggaagaattcagcggtacagagttgccaatggtgatccctaaatctttcaactcttctttgttatacttgggcttagtacccgttccactggggatactaaacaatccttccaagcgcttgattgataaccgatactcatgaccatacacagagaatctcaagaatcccaatcctccgcaatccaactcatcagaggtcataccttggtaaagctcaacttgtagtgtggagaggaattgaattatctcttcttcatatgctacatacggataagccatcagagtgtctagatgacaactctggtacatgtgctaaacaccctctaacaatccaagttgtgcaagtgtggtcgagcatggataccttgtgctacagaactcatttagtttgaagagcctgatataatcctcagcaggcaatacatcaggtttgtgc

SEQ ID NO: 35492 - DNA, 9450 bp, Arabidopsis thaliana landsberg
ggcgacatgtattgggcctaaaacgcatctaggtaaggtttattctgtttatattatctttgcatgtccacacagcccagacaacgggtagaatcgtcctcaatcgtgctcctcaagagaatttaattagtttccttattttagcttattttctttcttaaaaacaatggtttttgtgttttgattttatttttttccttgttgcgtttttacatttaatttcggtgttagggctgaaggactcttataaagtctccctgcagcagttgtacgatttttcacctttgattatcaataaagaatcgcattttctcacttcttctcttcaagtgttcttaagagaataagtttcttctttgtcttgtgtgtgcgattcaccaaggccaagttcgtgtactgtatcagagacttatcacatctttgtggtgaacttcaatccgccagcacttcccctccaatagatcccacacgagagaaacgatcaccatcgtgttagatctccatcatcgaccatcttcccttcacaagagagaagtctccgccagcttgtgaggccaccatgggtggcagatacaaagctcaacaccgagtcttgtatcatcttggtattagagcgcagttgcgcttcttttgccaggttttatcgtttctttttgtctgccttactttctgaatctgtttctgcgttagtcttgtttctgttttatttttaaaaaatttaaaaaaaaaattgtatttcagtttcattttattccgtgttaaataatttatttttgagtttcgtaatattaattaatatatatatatatatatatattattgttaactttgtactacatcagcaagtgtattaggaagtgattcaacaagtcctaggtttcttgtttttgatctttcttttctattgctgtggtacgttgatttttttgttgtttttgtctaagcataggtcagttttaggctatactatgggagaggccgcaaaaatttcccaacacgctgtaatgcaaatgatggctactttgatagaggagttaacgggattcaggcaacagataggtcgtttggagcagccacatcctagggttgaattggggcaagaccaggctcgtgggaatgcccgcgaagaggcggaggagtttcctgagttggatgatgatgatgatccaccacccgaccctttgagacgccaacatcaatggagagaagatccattgatgagaaaccgtgcacgaggagtagaactgcgtgaaccgaaccgagatatcaaactaacacctcctagttttgcaggaaaatctaatccagaggtgtacatggattgggagcgacggatggagaacatttttgaatgctatcggtatggagaatctcggaaggtatcctaagcagccgctccgctcaccgaaaatgctttatcttggtggataggacagtagctaataggaggagacaaagatttggtcccataagcacttggagagacatgaagtacctcttaaggttgaggtatgtccctgaccattatcatagatttacaaaaacgttttagaaaattatctcagggaacaaggaccgtagatgagtactttgaggagtttgacaagctcatgaacgtcttggagctagaggaatccaacgaagctctcatggctaaattcatagacggattacaaaggaagattcaacgaaaggtagagagagctcaatataatggactccatgagttgctacacctagcggtacaagtcgagcagcaaataaggcataagacatccttaaacacccgatccagaacaacacgccttggaatgcaagcaacaaccgagccatggaaaaaggcaaggccgtagagagtgatcctaggttcaagaactagtcgaataaggcacctaaaaccccttggcccgaaccaggtaagttccctagtactaatcaatctcgttctcatgacattacttctttcaaatgttaaggtaggggacacatggcgagagaatgtccgaaccaaagggtaatgatcctcactcctggtggtgactatgagtcacaagatgagtaagaggattctgatgagcatgaggacgttcagtatccacatgtaggagagctccttgtgattcgcaggacattaagcgtgtttgtcaaccccgaagagaaggtgcaacgagaaaacatcttccacactagatgcactatcaagaacaaggtatgtaacttgattattgatgaaggctcatgtactaatgttgctagcaagtatatggtagacatgttacgtgttcagaaaacaaagcacccgaggccatacaagcttaggtggctcaatgacgatactgaactgaaaatcgctgaacaaatgactgtatcattcagtgtgggaaagtaccaagatcaagtcgtttgtgacgtagtgccaatgagagcgggacatcttctccttggacgaccatggcagtttgaccgagctacatgtcacaatgggcgtaccaaccattactctttcaccttgaatgaccgtaagtacaatctcgcccctcttagtccctcaaaagttcatgtcctacaaattcacatgaacaaggaggacgaggtaagaagttctagtctttatttaagctctaaagatgtttgtaaaaccatgagtgccaagggcaccgtgctactaatggttttcaaagaatgtcttagtacagggataggtgatcctgagctaccctctgaagtactagctgtgctagatcggtacaaagacttattcccagaggagattccacccggactaccacctattcgtggcatataacatcagattgatcttgtaccaggctctgctttacctaacaagcccgcctacaggatgaatccagaggagtctaaggagcttgagaagcaagtgcgtgacctaatggacaaagggtacatcacagagagcctcatcctgtgtgcagtacctgtcctattggtcccaaagaaggatggcacgtggagaatctgtgtagactgccgtgcaatcaacaatatcaccatcaagtaccgataccccattccgagactagacgacatgttggatgagcttagtagtgccatcatattttccaaaattgacttgaggagtggctatcaccaggtccgaatgagagaaggagacgagtggaagacagccttcaagaccaagcaaggtctctacgagtggcttgtcatgccgtttgggctaaccaacgcgccaagcaccttcatgcacctaatgaaccaggttctaaggttttttattggtaaatttgttgttgtttactttgacgacatacttatttacagtaagagttattctgatcacattcaacacttagagttaattctcaaaacgcttcggaaggaaggcctatatactaacctgaagaagtgcacattttgttctgacaagtgtatgttcttaggttttgtagtgagtaaacagggactacaagtagatgaggagaagatcaagccaatccgtgaatggcctactccaacatctattgcacacgtccgtagttttcatggactagcgagtttctacagaaggttcgttagagactttagtacagtggttgcgccaatgactgttgtgatcaaaaagaacgtgcctttctcatggggagaagctcaagataagtctttcaacacgttgaaggagaggctcggccaagcaccggtcttaaccttaccagattttgaagtaatgttcgaagtagagtgtgatgcttcaagattgggaattagagctgtactacatcagataaagaggcccgtggctttctttagtgagaaactaagtggagcagcattgaattacccaacatacgacaaggagctttatgctctggttcgagctcttgagacttggcaacattacttgttgtccaaggaattcatcattcataccgatcacgagactctcaagcatcttaagggtcagacttggcttaagaggagacatgccaagttgttggagtttgtagagacgttcccatatgtgattaagtacaagaaaggaaaggagaatgtggtagcagacgctttgtctaggagacatgcccttatagctactatggaggctaaagtgatgggttttgagcatatcaaagagttgtacaaagacgaccctgagttaggagaatgctaccgagagcatggtaaaggactttacaagacattctacttgcaagatgggtttctattcaaagacaagcggttgtgcatccctcaaggtttaatgcgagagttgatacttactgaagcgcatggtggaggtttgatgggacactttgatgtagacaagactttggccaaggtaatggagcatttcttttggccccacctcaagaaagatgttgagaggttttgtgcccgttgcattgtttgccacaaagccaaatcaaggtcacatcctcatggtctctatttaccattacctattcctaacgccccttgggtagatgtttctatggactttgttttaggattgccaaagattaaacacaaggattcaatctttgttgttgtggaccggttctctaagatggcacacttcatcccgtgtgacaagaccaatgacgcgactcaaaccgcagagttgttcttcaaggaagtggtacgcctccatgggattccaaggaccatcgtttctgatcgtgacaccaagttcttgagtcacttttggaggactatttggagaaagttaggtaccaagcttctattctcaacaacttgtcatcctcaaatggatggataaaccgaagtggtaatccgaactctctcaactttacttagagctactcttggtaaaaatatgagcacatgactagattacattccttttatcgagtttgcttataatcgtcttgttcactccggtacaaaactatctccttttgagatagtctatggaattaaccccttgtctccattggatttagtacctttgcattagaaagaacaggtttgccaagatggtttgagacatagagaaatcattaagaaaatacatgagaaggcgaagccgaacttagaaaaaaaggccgccgaaaataaacgtaaagctgatcggggatggaaagaaatgttatttaaaccaagagattaggtgtggctacatatgcggcctgagaggtttcctacacaaagagcatccaagctagcaccaagaggcgacggtcccttcaagatcctcgaaaagatcaatgataatgcctatcgttaagatctaccaagtgaggtaaaaatttctcacacttttaattttgctgacttgtttgcttattgatccaggagattcagctttgaggacaaaaccttttgaagacggagggaatgatgtggacatcaaccttacttcacataccgttgaactacatcctgtaacagaagtcccggagggtatcatgacacgttcaaagactaaacaattgaagaaaatgttcaacttagctgtgcaagatattttgagctccctagagctaggagtaaactggtccgtagcaccccataccggatatgatctaatagccgaagaagagcttgctgaagcattcacccaaatgattcttgaacaaattactcccccaggtatgaaatatcgtttgacacgttagaggacctctagaaaccaagagaagactttggagcttcaagagacgaacaattcaagtgtcacatctcaaagtgatcgagagaaacaagatcaagaacaagacatcaaggacatggaagagctcgaagacagtgatcaagctactcaagaggaactccaaaaagacccgtacttcagggaaccagccagcaaacgagcacaagacctgattccagaagtacctgaagaagtactacaggaagtgactcaggcgacatttattgggcctaaaaggcatctaggtaaggtttattcagtttatattatctttgcaagtccacacagcccagacaatggctagaatcgccctcaatcgtgctcctcaagagaatttaattagtttccttattttagcttattttatttcttaaaacaatggtttttgtgttttgattttatttgttttcttgttgcatttttacatttaatttcggccctagaactagctgaaggactcttataaagtccctctgcagcagttgtacgatttttttcacctttgattatcaatcaagaaccgcattttctcacttcttctctttaagtgttcttaatagaataagcctcttctttgtcttgagtgtgcaattcaccaaggccaaattcgtgtactgtatcagagacttatcacatctctgtcgtgtacttcaatccgccagcacttcccctataatagatctcatacgagagaagcgatcgccatcgtgttagatctccatcatcgaccatctttccttcacaagagagaagcgaccaccagcttgtgaagccaccatctctattagatacaaagctcaccaccgagtcttatatcaggttagtattcatcgatcttgactccttattcatacctgatattgagaccaatttgataaaaaaaaagaatgtgttcctctccccttctaaaaaaataataataatgagagattgataggattttcagatagtgtataggggtaggaatatttactatgattccattattatacattatttggaatgatcaattacaaaagtataaaaaaatgccgagggtgtcgatccagtatgcgagttcccctttctttactctctaaaaagaataagtctgggggagagaaagaataccaaaaaataaaaataaaatgaatggtcgatttgttatggtatactacaggaatgagtctggaaggttcttaaacattaacttgattgatgagacccaacaatgataacctagtggatatagctgagtgctttggtatggaatctaggatgtagtgtgggctagtggaaaattacatggtggtcaggatttgactagaactctttagtgcatggatttggtttgtatgctcagggtaataagctagagagattggaagtttctacatttttcaaacctctttcacagattcaatcttttgttttgcttgagggcaaacaaaggcgaaccccaccaatatttaactatacttctcaactccgcaagctgaagagaacttttggccatcagaagaaaaccttaaaaggtttagctcagactgaagatcctacagaagatgactggtatgagatgagaaaaaaatttagatggcaaagcagagtcatagaggggttatcttcaagggtgatgaagctgaaagatcaactttgagatgtttgaaaaaagagttaataagttttcaaatggtattgacccaaagaaaatggaaactgcactagctatcaaggaggacgaagatttcacaatagaatggtttgcaccagaagatcagaaaggagttcacttagaggaaagaagcctagagaacaagttgttgagtgaggaggaaattcctattcgacttattttctaggagcgcctaaacagcccacaacccctctgctgaagaagaacacttgattcatgattctgttgttgaagaactcctggagctctggattggatataaagctcaagaggatacaattggaaagttaactcacaagatggaagagttaaacagcaccattctggaccttcaagaaatggttaaagactaccccaactttgaaattgaggattgctcaaaagagcctggttcagaataagaagactactctgctgatcaaaaagaggcttattttgaagaaaaatcaaatgagtactcatcataccatatgtcaagagaggatgcagagtatgaatcaagctctgaaaattcaagcactgaagatgaggacttctctgttcctctcttcaaccttttttctaactaagttctgtaagagtcaagcttagtgacttaaaacaagctcacttgggaggaagtcccatgtctatccatgtatataactttatatttttcttgttatttttgaggtttttgtttaagtgtttcaggtttatttcattgaccattatgaagtcaacggtcgagtaaattcaaaccatgtcaagaaagatctcaaccgttgatcgagtagaatgaggaggattgttttgagccgttgatttgaatgatcaaatgagagaagcatcatcaccgtttgatcgagtgatttcttgcgattcattttggtccgtttgatcgagtgcttaaagatgaagcatttctcaccgtctgatcaagtgaagaaaccaaagacactctcttcgtagacaccgatgccttgtgaccattgaaacgctgttgtccctttgtcttcttgtccccccccccaataatcactttggtccccccattgcaattcccgaactcaacaatctcatctctccacctcccataccaaagcattctcaaatccttataattctcactctttacctccttcacttccctttcttatcaaaaacttttcgcgattcatttgtttcctccattgtctaatctcctaacctactgaattttggttttgagtttcccccacttttgttctcaatgatgaacatgcgctcgcttttgtcaaggatttggaacaaagctctctccccatcgaagaggtacccaacaccttcttcgcatgcagcagctcgaggactttctgaatcgtcacccttcaggtcgagcaggagggaacaagcaagtttcgagatcgatcacagtgaatcgagccaagaggaggaagcgatgcaagaagaagagactttcagctctcccgctggaaatactcgatcccgaaggtcgagtaagcactctacaagggaattctcgaggaacaaatcagacatcactcgaggaaagaagcccgtggggaggaggttggaactggtagatgaagactccgaggaagaaatggcttcaccagaggaagatgatcaaacagagaaaggaggcaatgatgatttggaatcagagaagtgtgcaactcgaaacgagtactacaaactactgaagcgcaatgagtttttaggaactcgataccctcatcccgagaccatggagagactcggcatctatgatgatgtaaactatatatttaagcagtgcagcctgaatattcatatgtttcggccaatggaggggtatgaggaagagaccatccagtttctttcatccgtggaattgttcttatatggagagtcaaaggacgatgaaatcaggtcagacggaagtttgggatacttggagttctgtgtgtatgacgtagagtttcggcttccaatagagcacctcgagctgatgtatggatttccaagcggaaaagacacaaatcatcgttttgacaagagagagcttcagtcattctgggccacactagggtctaagcaaaaataatcattctctaggaccaatagcaacaagataaggagtctg

SEQ ID NO: 35493 - DNA, 1931 bp, Arabidopsis thaliana landsberg
aatttgaaattttttatttgaacactcggttgcatccttgttgttgctccagctgttattcatttcctgagaatcaaaaacaaaaccaaaataaatcaaaagtaccaaaaataaaaactatatacaaggataggaatgggacttcctcccaagtgagcttgttttaagtctctagcttgactcctcacactcattaggatcaaggagggtgatagagtagaattaacgtctcctctccttccttaaaaatacaacatctaattcagcatgctctcgtgacaagtctgtaattgagtactcaatgaccctttcttggtaagctcctttttcatcatctggatagtcgtcttttctggactgttttgatgtgaattcacatccttcttttctaaccataggaataacttcatcatttgggacgtccttgatgtcgagtggagcttggttggctttcccatggagctctttgacttgatccttcaactctttcacattgtgtgttagctctattatagctttgtcgtgccattttgacctctccttgagttctaaccaatcatttgatgccctcacgcttgactctagctgtttggttgagcattctagtcgagtatcagttgagccttcctcgttcaatgtaacatcctctgtttctgacgcaatgacacctttaaagatctctgatcctggtacttcgttgtgtgagtctaatgacatctcatagcttaaggtctcactggagagaaatctagcttcagtacttttggttaaagtagtttgaaggtgatctctgtgaacaatctcctctagcagttcattacctagctgatccatttcctcaactaagaaggtttgtccttctattgttggcttcttcatagcgtccctgatgtcaaacttcattttgacatcctctcccagattaagattaaatttttcttgcttaacatctattactgctccaactgaagccaagaaaggtcttcctaagatcagaggatccttagattcttcattcatctcaagcacaacaaaatcagtaggcacctctactccattaatcattactggcacatcctctaaaaggccaaaaggtctctttgaagtcctatcagcaagaatcaaggttagatcacaaggcttgtattgaacgaatcccagcttctttacaacagagagtggcattaagctgactgaggctcctagatcacatagacaattgttgaaagtcaattgcctaatggagcatggtagagtaaaagatcctggatcttccaacttttgttgaacaatcttcttctgagtgattgctctgcactcatgacttaacaccaccattccttggacttctttgatcctttctgtaatcaggtctttcacgtacttgtgctcgtcaggtattagcgcgagacagtccactaaagggatatcttttatgtgtttttccaggagggctctgtattttgcaaccagaactttcttgaaacgactagggaatgaaagtagaggtttgtaagggcggtggcacgaagactatgtctttggtctttgcagcttccggttttttcaacaaagagagtagctggggaagcttgtggtcgagtggattactggtgagtatgggctcttcgattgtgttgttagccaaaacatcatcttgataaaaatcctccccctctagaattacagtgccctcagtgtttgatgtagggatatatcgagttagcagctctcgatcatgtgtgatagtgatggcatgggcagtggcatactcctatggattttggattgcgttccctggaagctggcatgggtttttgttaacagatggtgatgcaaggatgcattccacatatctcatcctagtgaacatggattcgaacttgttgttaagttcgacgccttgtcggtcgactttgagttactcaaac

SEQ ID NO: 35494 - DNA, 4691 bp, Arabidopsis thaliana landsberg
ctctaaaggttgtgaaccatttaccaagatcttgtaatgcaacattgtataccatcaaaatagtttttgtaaatcggtataaaccatttacaatttcaaaataataaattttaaaaagaaggttgatattagtttctgttgaacatcaaattagtgactaataaataattcttcataaaattagatgaacaattttaaaatttatgattaaattaccaaaaaaacccgaatttttaaaaatcattacctaattaataaatgaatgatattattccgacaatggcaaatatataataatcagattttcgaaaatatttctgaccttaatatgatgatattaaaataaaaaaacctagtgacaaggcaacacatagccaaaaaaatcttttgggtatcgttttgaatttcaaagacgctctcgtcctttcccaaaatatttcaaacacccgcctcttcagtatttcgtttcccactctttttattcccaattctctagaaccttcctctctctccatctctcaaaatctcgaaaacaccattttcactctcagatcttttttccctcaaaaatggcgcgtgtcatccaactcccctgcgacggcgacggcgtatgcatgcgatgcaaatccaatcctccgcctgaagaatctctcacttgcggcacgtgcgttactccgtggcacgtgtcctgtctctcttcacctcccaaaaccctagcttccactctacagtggcattgtcctgattgctccggcgaaatcgatcctcttcctgtttccggcggtgctactggtttcgaatctgctgggtcagatcttgtagctgcgattcgtgcgattgaggctgatgagtcattgagtactgaagagaaagctaagaagaggcaacggttactgagtggtaaaggtgttgaggaggatgacgaagaagagaagaggaagaaggaggggaaagggaaaaatccgaatctggatgtgttatctgctcttggagataacttgatgtgttctttctgtatgcagttgcctgagagacctgtcacggttcgttctctttgttcttatgctttgttgatagatctcttttggtgaatctgttaaacctggaatcttatttagggtgtcttcttaagtgggttgtgattgtttattatccacttggtttactgatttgagcttgtgacatagaacactaaagctgcgtgatacaaaggcataaactttattgacatcataaatggttcctttaactgttttacaaaggctttgacttcattgatctttaccatttgtgacagaatgtgtcaatgttacatacatttacagttcatagttgttgagttatcctgttattgggttggattatttagtttgagtaatctattgtgttgttgaaaattgttaggattggtatgtggatggttgatctattttatattcaaaagggaaaaccataaacgttgctttttatgagtatttttatgagtaaggattattgatgaagatggagactatttaacttgggctgatggaatcttgtgtgtttgtttttcagaaaccatgtgggcacaacgcttgcttgaaatgttttgagaaatggatggggcagggaaagagaacttgtggtaaatgccgcagcataattcctgaaaaaatggctaagaatccccgtatcaactcgtctcttgttgctgccattcgattagcaaaagtctctaaaagtgctgctgcgagtacttcaaaggtctttcatttcatcagcaaccaagaccgaccagataaagcatttacaactgagcgtgcaaagaaaactggcaaggcaaacgctgctagtggaaagatttatgttacaataccaccagatcattttggtcctattccagctgaaaatgaccctgtcaggaaccaaggtcttttggttggagaatcctgggaggacagactcgagtgtaggcagtggggtgctcatttcccacatgttgctggcattgctggacaatctacttatggagctcaatctgtagcactctctggaggttataaggatgatgaggatcatggagaatggtttctatacacaggaaggtctgcctttcattactcctaaattttggtccatttgactcatgttgattttacttctctcatgtgttagaagtagctattgtccagtttgttgacatagttttgtttgttttcgtcttgaatatatgtcgatgtgtcacgcagtagagggagacatttcgctaacgaggatcaggagtttgaagacttgaatgaagctttaagagttagttgcgaaatggggtatccagttcgagttgtcaggttagcagaacaaaactccattgctctctcacattctcattttttcgttaagtttcctatatcgaaagttgtaccacaaaggtgaaatgtattgcttttctttgcattgaataaagaatagagttatgctaagttccatagatacaactcttaatatcagttcccttaatctaggtcttacaaggataggcattctgtatatgcccccgaggaaggagtgagatatgatggtgtatacaggatcgagaaatgctggcgaaaagctagactccaggtacacatatagggaaacaagctcgtaggttttttccctgttctttttatgcattgacatgttcttctcatttccataggattcatttaaggtctgtcgttacctgtttgtaagatgtgataatgagccagctccatggaacaggtttggtctttgttttttcccggaaagtgtcttatatgtatttgctatttgatggctcatgcatttattaattatatactgcagtgatgagcatggcgatcgtccaagacctttgcctgatgttccagagctggagaatgctactgacctgtttgtgagaaaggagagtccatcatggggtttcgatgttagtaaagtctctcttttatatgaccagagcttatatctaatattcttcggttggttcattattttgtaacttttccctcatcaggaagctgagggtcgttggaaatggatgaagtctccacctgttagcagaatggctttgaattctgaggagaggaagaagaataagagagcaaaaaaaggaaataatgctatgaaggccagacttctgaaaggtaaacgtccattatcacttgtgttattactgtatatagcacaatttataactgtttttttttttgttttatttgacacagaattcagttgccaaatctgtcggaaagtgctgagtcttccagtgacgacaccttgtgcacacaacttctgcaaagcatgcttagaagcgaagtttgctgggataactcaactgagagagagaagcaatggcggacgtaaactacgtgcaaagaagaacatcatgacctgcccttgctgcacgacggatctctccgagtttctccaaaacccgcaggttaaaaacagaaaccaactcttcttcctacattctagttctttccagttttgttgtgattaactttggctaatcccaaaatgtccaaataaaccaggtgaacaaagagatgatgagattaatagagatttttaagaagagtaagtaagaggctgaagttgcggagtcatcaaacatttcggaagaagaaggagaagaagaatccgaacctccatctaagaagattaagatggataaaaactctgttggtggtacaagtctctcagcttaaggagctctttagtttttccaaacaaacttcctttctttttttggtaatattccgcaaacgtctgaagttatgcattgcgacttatcatttttattttaaaacttatcagaaattgttcgattctttttttccgttagatataaattcaatattactacattagtatattactttaaattttcgtggtcattgaaaagaggcacaagcccgagtttgagcttgcttcttgtggtacttgttgaaaatttctggtacttttgatggttgaatataacttgtgttgccttctttaaattcctccatagctctgagtccgagttgatgatgccgtctccaaaaggtccaaagatttctcgcaactcaggaccacggtaataaatatgattaatattaactgaatcagccgtggccaaaatatctattccagcgaaccatggccctttgaagtgaaaagtcaagttggaattctcgagaaggtcgacgctgaagtcatatatgcgggggagtctcataagtgcaccgggagacataccaagaaccggccagttccataggccgctttgggatatcttaatgagtatgtaactatagggtttcttgatgaggaagtaatagaaaatgagaaagcaaacgaaagctatgaatgcttcaattaaccctattaaagccatgagtggggttttgtgtacaaaaggagaagaagaaggaactcgattatatacacatcaaccggaagaatttttaagcatattgtttcattacatttaaagtccagagaggaatctttggattcacactaaaaatatgtttgttctttcataacgtattctagagttcaatagcgtttaagttttcctgttcagttctcgtctcctacaaacaaggatcacatgatccagtgcaaagtaacttgtttcaaaggtttttggatgaaaaaacaaaatagattctccagagattgagcttaaattatac

SEQ ID NO: 35495 - DNA, 1896 bp, Arabidopsis thaliana landsberg
tagaaactgacctagcttagagttctctgtttcttaagaatcaatggcaaaacaagtatgtagtagcaaatcataagtcgtctaagcttgtaagcgtgaagaagaagtaaaactcaaatggaacagccactacatcagttttgtgaatcattaacctatcattcattgttaagtttccaaacgaaacaccgtgccgtttttttccaagtgacgaggaacattatgattttcatttaaatgttttaacaaaaaacgacataaagtgtatctcacagagaataatatctcagattcacagaggtcaaagacaccaagtgatccagagtagtcaagggaaaagacagaagtaccccttgccaaagtgatccagagcagaggaagaagaagaagaagaagacagtttgataagtttagctgatcaagcaagtgtcttgaaccaagaaacatggaatacacaaaacagagtttatgggatttgtcttcagccttttccaccaccctaaaagagaaaacaaaacaatgagatgactaagaaggcctgccctaatagaactcagtatgtaactgtatcattcgatgctttaaagattctcaccttgcgaggcggggttcctcgccttcctgcatttttgccaaacccgaagtttcctttcttctcagatgctttaaggatctgaaatgagcacgtcaaggaatcatccacactcatcattgctcctgcgttatcaaactctccacagtagtttggggccgagaatatcgttactagctgtctatttgcaaagaattcatagccgtcttccacaacctaaagggcaaaacaatcaacttcaatgaggttaaaagagataaatcataagtattcgtccattatttgtaggtcctatgatgacaagtaaacaaaagagacgtgccacagatacatgtctaaagcaaaatattacctgatgagctcggcatataagatcaaggtcatgagtttgaaggaactcaactactttgtcagccccaaatgtttaagagacacctctgtcattctccccccagccttgaatctctctgtcaggatcagcccacaacatatcacatagaatgccctgatcaggaacgtcaataggacgaggaattctcctgatgtcatctaagctcttaatatcaggcgatagtccaccatgcatgcagaggatcttatcatcaatgagagcagaaacaggcagacagttgaagcactcggtgaatgttttccataagcgaacattatatcttcttttgcattcatcgtagaatccatatacacggttgattgaagcacattcgtgattgcctctgagaagaaagaagttgaacttgtatttgaccttataggcaagaagaaggcatatcgtctctatgctctgcttaccacgatcaacataatccccaagaaacaagtagttcgcagctggtggataaccaccatactcaaacaaccgcaagaggtctggaaactgaccatgaacatctcctgctcatcaacatataaacttaaaaccatcaacaaaattacaaatcatacagttatgatagcaacagaagggtttaatatctatcatacaccaaattcagcaactaaacaaaactattagctatcaaatgaagtaataagtcaagcgagataccaacaactgcttatgcaacagagctaagggaacatggttcctcaaagacacaaaagtaagaggtcactactcacaattccgcaagaaacactaacttaaagtggcagagcatttaactaattcacaacatacacatcttcaaccatttcaatgtacacttatatcccaaaaatataagctttaagcttcccaaacaacaaacttacaaagctaaacccttacatcaaaaaatgtaaaa

SEQ ID NO: 35496 - DNA, 1405 bp, Arabidopsis thaliana landsberg
tgcctgtctatagaaccaaagataaagatttaggaggcgatggcaccgccatatcagtggctggaaccgatatctatggtggttctggcggtcatggaggtagaggcatcatcaccagcgatacaaagcttccttctccaccgccaccttcaccactcccaccacgaccagtgcagcggccgaaaccagtgtctagaacaaaagatcgagaattgatagacactggcaccgccaacacggcttcatcccttcttactagtggttccgctagtagttgtagcggtggtggcagtcatgggcatcgttgtggcggtgggggaggaggtggtggtggtggttgtggtggcggcggttgcggaggcggcggttgtggagggtgataagctattctctcgttaaaaagtgcggataattactgattatgtttcatgaagttaatatgttttacattttttaaccattttcattttctattgcaacttttgatttacatttattaaaataataaaatacaaaaaaaatttgtataaaaatacaaaacatcttaatacgtgaacaagtgaataacagtgaataattagggtaacagtgaataaacagagaacaaaggactacttttgttttttttttaatttcacaacatccccgaatagacctagattggtgtgtgttccacgtcattatgaaaggggtattaattgggtggaggtacaaggatgtcataaagtgttcgattttgcctttgggatcacagtatccatcaacttccgtgtagaacacgtcgaagatacgtgcaatgttgtggcatcgcagaagaacttggcgcggcaaatgatcatgtgtgttcatgaactcctccataaccactttgtagttgtctttattcattttacgcaactcttgggatgcttcttccttggtgactccatgttgtttcatgtagaagtcgagcccattggccagctctcctctgctcatctcagtctgcaaacatcatttattcatgaggactacaagaagaggaaaacaaaaatcacaagaaccaaagatatcccttttagtttgaggtgtacctcgtaggatcctacgtcatttcctaaacggaatactaaatgcagtttttggatgattaggggagtggtattgagccaatctttttttttgaataaaatgtcaaattatattcaaaaagaaaaataactttttacatcagcttaatcttatgtgagttgaattatttgttttgataagaaattacaatctgagagcttaacagaaagagcagagagagtctagagccttgtcgagaaccagacttgtaatccgttctcgtagcggcggtctcctgtcgagattatgatggagagttgattgcgaatctgtttgtccatccaagtaatgagat

SEQ ID NO: 35497 - DNA, 1712 bp, Arabidopsis thaliana landsberg
ctactttgtttcagtttccaaccataattttttacggtatttggaacactagttacaccctagttacctcggtttaaaacactatttctactactaccagttttaattatatggattttctttattaaaaagaaacagttttaattaattgtatggtttttatatatcacattttcaaagaccagttttaattgtgtggattttaatatatattcatgtaactttctttttttaaaactctatgttctctatcaaatctggattactattaagaccctgtttgtttctccatccagatggatcatctagatggagatgaaaaatgatgtttgtttttgacaatttaacataccatttggatgaatcactaggatgatacatctgaatgactttcaaaatttaggcaaatttttaaaactcatttggatgaatttgattgaaccatttggatgagatggttcattcaaaaataacaaaagacaaatatactcttatttataatcataatttaaatatatatttttttttttatagatttcttatataatatttttaaaattacatattaaaacaaaaaaaaactctaaaaaattatgaaatcacggattattattttatgtcataatcgtaaaatcgtggaattgcgtttttttcccaaaaaccgcaaaatcataatttttgatgtaaaattatagaaagcggtattccacctaaaatcatagaactatatttttatgccgaaaccactaaattatatttttccgccaaaatggcaatattatgtttttccgccaaaaacgcaaaatcatgtttttcccgccaaaaccataaaatcatatttttcgccaaaaccgtaaaatcatgttttttcggagaaccgtaaaatcatgtttcccgccaaaaccgcaaaatcatgtttttcccgcccaaaccgtaaaatcatgtttttaccgcccaaaccgtaaaatcatgtttttcccaccaaaaccgcaaaatcatgttttcctcgccaaaaccgtaaaatcatgttttcccgccaaaaccataaaatcatgttttcgcaaatccgtaaaatcatattttcccgccaaaaccgcaaactcatgttttcccgccaaaatcgcaaaatcgtattttaccgccaaaaccataaaatcgtgtattctcagcaaaccgtataatcatattttcccgcctaaaccgtaaaatcgtatttttccgccaaaaccgtaaaatcatattttcccgccaatatgtttgatattgataatgggtaatgatgttgaatatatgtcatttgtcaaaataaaagcatgggtattttagtcatttttatctaaatgagaatatggatgaactacaaaatgatcaaacaaataaagattcatttaaatgcatcatttagattaaattacaaatagtaaaacaaacatcattcagatgtatcattcaaatgaatcatgtaagtggatcatctgacagggcctatatggaatcattatgtaggaatgatggcgaaaaagacgagctattctttatctcgggatcagaataataaggaaaggcgcaactccaatttaaatccctaagacaaagacatctttcccacatagtataagagttggtttagacgcaacatcaagtgaagtatttaccttaaaacactcatcatctagtgaatgttttattaaagagcaagatctttgtcccta

SEQ ID NO: 35498 - DNA, 2073 bp, Arabidopsis thaliana landsberg
aggtgttgtaccaaaagattgattcaatcaaattccaaatgataatcggaaatggaaattgatgtaaacataataaccaaaccggcttaaaatttgatgccaatgaaacaattggagtaaacatctatagctcaatttgaaattaaattgagaaaaagaagcttgaaggttaccttaaaaagttgatcgacattgagacaaacccaaaaatggagggacatcggcgatgattcaaaaaagaatcaaagatgttgttgacacatgaaagttgggtgagagatacgagtcgtagtctttttcagcggagaacataaagttgtgtttggtcaaagctggatttgttttgatttgaggtctccatcatagtattattgggctaagccaattagacatcatgaaccttattatataacatataaataataggattgtgacatatgtcaagtctatcaatcagatgttgacatgcgttggaaaaaagttgaccctttttactcttaaagaaataaaagaacgaaaaaaaagaaacaaatcttattatataaagtatggtttttaaatttagtaactcatatgattgtgccatatgtcaagtttattgataagatgttgacatgtgttggaaaagagttaaaaaaaaatttatctcttaaaaaaatagaaaaactcacaaaataaacaaatttacatatactatgtctaaatctaaaaaaaatatattttatttttcttaaccacaaggaaaattaacaaatttgttttggtcaattaactttagcatgtattagtttgtttctaaatcattttgtatggataataactaggggtgtcaaaatgagtcaaaattcatgggtcaaatcaactcaactcaactcaactcatgaaccctaatgagttaaattttttgactcaaatgagttgatggtcaaatgaattattgggtaaattggtttgatgagtcaaatgagttgggttgtaacggttaatagtttcaattgtttatccaattaacccatcaaattttgtaaaattgaattaaaccaactaaaatatctaaaccaataccaatttaagcttaaccaacacatctaaaccaatttaataaaatcaatatttctccaaatttcttaaatatacaagggatgaaattgagaaaaagtaaactcgtaatttttccacaaaaaacataaacccgtgattttcccgccaaaaacgtaaacccgtgattttaacgccaaaaaagtaaatccgtgattttcccgccaaaaacgtaaacccgtaattttcccgccaaaaacaaaaacccgtgatttttccgccacaaacgtaaaccgtaattttcccgctaaaaacgtaaatccgtgattttcccgccaaaaacgtaaatccgtaattttttcgccaaaaaacataaatccgtgattttcccccagaaatgtaaacccgtaattttcccgccaaaaacgtaaatccatgattttcccgccaaaaaccaaaatctgtgatttttccgtcaaaaacgtaaacccgtaattttcccgtctaaaacgtaaaccgtaattttcccgcctaaaacgtaaacccgtgattttcccgccaaaaatgtaaacccgtaatttttccgccaaaaaacgtaaacccgtgattttcccgcaaaaacgtatacccgtaattttcccgccaaaaaacgtaaacctgttattttcccgccaaaaacgtaaacctgtaaacctgtgattttctcgccaaaaacgtaaacatgtaaacctgtgatttttctgccaaaaacgtaaacccgtaatttttccgccgaaaacgtaaattcgtaaaaaagtggaatccgtaaatattttaagtttgatgataatgaattaataattattaataatgataattatttattatttttttcataataataattaattaaattattatttaaatgagttaaacccatttaataactcaacccatcaaattaaataagttatgggttgcccttatacatgtttagtttttttatttcaaaaattgatcaattctaattaccagggcctaaaaagtcctggattt

SEQ ID NO: 35499 - DNA, 3863 bp, Arabidopsis thaliana landsberg
tttccttctcttttcttgtttccctatatatatctcatatattcccaaaagaatttaaataaaatggcctctagttctatgagcttgagctcttcttggacgtctaagcaaaacaagatgttcgagagggctttagccgtttacgataaagacactcccgaccgttggcaaaacgtcgctaaagcagttggaagtaaatctgcagaggaagttaaacgtcactacgacatcctcgttgaagatctcatgaacatcgaacaagacttagtacctttgcctaaatacaaaaccgtcgatgttggaagtaaatctagaggaatcaatgattttgatttgaggtgaaatctttttgtccttaccaaatcttttagagtttgtggtcgtttttgtgatttctatagtgatttagtagaacatatgtttagttcaaataatttcaaaatctgattatataaatgagttcttttggtagtagtatattaaaactagtgatgaacgttggactatataacaataataatataggtataataataagaaacatgcaaccacacgcaccatcccttctatttccggcattctcattaaaaggaaaggagtcacatgaaatctaatcctgtttgcgcaccatcacatgcacattgtcctcaacttttgaatcttatatgaatgatataatgttatatatgtatatatctagctaattctatattattcgaatatgagtagatataacggtatatatctatgcaaaagtgattctgacttttcactggtcggtaatcaacaaaagtggtatcttttagtgttaagttatattaattaatctattgtttttgacaggttattgaagaatatgagaatccagtgaagctgctacatgatgtgaagattgctatatgtctaaggattcaaagggatatgttttcttctttcttatactgatgagtgtatcattccctttccattgtgcttcttatttgttctgtttaatcttatttcattacaaatcatctagctatcttggttttgtttatttataattctaatatatttttgtcaaattctcatttttgttttgtctatggactgggatttatcattagacagtatagttagttcacatctatttcacctagtaaaactgatttccatttcgtaatctcaatttccaaaacttgctgaaaatgagagtatttttaccattaaaaacgtatacattgtaccatgattgaagtcccaaatgcaaagacttgaatattcccctgcaaaatcctccaaccaatcatcagctggttagcatctcgatctagagctttgataaatattttaacaatcacttttgtttataaaataaactaaagcttaaacatcacatgtaattgcatacatttataacgtttttaatttcttatagacaaagcattcacaagtttaaaagaaacgaatatcaccaattcactatatggaccccaaaaaaaaatgaaatcgtaaaccataaaactgttgcttaatttggaactggcatgaaactaaagccatctcacgtcgtactattttcggcgtaaccgccaccaacgttggatcgttccaccagtagataaaaccaaattttaaatctccttcacatataaataaggaactttaaattaaaccaaacgaaacacgaaaatcacgtacgtaaacaaatagacttttgtctcttacaagcttaaatcattcttgtttttataaaccaataaaagaagaagaagcaaaaaagtttgccggagataggatggcgaaaatatcggtggccgtgctgttgtcggtaatgctacttgtctcgataaactcggtggatatcttggccgaggaacaaccaacggttgggcagagggtagactccgccatgacgagtgtcaccgatgcattcaatgaacacggcggcccacaagccgttgacaccgtatcatccaccttcaaatccgtttacggatggttcggtgataaagccaagtatgtctacgattcttttgaatatttttaatctttttggtacaaaatcacttttactagctatcccgtaactttaatttttatttcctacggtacatagttacatataccacaggacaaaaattgaatttagattcgatatatagtaacatgataattcatggtacaaaacaccatagaaacccatggcgttataaacctattttgatgatactatgatttctatatcaatatactggtagcgtacaatccatttaatagtaactcacctaggttaaacattaagatctgaaaattttaaattattctcttaagtttttatgactttatcaactgtaagcaccgtttttgttttaataaattccataatccctccttaatatatgatttgtttatctttcttcagggaatggggaatccacttctaaaaggaggaatgcacaaagttcttttaagttgtggtgtgtttaataccaaaagaggtcccaaatcgacttatgtgccactgattatatttatttaatcttcaatgcatatatatgtaaacggtaacccaatctcttaaacaaaatgcattagcttgattattcctcttatcataccgcataattctcaagaaatatatgtgcgacaacgtttagtttcacaaggatgtggccattatcatacattactaggcccatttctatatccgttaatatctataccaatgtggcaatgttctaaaacttgctctagagactaggcggccataaactgtgacaattatctatcatgcatgagctctccaactaataaaaccgtaaatcactatcacaactatgattgcgacgggccagttgttattaaccggccaattacctggcccatttatatgtccaacaaagaggtctagaaccaaaatgattgtgtgttggtggatgcacccaaaaacctcagccgtaattattcaccactgaatctcatggctcagacgtcgccacgtaaatatccaatgaaacccccacacgtgtcgaaatctgagcacctctcaaaaccgaccttgcaaatcttaaactctgcgcctcttcccagttctgaggtcgcggcggtcccaattctcggcctcgcacgcacgaatcaactccgcacgtgccgagtatgctgacttggtaacaaaaagcgagacgtggcggtcacagatacatgggctatacttaagcaaccaattgtagacgatgagctggcattacacgtgtcgctctctcaccctctgtgggctcctctttggcaatttttttcccactctctctctttctcgagagaagttacagtttctttctctctctaaactttttttttctcttctggttacgtttttttttctttgttggaaaaatcttttgggttttgaattttttttggtttgttgatggagtttgagcctatatcatcgagttgttgctcgtcgtcttcttcttcatctggggaggagaatactgcgtcggcgaatatgacgtagatggaggcggcagaggcataggcggatatagcgcagcttgcgataatgcgagagcaggttttcgaatctgcagcgagttggggaagtaaagggaaacgagtgaggaagcgagtcaagactgagtctcctccttctgactcgcttttgaaaccacctgactctgatacgttacctactccggatctagctgaggttctgtctcttcgctttccctttttttttttttttattagtctgttttttcaaagaacctcactttcattgattctgtttttagaattgtgaaacttttatgaattagatccaaataatcgattttgaatagatagaaatagtgattgcactgattaggtgaataacatgt

SEQ ID NO: 35500 - DNA, 2739 bp, Arabidopsis thaliana landsberg
gctctttaactcctccacctgaaaagaaccaaaaaaccaacaacgattacaacatgtgtgacgacaggagcgaccaaattcggagagtttgacttttctacctgagaagcaaaggtaatcttaaagccaaacactcgtaactttgcttctatacgtggaaccttcattagttccatgaaaaactggtacatttgcaaggttaagagtcagagcagagatgatatacaagtataatccaacgctttagcaactaaacaaacctgttcacactttccaagcatttccttgtcaccagtataattctgaaaacaagaacagcatatgatttaacttcagggaataataaagtgttgaaaggaatttagtcaacaggatctttctttggttcagaaacattaatcaaccattcagaagggaaggaaagtaggatttccaagcaagaagaacctatgaacctggtgctagagagaaatatgacaatgaaaactgaaattaccctcaacagttccatctcttccttggtcggacaaaatttgatgagattttcaacctggtcaatgtccagagctaatgaatccaaggctagtactgcactctaagataagaaatagatttgaaagtctcaattagtagaaatctgtaaacattcattgaaaagagatttaactatgcaaaatgatagatgaagaagatatgtaattatgtaaacaccaaaatccaaaacttgtatgtttattccctctaaacgaccacttcacagtattgttacaatgccaaaatgatgagcagaaaagatactgaaagcaaaacttacaagcatatctggcaaaggaatctttattttcgtgagcattatttcacagttatttgctcttcgcaggtcaacctaatacaaacacagaaaaaaaaaaagggggttagaactgaaagataagcaaactaagaggcaagaacgtaatcatttattatagttatagagtatccatttgagagaataaatgatgtttgcaatgtctatcaattgtcaacttcttctagcaaccgaagttaactttagatcatcaaagaatccatctggttaatgtacactatatagctgtaggtgatacctacttaatagatccactcttggtaatatttggtttaccaaactgtcatttatatatatagatgttatatgtgtacagaggtgaaattgagctgcctcaccaattgaactttctcaggtttgctgatactagaaccccggcgacctgtgctcttcttagctgtggtatctgaaactgcagaaaaaagactctcgagctctgatatatctatttctggggccctgtcatgaagattcgtaaaattcatcggattagttcaacaaaaatagtactttatgggaaacaggtaaaatcgcaagacagaactgtaaagacaattcatttttgtttcataattgttatcagtgaattattcggaaatcatgtatgtcaagttaaaacatttaaaagaaagaaaaacacaaagagaaacccaccgtggttgattttcctgtttctgagtatcagcccacaaactaccttttgctgcccgagtaactttagaccaatgcaaaggttttaacgcggttttcttaggtgcagcagtaggaacactcacacctcggcctcttccaagtcccaaggaagctctcccccttcctgcaggaggaggtggtggtggtgcatttgaaccttttgctcccagtggtggtgggccactacttgtaccacgacccagccctggtggaggaggaggaacaggggtcttggatagaggtggtggaggcggagcaggggtcttggatagtggtggtggtggaggaggagggggagcacccaaccttgtagatgaaggaggaagtggcggaggggctggtggcttgggggcatttgaaatattagctttaggaggaggaggtcgaggtggtggtggtgtctaaggtgggccagcccgaatagaaccagaatgagatgtaggtggagccggtgataatgaatcctacgagttatcatgtgctactgtattatgtgcttacagcttggcagacttgcaatcagcaacctggaagtaagtcttccttgaccctaagcgcattgtgccccccatatgagttgtggatccctattgagagattgaacaagtataagtagatacttaatacatgaaaaccatgtaatcaatcaaatgagagagccagattgtttagtacttctggcataaatatgatgcaagggcttgaagtttctggttcaaactctgtgctgtttgcatcgtgaaaaccaagaatggagcgggcaaattcaacaacagccagctgcattcccaggcatatgccaaggaaagggacttgattttcacgggcgtactttgtagcaagtatcttcccttgcactcctctatcaccaaaccctcctggtactaggataccatcagcaccctgcaacaaccgaagtgttgagtcaaacatatttaccaaattggtgtgccaggctccattaaaattcacgtaccttcaaaagatcccatgcagccttatggacatctggcgtctgcaagggtacgtcatacaaaagctcatgagagtaaatacattttttcgtaccctgagagaaacaaaaaccagagtgccaggctcacctcttgtgcagttatctcttcaggtcactagctgcaacccactctatgacaagctttttgtgacattgcaca

SEQ ID NO: 35501 - DNA, 1666 bp, Arabidopsis thaliana landsberg
caatgtagctgaggagctgaagaaagctttgaaaggattttgctttaagcttctatggcggctattggtaggggcaggctttactcgaattacaattacatttgtcgaccttaatcagctattgcttttgtatatatatgcgttgaattatctggattagatttgcacaacttgttttgaatcttttgatggaatcttcagagttttgtatgagattatgcttttcaattctctttattgaacttatatgcaggttgattgttgaattgatttgaatcagtattctattatagtatcaatcaatctgaagcttgatggtgatacactgagctctattaccttgaacgtattttgtatatcttctttttaaggcattggcaagtgtagttgaattaaaagaacttatctatgcattacaattcgagaagagtttgggaagagatttgccggtctccctagtagcatcaaaactatatttgtcgatggcaaaagtaatctagacgatttaggacatctcagtatcatcctcggaagacatagtcatatagatacgaaagatccggatgctcatccatcaaatggtgaaggtcaatgttatggtgaacaattagacacaattctttgtacattgcagaaaatctgaaagaatgtattctctacagtactcttttttatatatttagtttggattaaacattagctgcttccgtacaatccaattttaaatgttatgagaaacgaaattggaccctcttggtgcttttggttccaaaccggtaatgccgtaatggattcggtgtaaaggttgggcctactaaagtgtgatacgacaaaaacgagcaaagtttttcaacattctctcaattggtgcgcctttgcacgaacatgttatcaacgaaacattacataaataaaaataaattctttgtcagacagattaaaaaaaaaaaaaaaaaatcagtctcaaggttttttagtggaggcctagagcaaagatttgcagaagacgattatttctatttcagttctacaaattggagaagtgacaataagcaaaatccactttgttcctttttacatttacttaatggcaaaatcagaaaacgacaaaaattctccagagaaacaaacatggagcacatgggaagagcttctcctcgcctgcgccgtacaccgtcacggtaccgaatcatggaactctgtttccgctgaaatccagaaactgagtcccaacctctgttccctcaccgcctccgcttgccgccacaagtacttcgacctcaaaagccggttcactcaagagctggccgtaccggaatccgtcgctgcgatctcaaccgctccttggctagaggagttaaggaagctccgcgtcgatgagctccgtcgcgaagttgaacagtacgatttatccatctccacgttgcagtcgaaggtgaagcaattggaagaagagagagagatgagtttcattaaaccggacacggaaaccgagaatttagatctagagaggaagaaagagcgtagcgattccggtgaaccagtcccaaacccgccggttcagctaatgaacgaaaccatttctccagatcccaaagaaatcggatcggaaaacacggagagggaggaggaaatggccggaagcggcggcggagaatcgaagctt

SEQ ID NO: 35502 - DNA, 252 bp, Arabidopsis thaliana landsberg
  unsure (1)..(252): unsure at all n locations
taatacatagagttcaattagcatattttgatccggtaccgaaatgggatctccaatagctggagataagagattcatatgaaaaaacataagtaaacgagcctctgcttgagcctctaaagataaaggcacatgaacagccatttgatccccatcaaagtctgcatagaaccttttttaaaccaaaggacgcaaacaaanagggcgggcccccactaaaacaggccggaaagaccgcatgcctaaaccatg

SEQ ID NO: 35503 - DNA, 3085 bp, Arabidopsis thaliana landsberg
atccaattcatttcatatctaacatgagtattatcataaaacattttgggatgatgagactctacattgtacttctggatttagagaaaattacttcatactcaagttttgctcagaatggaggttaatgtggtaatatatgttgtttgttctaagaccatcccattggtcataaaaataagagcgtctttgcaaactagtaagttttcaaaacttaattagaaagtagtacaaatactatttataatatgtaatatagtaataatacgtttttctttcgttagagagagaggtgtaattaagggagagagagaaaacatgtgagagagagagaaagagtgagtcatggttttgttttttctttattacatttcattttccctacaattttaagaactaaaatactcgtttgtaaattttatttttctaaaatagattatataaataaaaatctatgtttttttctcaatcatttgatatgaattttgtttaataatttttaaattttatattactgagcactgtacagatatagactactgtacagatatagaccactgtacagatattactatgcatttctttttttctctctttgaagttaggttttctgctcgtcaatcaataatttagtcgcaggttgatttctatctatacattattatggttgctaattcagaaatttgtagttggcttcgaatcatgtatatactaattggctatgttcggattcaatttttatgtgatatttgtcactgctggtaatatcattgtttatattcgattaacgttattttgtgtttaaccacaacctctcctctcacaaccacaaaccatggaaaataaataagcatattagctagtctctaaaccaattgaatagagagaataaaaaaactatattgttgaaataccagaaacaaaaaagaacacaaagacaaagagtaatttttgtacttatttgtacagttgtttattcaactataataatttgtatccatatatgtaaatagcttatatatatatacagtgatttatttctgtacagatctgtacaccactgtacagaactgtacaccactgtacagaactgtacaccactgtccagatacatctttataatggtgtacagatatctatacagtggtgtacagatattactatgcatttcttttttctctctttcaagttagatttttctggtcgccaatcaataatttagtcgcttgttgattttgatctaaagattaatagagctgctaattcagaattttgtggttggcttcgaatcatttacatactaactggctacgtttgggcttaaattttatgtgatgtttgtcactgctggtaatatccttgtttatattcgattagtgttattttgtgtttaaccgcaaacctctcatctcacaaccacaaatcatgggaaataaataagcatacagtattaactagtctctaaaccaattgaataaagagaataaaaaaactatattgtagaaatacgagaaacaaaaaagaacacaaagacaaagagtaatttttgtatttatctgtacagttgtttattcatttatattaatttgtatctatatatttaaaaagcttatatctgtacagtgatttatttctgtacaaatctgtacaccactgtgcagatacatctgtataatggtgtacagatattattatgcatttctttttttctctcacaaccactatacagatattactatggtgtacatatattactatgcatttcctctcacaaccacaaatcatgggaaataaagaagcatacagtattagctagtgtctaaaccaattgaataaaagagataaaaaactatattgttcaaataccattaaaaaaaaaaacacaaaaacaaaaagtaatttttgtacttatttggacagttgtttattcatctatataatttggaatctatatatttaatgggcatatagagtgatttatttctatacagattgtatctgtacaccactggacggatgtggtgtacagatcaatccggacaatagtgtacagatacatccgtacaatagtgtacagatacatccgtacagtggtgtacatatgtggtgtacggatacatctgtacaaacatttttttttatgtataatggtttatgatataattttgaaaaaattttaaacaaaatgcatatcaaatgatagagaaaaaaacatagatttttatttatatgatcaattttagaaaaataaaatttactaatgagcactttagttattaaacattgaggaaatgtgtaataaagaaaaaaaagaaatttaaaaaaaaaacttgacccactaaatatgccccacatgtctttctgtctctaacccaaccaaaaccgactatattactaattgtgaatagtatatgtactacttctataattaaatttcagaaacgtactagtcttcaaacaaactctttttgtttttgggcacgtgttgaccaaaagaagtttattgagaaagagactaaggaaaatggtgtcgaagtttcatcaactcctgaaaatgcgatgcttaagagaagtcaatggaaattacagttgttgaaacaaggtacattcacgtgtcttgtttttcttcttaatgttcaactcatattcaatcaacttttgatacatatagattgaacatgtatttggtgtagttgttttaaaccatttaacttttattgatttagttgttagaccaagcaagcaaacaaaaactaaatgaattctcacatggttagggaaacaatacaaattccaatataatcggttggtttttattctttgttatatatatatgttatatatatatatatatattttaaaaagatttgttgtgaattactctgtagatctgtgatgaaagtgcactacgagctgtcgggaaaaagtgacagaagtgatacactttcaacggtacgtcttcttttgttttgttttgtttttatagatttgagacttttcgttagcataacatctgtcaagttggttagagaaaaattgattagataacagactatttttgatttgatttgtgttgtgtttcttt

SEQ ID NO: 35504 - DNA, 2504 bp, Arabidopsis thaliana landsberg
caagcttatatggaatctgagacagacaaagagtttttatcggtttttgcttcatttccctcagatgagccgtggttacagaatgcaaagacagcccccaatgtatcattgggtgaaacagtgagggcaaggatgaagcagatgaccgtcatgaacaagctcaagaaacgagcactcagggtaaaatacatattacttataaactatccgaaaatgtatatctcttctgatctaaaaagcctaacaatagtttcgtttggtcttgttacgttacctcgataggctattgctgagcatttatcagatgaagaagctttaagtatatgagaagggttccaaatcttgtgcacatgccacagagggatgattaacatcgtcgagcttaaaatcgggttgcagaaacttggtcatgctcattccgaaagatgatttacagattttgatggatgctgtgagctttgatttaccattacttttcagggccagttggggtgtgatttgaatgcagttaactgagctctggatggttttcttctactttgcagggagacatcgatagagatggatatttggactgtgacgagtttattgccatatcggtacacctaaggaaaatgggcaatgacgagcatctcaagaaagcgtttgcgttctttgatcaaaacaataacggatatatcgaaatagaggagttaagggaagccttgtctgacgaacttggtacaagtgaagaagttgttgatgccattatccgtgatgttgacaccgacaaggttggttaacttcaccatttcactctcgttttcttgttgaaaaaaatcccatctcatagagaactaaccatcatgaaaattgttttttttgtaggatggaagaataagttacgaagagtttgtaacgatgatgaaaacaggaacagattggagaaaagcttcgagtcagtactcgagagaacggtttatcagtatcagtctcaaactgatgcaagatgcgtcgttgcaggtcaatggtgatacaagatgagagaggcttaatctgtgtcactcaccagtctggaagattgaatcaaagggatgcaaatctttcttaatttcttaatttttatcttcttgggttgctttttttttatgacaccacgattaaagctttttaggcatataaagttgtaagagttgtgtgtttgatatcctggctaatgagcgagctgagtatggggatcaagagagaaaaaccgtgttggcctttggccctgtgtcgatattttgtataatcttgtgttaaaaaaaaataatatcatcaatttttcttgtgatcaatttgtaattttctataaccattcaagaattatatgagttatggattttgacaatgagagcttgctttacagataaacttacacgagcttatatcgaatataggcattttaaatttaataatttcaaaagaggtatgttgcacagttgaatgggccgcttattgtctgatttcggacgattttaaccttctggagtaagtgagaaattgatattccatttttgcaagtggtaggatgatgtgaaaataggtgaagaagtgaaaacgatataccctagaattggacttgtaaacccaaaccgtttagttgacagtctgcgatgcatacacagatacaacgacacaacactacaacattaattagactttctcggcttgagaagatgaggccaatgaaatgatattagagatgacttttcacaagaaataagtacatgttttcgtgaagacatatcagaaatgtcttaataaataaattcttaagacaaatgcctattttgtaattaactcaacttacacaaagccagatgtacaaataaaatcagaaactaaagtcccatttcgttttgtcctggtggtcgactttgtctttgtggtcacagttttgaaaacaaaactgtacaatgttttaaataagtatataacggaaactatattggccataaacttttatcaatcccatatagctatagtagtcgagaagaaggaaaattcagacaaaaatataataaacgtcgttattggcttatcgcagcatcaaatctaaacaagtggactaaatatttgtgtcctctatattattgtcatcaagcataagacaccagtcatttgaatatttgatcaacagccttataaaaaataaaaatttacaatcatatctactcgatgagtttgcaactgttcatgatattgatatcctacaaatctgatacccacacaatgtagataaaaatagcatcactgaacatctgttaagtattataatcacaaacatacaagtgaaaagcaatttaactcaaatcattgctttttggtacgtctaataaatatccacctcgtagtagtctcatcgacacgggagacttacgtggctatttttgtattgttgccaaattttattgaaaatcaaacaaatcaatcatgcaaaaggcgtgaggttgaacggtacacgaaagatacacatgtccgat

SEQ ID NO: 35505 - DNA, 737 bp, Arabidopsis thaliana landsberg
tctggcgcttgattatattcgactcaccctactcttaattatatctcaaatctattttacacaagagaaacaaagagtaaggtataagtaaaccaaaacacaactaaaacaggaaatgtctccaacaccatagggggaggtcttatcccctcttctagacttttttattaaatcaataacattaattatataaaagaattagacatacatattgggtatcactaataaatatgttttagaggccaattggtaacgactttgactattgacgtacaaatttagattgcatgaactttggctgcaaaaactttgattgtaaggaacctagctatagaaacttaagagactttagcatcaattcataaaaattgtggatataaaattttgattttaaattatatttttggtaattttaatcaatttagattttggttttgtatcaaaaattttatttatattacttatgagtttcggttttgtggttgagcaaagtgatttcctctatgagagtttcattcatttaatcgaagtgatttcctctgtgagagtttcattcatttaatagaagtgattaattatatgatcatataattaaagagtaagtgttttactatatgatcaaaattatattagattttattatattcattcaaataatagaagatttttaccaaacctctaccctctcaactcatcaagagtctacatttacaaatacgatccatggggccttccca

SEQ ID NO: 35506 - DNA, 3028 bp, Arabidopsis thaliana landsberg
gttactaaaaaggggtaatgaattcaattttctctaaacgcacgtgacaattggcaccatgaaagtatgtattaagtatacatattccaatatatgtagtccaaaagaaaaatacatatattatgtatctataatatatcacatcaaagtaggaacatggaatgcttggagcccatatcgttgcatgatgtcatggacgtaactgcccaagtatcccatcctccgaaaacacttccttgagaataattcctttacttacatttgattctgcatttttttgtctacttttatatcattgataataggttgattatatatgttatgtatgattctaattaatgatcaaaagtatcatgaagcatggcgtgggaccgagggtatggaattcacggtttcacttttttgacatgttggttgcgtgttcttagtagtgaattactagcaagctttgaatttttgatcgatcaacattgttgaataatcggcgattagtcgtcaaacaagccacataatttcgggtcatgcacaatcattataatgcttaattagtcctttatctgtttttttcctctctagttagtctttaatacttatatttatgagattaatgatggtccaattcgattatttgtccttaattggtcttagtcaataacatgtgcactactttgtccatattttgttttgcttttactatttctccattttccctataactcttatttagttttgaactagctaatacattagaaacttacaggcggataatttgaggcaccaaacgatccataggctgaaccaattgttgacgacccgtcaagaagcacggtgtcttctagccgttgcggagtacttccaccgtcttcaagctctaagttctctctggctagcccgtcctcggcaagatggataatactaaaacaactgatgaaggaaaccaaaaacaaaaacaagagaataggttgattagttagccgccagcttgacctctttatcatatatatcgactctctactcaaatacagtgcaattagggaaaattgtttggcttctttttgttatatgattcttactattatgtttttaatcaagatgcagattatatatatagacaagtattccatacctttaatgaattcttccttatgcaaattcaagtgaaaaatttatacttgatcttcaattccaaacacaagaacatgagagagtattgaaaggaaacaaaaatagaaggctggcaacaattgcagttgcatgcaagacttatcacttgttaggtcaaattaaagcagaccagtgaggaaggtgacaaatggtgagttctgtaggataccgtcagggacttgggatcagtaccgttttgctttgggttcaacgctcctttttctcctttacttttcatttctttgctgtcaccagttaatttttttcaactcttctatttttatttcttgactgataaaagtgaacattacagtagtacacatgcatggtcaaaccaaaacaacaaaaatctttttacatcacaaaaaacgagattgatttagccgcaaatatttgaaaaaaaatagtttctaagtacatacactagcaatcagattatacatgtgtttattcttggattacaaattcgtttgggccgtaaatatttgggccctaaagttttctattgaattttatttctttttaagagaaggaaaaaacgtacaaacaaaacattataactaaagcccactacttttgggttttagagtaaacccaacaacacagtacatgataagaatagaagcaaacagaacaaaataataaaacagagcagacaaacacacaaacaaaagaaacacaagttacgagcagagaagacctaaaagccacaatgaagttttacaattcaaagcatacaatctgcttttgaaggtaatttcctgaagaagttacttggagcagaaggcatcttgcttctgaacttaggatgcctcatccagaacattccacccgcaagagctatgatcttgaaaggcgtcacgtacaaaatcatcgcagcaacaagacaaaaaatcacaaacaagcaagtcgcacgcggatctcttcaactcaacaaagcctgaaacctctctccttgcgttgcaatgtctccaacaacagtctggatcctacccgcaacgcttctgagccggtcatatctcagacgcaccaactcttgtgaccgagacgttgggaatgtgtcaaactcttcatcgagctcatcaggacctacagcctcggcccatgagagtttcatatccatgtgaggagggtgtctcggcctggacctgaagttccacaatccaatgaagaacatgtagagaaacatggtaggcaaaatcagttcagggtacatgaccaaaatgaagaacaagacattgaccagaaccgaagtaaccgggtatctccagttgcaaacatcttcgagccacttcccgaccaagaaataacctgaaagaagcgacattatgcgaaaaaagttggctttgcttcttctcatgctccataagtgagaatctacatccagcatgtactcgacgacctctttcctaagtggtggctcagctcggccaaggcgggttgaaacaatgttcatggcttggtaccttaaaccatctacttggttgaccgtgaaagggaaaagatagtgcattttggggagaagcgggtggccgtaattgtagatgatgttggctaaagagagagttgtaaaacggacagatatttgtaggtcccccgttttcttgagaccgtgcggttgaagaacaagtagcggaaatgaatgtgtgtagatcttgtgagcctctagtgtagacaaccttattcgaacctgttccaagggtttcaagcacacaaagttagaagtgagacataatgcatatcaacgtatgagtgactagggtatgcatgcatggccataataaccaaacagagctatttattttagcgaaaaccaaatcaaattttaaactgaatagtgacaaaaataattaatccaaaaaaa

SEQ ID NO: 35507 - DNA, 4247 bp, Arabidopsis thaliana landsberg
  unsure (1)..(4247): unsure at all n locations
gggtaactttggtttctgccaacaaaatggtggggtaatgggttaacttatgggttctccttcgtttgctaggggcagctggaataataagctgcaacccatacttctcttaattatcatatttctttatatgccaatagaaaatggtagagttgaacaaaaaagtacctggggtgtgcaggtcgtcatgaatgataaatcaaagtcagccaatactatgtgtccatccttcttgagcagtatattctcaggcttcaggtctcgatatacaattcctgtttatggaaaatatatacagatctttaaccgaaacaacagctaaaaaattattggaagaagagactactcaaggcatgtggcaatgtataaataagcaatgtttagatcaacagagacaatgattattattacccaagcagtgaagatattctaagccgataacaacctctgctgcatagaacctgatgacagagattgatcagattaactcataactgcagatataataatgacaatgggatttattgccttcatcagttatccgagtaaccgctaactgaatgcttgctagaaggtgatatgttttcttgctaacatagtgcccctatttagttaaaacatcaccaggagatcttctgttacacattatacgtttagattgaggaaaagagggaaccttgcagagtcttctgtcaatattttcataggttgtctgtcaagtagtgcaaacaactctccacctgggcagaagtctgtaatcaaacagacgtgtgtagaggtctgcggaagaaaaagaagagcaattgagcaatgaaacgggcaaaccgacatgatgcaagcaaaacagaaaaacatctacctgaaaagaagcgtagagagtaggaaggaatggatgatccagaagggaaatgatttccctttcgatgcacgctcggtgagcctgcataaagctgcatgttgtcaacgaaagaaataatataaatgttgaatttttcagctttccttcttaaaaggaaactcattctccatcatataccttgttacgattcaacatcattgttttctccattgctttcatggcatatagttcacccgtgcccttcagctcaaccaaatggacactttttccaaccaaaaaacgccatataagtatacacgaagtacaaggcgattcatggacagatgaatttattgctatggacacatgcaatgttgtacctgccagtatcaccagagcccaacggttttattggtttgaaatgatgtagtcccactgtttctccactcgcttggatctacaaaggagactgtcagaataagaacaggatgaatgagaaaccaagtaaaaagtaacatggttcgatgcatgccttttttnnnnnnnnnnnnnnnnnnnnntccttattgtgaggcagaggatagacaggcttcgagtgtgcagcccacaggtcttcgggccgctaaaatacattgcaattcgattgcatttatacttttccatctttgttaagtaataatgaactagtacaccttaccgtattagcatctggaagctctctgacagcttcatctacatttgttgccgtagctttcacctaaaattgtgaccaatgtcatagtctcctttgataggaaagagatgttcaaaaaactcagtaggatatgaaccacataccaatttcgaactctgcatctctgttctctcagacaaacgattttggaggggctctacatgatcacttccatcaagctgcacaccgatgaagtattgaagctctccctaatagatgaataaagtcatgtaatcagcaacaatgcacggttttcttcaagaatcggaatccagatataacaataatctcacgaagaccttctgatcacgcataggttgcaagtggaataagttccagaatttctttcctgccacagagaatataatgtaaatttaaaactttatacaatgatcgacagattaatctaagaatatcgaaaaaatcgagtaccgctcttggtgtagttgatgagctgaactgtcacttcggtttggttatcaatagcatttcgaatcttcttcactgtggttagatcagtctctggaccttgtagaaacctaaaaccatgaaacaaaatttataaacacatgctctatgctcaaaaatattttcaaaagacattttgagatcacattcatgtaatacctgcaatttcttccaagaatttcttcacggctatattccgtgagctccaagaaactatcagatgcaaaaatctagaaacataggacaaagcaaacaatacgttttcagaccaatcgaaatgaaacataacaaaaaaagtttccatttttctaaaacatttgttcttacaatgggattatcgggaagcctaggatcagtgatgacgaaattcttctcgatacgttcgagtgtagtagctagatcaataccctttctcatttccttttgtctcactttatcatccacactctcaggtctctcgtccctatcactaatctcatcatcttcttctccatactctataaatccatcgtctatagattcatccaaagattcactcttcttcttaatcctatcaccacagttcacaactatcatatcaaagactaaatccatttttataaagtatttgtcaggtcaaaaaatgatctagtaaggattattaccccatgaaggaaagagaagattttctcgattttttctcgggaatttcgttgattcgctgcatcgagtttcttcttccgccgccagagtttcttcggcctgacggaacaacattttcggacattcgccgagctggttttttcggaagttcatcgctctccgattttgtcatgaagggatggagattcgtcgattcgcttagtgcccgaggtctcttcaccgcctctactagctctgtcactgagtttgtcgccatatctttttggcgggcttttacaaaacaaaatttgaaaatatttttaagaaaacataataaatggaaaaaaatttggaaaaacaaatagaaaaagaaagtatgtaaataccatcgtatcgaatcagagattccggaagcccattgggcctcaaagccttttctttggccccttcagtgtgcttgctcacctccacttgcattctggtccaaataaacaaaacatattggtatcttctgatttttcctcaaaatcatatttttttatcagattctataattcttttctttttcctgattgattattctcttttgttattctacaataggatccgtcggtgatacaaatctttgaattattgcggagaaagcaacacaaatcacaggtccacacttagacacattaaaaagggtgtaattttgaataaaagaaataaaggagagaaacgagtaaataaaaaggaataagggactaacccgataaatttgaggactttgccactctcgtctttaataggagcaatcgtgagaagattccaaaaagaggtcccatctttcttgtaattcaatatacgcccacaataattgttaccagcagctaatgtctctcttatctttgctaactcatctgcatctgtacctgatccttgtaaaaatcggctacaataaaacaaaaacccaaattatgttcttttcttctttctttttgtaaataaaattcattcattgacaaaaaatggtggaaacttttgtaagaaaattttcgaatttgcaaagaaatgttcgatttaaaagaaatattttaagttatcattaaaaaataaacttagtttataaaaggctattagtttggaaaaacaacataaaaattaggtttataaaaagtttttagaaatttagtaagagttactaaatcatttaggataaccatacctaaaacttaatctttgtaattttggtacacagtttcgaaaagttctaaaaaaaaaacataaaagttaggtttaatttttgaaaatttagaaagaattactaagtcatttaagatatctttatacatttatagtaaccataaacctaaaaacaaaactatgatatttaattagaaaaaactttgcaattttggtaattattacagaaaacgaaacgtattttatatatgaaaaaaatgctctaaaaattttttgaataacttattaccagtttctgccgacgacttctttggaagtgtacccagtcatattgaagaaaccagcacttgcatacataataaaataatcaggttttgtagcatctgagaccacaaacgtttg

SEQ ID NO: 35508 - DNA, 4529 bp, Arabidopsis thaliana landsberg
  unsure (1)..(4529): unsure at all n locations
ctgctgtttctctttatttggatgtcattaatctcttcctatctctcctcactctcttaagggctgctgatagttaggcagtcttgtctctttcagattgctcttaagactgtgccattgttatctagttcatatgttcaaattcttttgtctgcaaaaggaaatttgggttgtaaagaaatgttgatcactgcttgtaacatgataggagaatccaatacatttgtacttgtgaaggttgttgttagctttagaagtcatctctcttcactcaattgaataaaaggatattacaaagggaatgtcttctactccattatgtttaaacctattcttatcataagcagttcgttctacaaagcatctacttctttcctagcttatgttgttaaggtgccatccatttggacatggaacttttctgcttcttctcagcagcaatggcaagtagcctggatacgccctgagtccatatctcgtattccctttggtttctgcactcaaattcaatgaccctctttgtttctgtctttaagccaaagtagtgatgcttgtctccgttgaaaagatctctgccagcccatgcaggtatatcctttctcacttcaagcaccatatctgcaacacaagtccaaatcaaagactattatgacttgtattatctatctagctttactttaaaagccaggctagtgtaagagatgacatgtttgtgctgagaagaacctacgtttcttcttctttgtgaaggtccctccaacgtgtttacttttcaatttcagcacagcttggcctgctttgttgatgtagacagagacaatcttccagtggagttcacctgctttcaaaattcaaggtcagcgacccttgctttttacttggcttacaaatcatttatacgggtgtagctttggagtacctccacgagttcgtttgaggagctcagtgcctttagctagtaattcctggttacagacgccaaggaagtcttccccagccacaggtaattctccactaaagctgctatcactatgctttgtgtcaacctgtccacacaacgctgaacttgcccctttctcggctggcaatactgcagctatgttccatacttccttaagcgctcttgccttgagtgtagctgctcctcgcagagctgcaaaagaaaagggggtgaattcaggtatggaatctctacagaagtaagggtgactacgttttaatgcagtacctgttgcagcagctgcagtaagggtgacaatatcgtcatgggacttaacattcacggcagagctcaccacggatgtcaaatgatccctttctgctcccatgatttctgcagcctccacacactgagcagccaccagagcagccgcagaagccatggccatatcgattctggccatctgctcgttcttaccaggggaagaagctgctgtggctgctgctacagctgccacagcagatgcaaccgctgcaacagaaacagctgcgtgaacctgtgcattctgagccctagtctcttctttcttcttttccttacggtccttgagccacctaccaactgtctttggaccggttccagccatgggggtattgcttccatttccggtggtaccacggctgcctcctgtgccggagaagagaggctgtatggtgttgtgggtgcgaaaatactgcattaggactggtttattagataagctgacttaatgaaaaatccaacaagttgatggcattatattggactacaaaaagcaaataaaggattaatgaactgcttggaaatggaggtaaagtgactgctcgctctaaaagcatttaccgataactttcttaaaatgagccaaccaaagaggagctctaggcgttaccgtaacattcctattcctgtgtccaaccaattatgtctttaatcttttataaattccaattcatcaagtaaatgcagtagagacagagcattcaatggaagaagaaaaagaaaacattgaaactgcataactatcaatctatcgctttaatgatcgccgaccagctttataagtcccaagacccagaaggctaaaccttgcagcacttccttaaaattatgtatggcaacgacccaatttacggagaccttctaccagtcatatgaatgaacaagaaacaaaaaaaaacaatgtagtttttttgtgggtgaaatgaatgagagaggttaaagtaaacaaacacaggttgtaaagtggagagtcaaagtcaaatctgtttctgtctgctgcctctgcttttcttttgactcataatttttgtttactttgctaacaaactctaaagtatggcggagacttacgttctaagaaaaaggataaaccaaggaaggattagagagatagtataaggaaagaagtaccttgatgacgtcgtcgaattcatcggaaggggagatgggaggactgtctgtctccgtaaaagaaccgccgccgttgagtgggccgctgctgtgtgatagcctccccgacgttaacggtgacacctccttcatttttcaaaacagaataaactcatcatcaagatacaaaaacagtgtgtgtcggtcggtccatagctatgtaaacgtaccgattgagacattatgcgctcaagaacaagctgtgaagtggccgaggcagcgaacgagaactggctactaacactagtactgttctccggcggacattcttctttctcagggtttagcgtttcttccggtatcggagtgttaatggatgagggaggcctgttggtggctgaagctgatttggcggtgtggagagctctggagacttccaaggcagagacactccaggatctagacaagaactccattgggcctcgtgggctttccggtagttgagtactattaccgcctgaagaaaatatctccggccggcgagagctgttgattgggttcggtcgtctgagttctctctccatcctttctctctctctctaattaactttgcttcgacttcagagcttgactaggaaacttatgtgtgtgtgtatatatagatagacaaagtaacgtttaggtatttcaccttttctttttcttttaaagaaaaatgtgattatatttcgatgagagtaggagtgagtagtactactcttgacataatatatagtcgttgcataaataatggattactactataaaaaaaaaagacgtcgcttttcaataataaggccgcatctttgccaatcccattgtttattacacataaatattactttagatgtatgtatcaacgagtcttgagaaaaaggagggaatcaagtcatccttgtatttgccttttcttaatttaatcagaaacattaggatagcttgactagtcagtcataggttatcagacatttatgtttcaattgaccaaaaaagaaaggaaaagaaggttgaatttgcgtttagagtgtcttgtttaaaccaatcaaacaacttggtttattgttgtggatcatggttaaactaacggattaggtgctgaaatttggtgtgagaaaatgggaggaagagaaagatgagaataaaggaatgaaacgactgtgtatgatgatcagtcagtctcttaatttggtcccttctgcttcggttttgaaacacaaagctgcgacctttgcgtacattcacacatgctgctgccttggcgtgctttcccttacgtcaccttcttctctctgtctcttttccacttcaatgacacaaaacttggcaattagtttattcatccatccaaggttttcttcaggctacacaatcaaaacttctgatcttctttcatctttgtacaaattaacatgattgttgatctatattctttggtactagagcattttgatatatataaaaacgcatatataagatatttcaaaatctcatcatgtgtatctatattaaatttatttgcactttggaaactataggtgggtgaccactgaataaagatacatcctttattcccttttgctctgtctaatttttagggatacccacattttccattctttataaccaatcccttagaaaaatactagtcattttgtctctctgattattcctttgccttgcaatcattgttcttgtttggacgttttgtattttatactaccaattaaaaattgaatgtatctgccactttgaatgatgaaccctcttttccattttattgtttctttaaactacttttagtttttaggtaccatcttcttttgcttttgatttgcttacaatagacacctacatacctacaccatantccgttctattcttagattagggttttgaaaccaaggtcactttcgatgcaaaaagcacctctttaggtcaaagcaagcatcttcgaagggacaaagtttgaaactttgttttgaattcacaaaagaaaagacttgcgagctaaaccctgttgtctgtttgatctacacgtacaaaaaaccattcatgagaaataactatatatcaaaagtgtcaaagaaaagatgattgattccctaaaggaatcaatctg

SEQ ID NO: 35509 - DNA, 695 bp, Arabidopsis thaliana landsberg
acaagtactctatgcgtcgcaatgcacaggcaacacgacggctgccgatggatcggcggccaagtgagccctgacatggtccacgacaaagaagcgatgtgctcagatgagctccgaacccgctgaaaccggcgccgcgcaagcgcccaacagcctgtttgtgcccgtgccccagcagcaggaaatgccgttggcgatcgtgcacggccagcctgtgctgcaaatgccgcaggacttgtacatcccgccggacgcgctggaagtgtttctggaggcgttcgaaggcccgctggacctgctgctgtacctgatccgcaagcagaacttcaacattctcgacattcccatggcaggcctgacgcgccagtacctgacctatgtggacgagatccgcggccgcaacctggagctggcggccgagtacctgctgatggcggcgatgctgatcgagatcaagtcgcgcatgctgctgcccccaaaaaaggtggcggagggccaggagcccgaagacccgcgcgccgagctggtgcgccgcctgctcgagtacgagcagatgaaactggcggcggccgcgctcaacgcgatgccgcagttcggccgcgacttcctcaaggccgaggtctacatcgagcagtcgctgcagccgcgttttccggacgtcaacgtggtggatttgcaggacgcctggcgcgaca

SEQ ID NO: 35510 - DNA, 2173 bp, Arabidopsis thaliana landsberg
taaaacgcgttatagccatatttatgatccaaaggggttttttgttgtccgtgtcgttcgtcgtctctctcgccggacttgttcattcagatttcgtctctctctctctctcgcactcttctttaattttgtcctccgtaaaatcttgagatggcgtcgaggaactccgttgccgtaatcgctttattcgctttcgttttcgccgtcatctctccattcgccggcgctcaatccttagctcctgctccttcccccactagcgacggtaatgttttccgattccacattctctcaccagatctgatattgttctcttaacattgcattcagaatcaattaattttgggggaaattaaatctatgattgtttgatgattgataacacaggaacatcgattgatcaaggaatcgcgtatttgctaatggtggtggcgttggtgctgacgtatctcattcatcctcttgatgcatcttcttcctcctacaccttcttctaatctctctctctctttcttctgtttttttttatttctttgcaacttcttattagtttcttcaatttgccttttttcttcttcttgtggataaaattttcaagagttaatttcatcatcatgttctcgattatgatttctggagattgattgattgatgatagtctctattgtttgttcttttttgtttattctcttccatattaaatttattcttcttcccttataatattttgtgtaatgtcatcatttagcttaaattaccagaaatttgacaattaccaactttattggcctcacaaaagaaatctctgaccagttcagaagcaagaaatgaaagccagaaaatttgctcaactcttttgaattcgattctcaaagtcttatcttcagattacaatttctcatgaaaaagtttataaatcacacccttgatcagcatgcatggagttaatttcttgccataagaatctcgtgttaatttacttgttcttacaaaaaatattaaaacgaaaaacaaatgcaacaacttgcataaataatattccttcttgacaaaaaaaaatcaagttttgccttgtaaaggtgtagtaagcacctaatacggtaacctttattggattagacgcgcaagtgtgttctttttagcttcgcatcaaaacaaaatctgtctagtataagtgttactgttggtggaagttgtgcagtccgtacttgaccacttcgtaaaacgataccacaatggctacagatggtcctgctagtcccactctagcccctgctccactaaacatccctctcatccctccgtccctataccaaaaacccgaccgggatggttaagtttggaaacacgaaaattgtctaatggatctctaactcatacctccaaatctctgccaaggtttgtcttgtggtcattgtcatggctctatctgtgttcttctgcataattcaaacaaatttaactgttacttggtttaagatccaaaacttacttaatgcaagctggcgatgaattctagtttgtagagcaacacagtggaattatgaaagatgaagtgaaaaaggtatgtttacctctatttgacgcctagtctttgcaacatctagagggcaagtagctgctgcagcaactgcacccgcaacaaaaccagcagcgaagtttgcacctattatactacctgcccttggttcttcacccatggccgactgaatgcttctccgggtctaaagtcacaatgaaacaatcgtgaggacacaatggatgaatatggatgtgtttttcatagacagattaactcacaggctcaagtatcgaccagcagattgcagagaatggaacatcccttgcaagttgagaaccaagaccagtccataacatcctgtatccattatttgagcccttcactgggttgacgacgtcaactaatgtcttccaaacgccaggcagtttcacatctctttgcgttcccttaaatgcctgttagtaaaacacaggaatcgatatccattggttctgtgtccatatctccacaccattacaatgaatgagggcgaaaatccttaaagagttacctgcatccgtgtccttgctaactcaacagggtaacaagagatacaagccaaggagcgtgctattgtcccagcaactagagggacataaaccgtcaaagatg

SEQ ID NO: 35511 - DNA, 3842 bp, Arabidopsis thaliana landsberg
tcatcccctatgcatatgcaacaatcctaaatgaaacactctagactcgatcctaactgtgatgttactacatgaacactcttttttttatgaaataattttctgaattttttcaattttttttggttttttctatgccttacatgaatgcagactcaaaattatacacaatgcagcacacacttcctgagtcctcccccaaacttaaatcacacagtccattgtgtgaataaacttggaagagagtactcaggacaaatccaatcacagaaacaaaaaatgaagaaacaaatcacaacatacggtaaatacaatggtgaagtgaagcgcttacctcatcgaagaatgaacgtagttgctcgtcaatggctgcctgcgattgctcccatgccatagacgaaccgccttgttctgtatcagctccagcaggtgggtactcgacctcatcagctctgtggcggccagcaccgctctgaggaaactcgacctctctccttttgctgcggccagcaccacggtcgagtgatctcctcgagtgaatgaggcgtgatctgctgctagatcgagtgagtgtagccttccttcttctcttgtgttcccgggattcgaatgacgaatgcctagcctggacatgtgggactctctgctcgctaagctcaggcctgtgcgcatgtgcattaaatctcctcgatggcatctccagaggaggctgtacctgtggaatagcagtggtggaggaagaacaactcagcttatctgtcagaagcttgaaacactttgcgatcagcttgtcctgcttcttgcaccacttctacaatttactgttattcttatgagcttcagtcaagctcttgctctacctcgctggaggtacatgttcagcaaagtgatacatgctagtgtcgaactccactgccctatcttcatccatcccatccgaagcagcttcttcaagaagatcatcctcatccaatggcggagcgttctcatagtagaggcatccaatctcaggcctaaaatcaatgttatctccctctattatccgtgtgacctcaaggctagggagaaggatgttagctctcctgtctgtagagtgctcaaacctgaacctgtggaaatcgtcaaccattgcaaactccaggaattcgcaatgacgtaggtgctcgatatccattgctcgcggctcgagtccagcagaaatgattgggactccacaagctatcaaaatcggtgtcacaacgccacctatgcacaaagcgcctcgtgctctcttgcggttattgctgacagcccagctcttgtatccacatagatggatcagaagaagtacagatagaggtgtgtcattgatttcaccctgtaggggcataccattcttagtttggcgaagagttcccttgagggccattgcgatcatctccatatcagagttagtaacagtccctgtgatctctcgggagtagagtacattggctatagaacgctggaagtacctgatgacagggctgcgtatctgattgctctttgacctggaagcattcaacggtacagagctgccaatggtgatccacaagtctttcaactcttctctttcatactttggcttagatcccgttccattggggaagccaaacaatccttccaatcgcttgattgataacctatactcatgaccatacacagaaaatcacaagaatcccaatccttcacaatccaactcatcagaggtcataccttggtagagctctacttgcagcgtggagaggaattgtattgtctcatcttcatacgctacatacggataagccatcagagtgtccagatgacaactttggtacaggtgctgaacatcttccaacaatccgagttgtgcaagtgaggtcgagcaaggatacctcgtgctacagaactcattcagcttgaaaagcctaacatattcctcagcaggcaatacgtcgggcttgtgcagaagtttggtagctctgcgagtctgttcaggcatgtactcatcttccagatcttcgtctataagctcatacctctctgtcatcgctctctttcctcgggctatctcagctttccttctgaagctttcatattctctttgttctctctctggccttgaagatgacgactctgtctcatccatgttgtagtcaggatcaacagaagaactgccactgtaattgctcatgattctcctgtagagatttagaactcaaagctcaaatgtcaataggttagtctcaaagatagcaatgaaaccaaaattattgtcaataagcaatgaaaccaaaattattgtcgagtaacctgagctgttcttgagcttagacgaactggatcgagtatcttctcagaggtcgagttggaatgctacagcaggtcgagtaaatcgtggaggtagagtgagtcgtgaaacctagaggtcgagtaacttctctgaagttggaaggctctgctgaattcacgaacaagaagccaagtaagttttgcagggctcgagtgctttctcgaggtcgagtagcttcttttgaaagagacggcggttgatgtggatgaattggtcaagtatatcaaaggaatcgagtgaagtggttttgtcgggtgatggaggggatgagctggtgacggcggcgcggcggtcgagtgaaattctcaggatcgagtagctctttggacggcgatttgtggtgtagagagattagagtgtcggcggtgaaatgaaaaaaggaaggtcgagtggatttggagaagtcgagtgacgctttaaaatgagtggtctaggttgagttttagattctctctccagcttatcctcagctcgtggtccacactctgttgactgagaaaatttgcagaaaacctactgtaaactgcaggaaatccctgcaagtctctgtagcttctgttggtcgagtaaaataatgatttaaaattttttgggttttaaatatcactcacactcgaccaatgtactcgatctctaggccatctgtagagtaaaagttttgaatttttactctagcctcacgttattcctctaatcctgagaaccaaaaacacaacaaaaacaaatcaaaaataacaagaaagtaaaaattatttacaaggataatcatgggacttcctcccaagtgagcttgtttaaagtctctaccttgactcctcacacttatcaagaggaaaatgaactatagagaaggtctgcataatcctctctgataccatcatcatactcagcgtcctccctggagaagtctacagcagaatactcaattcccctctcttcaaaatatgcttctttctcttctagagggtaatctgtctcttcagaccatcttgaagtgaacttttttctcaggatagtgtcaatcccgcctttaggttgagcttccttttgcatctgatttaacttactcttaagttccttaacgatgttagctagctcttctatagttttctcttgcttatcagacctctttttaagctcttttactcttttagtctcatatccttctccccggatcactctatcgtcctcataggtttttccatcttctgttgacctttgtggagttttgttgatgtcaaacttcagcttgatgtgctttccaaggttgagacttattttcccttccctgacatctatcactgctcccactgaggctaagaaaggtcttcccaagattagaggatccttatgttcttcttccatatccagcataatgaagtctgtaggcacttccactccattaatcatgatgggtaaatcttttagcatgccaaatggttttcttgaagacctatccgcaaggatcaaaaagtcaggtcacacagca

SEQ ID NO: 35512 - DNA, 1831 bp, Arabidopsis thaliana landsberg
cgaagcgttcttgagacccctgctaatgagcgcaagttcacgttgacatgcatcaaacttctccttcaactgcggattttcctttgccgcttctccggcgaaacccgcagcgttattggcataagacactcctaggtgaagcgtggccacagccgcttcgaactatagattaaaataataataaattatgtatcaatgatttagtttgagacatgaacatatatacctgcaattacgaaattatgattttattttataaccacatttcaattctaaacctgtaggattttcattacactttataagaaaaccatgtatatatatttaaaatttaaaccataacttcaaaagttaaattgataatttaaggaaaaaacgtagaacaaactttttaagaaaaaaaataaataattgatcgagcaaccaaaacatttggaaagtaacaagtgatgtatttctatctattacttttggtgtatatatattagtaccgtgctggtggcagaagtcgccggagggtaagcattcaaggttttggtgcagaaggctttgtcggtaacactttgacatatggcgtcaatgtaagttgtggccgaagcaaagattatgagaaatggtaacagaactgcaagagaaactaggaaaaaatagttggagggagaagccatcgttagaattcagattttggtattgtattgttcatcaattgtggttaggtttatataatacttgcaagtatgttagatactacccccttgcccatttgtttcaaaattagcgaatctttaagtcttactttccatttactctctctttagaatttcagattttcattctctgtatagaaactaaaaagtaaagatggatcaaaatatgtggtcaatcttcttattgttagcttttttttggagaatttggtgaatgaaccataacagacctaattttagaccaatggcactaatattagatcaatggcgtatttaaggcttatataaaaataaaataaataaacatatgtaaggtggaaatgaatgattattataactttttcttccaagaaacatggacaaacacaacacatgacatggaagatatggtggatttattcttctattaaaatatgaaaaagttgttttctacttttatagaaagaaaaaattgtgtaagttttgacaaaactttggccaaaactcattaatgactcaaatgagatttttttctttcttacccccatatagttttcatgacttcatcatatcctctcttctccggccagattttatttctttttctatttttgtctcttttctttcaataatcataaatcttaggggcgttattggtttttagtttacaagaatttttgataactataagaaagtcataaaaatataaataaataaaagatttaaaactgtttttatagagttctttttaatcttgttgattagttattttgtaaccttgtaaaaaaattcaaacaatctgtatatttgatgatacttttatgacttgattttgtgaagaaacgtataaaaagtcttaaaccaataaaataaaaatataattcactaataatcatagatttttttgtattaattgaataacccaaaatttttattgactttataaatgtatgaatcaaataattccagatttattcgttgtaccaccaccattcctacttttccgacatgaaactgaagctttacttagttttatgataagtaatgttaatcagagatctttttggcgagatgtccagttaagatttatggaatttctggacggataatttttggttctagaaagaaaatggtaactaattttt

SEQ ID NO: 35513 - DNA, 5156 bp, Arabidopsis thaliana landsberg
  unsure (1)..(5156): unsure at all n locations
tcaagaaagcgatcttgatgcttttccaagtcttgagtgaacctgatttcggttgtttcagccaagaagcggcttccccatcaagtgaataagggaagagcttgcatagtaagtagtcctctgagactccattagccttgatgcttagaacgaggtccttcaaacgctcgatatgatctattggctgcttatgagacaagccatggaagggatgctggccaactaaagcaaaatagtcaggctttagctcatagtcgttcctttggaatggtgggggaacgatcgcagatcgattagcatagaacatgttcggcctgttgaaattctcaagagtacgtcgtggttccatagccggaggaatagctgcaggaatctgtggttgatgtcgatcgacactggtaggtctcggtcgacaccaactctgcagctacgagttccaactcgtgttcagtatcctgctcttcccacccatcatcttgttctctgaccaagatggcatttcagctcttcttagggttaacatcaggggctccaggaagaaagccttcttgtctcttaacggattatacagtttaagctacatgtacatctagcttcttcatgtgagagctcaaattgtcgatcttcccgttaagatcagtgtagatagcatcaaacttcccattgaactccacaaccaacttggattgtccctcaagaatcttctcaagcatagattccatcttactctctgtagtgggtgaaggatggggtttggtgagaagaattaccataagtcctagtgaagttgctctgaagaaatgtcttctggaaggcaggttttagggtgaaacttgaagaactctggttcccggtaaacctgttgccactaaagttgccctgttgcagaccaaacttcttgtaaccttgtccatctatatagaagactctttcttatgtctctagatcgggctcaatggtctctgcttcagcaacaaagtgcacatgcttcttccatgtaagcaagttgtgaaatgaatctaacttagcatgtactccagccatctgatttcccgataaagctcctgtaatcttcttcctcttgaagtcagcattcttggtactgatgttgcaagcaacagtctcaatcaaggttgtagcatctgtcgctaaatcgagagccatatgatatctccaatcaactcccctgaagaagctacctagaatttgtacctcattgaagccgtgatgcaggaagtcacgttgatactctttataacaaaccctggttgccttgaaagcttctgtcggaccctgagtgaaggtagacagtttgtttcatagctcctcagacttggcatcatcatagaagttgttcaggaaggctatcttgatgcttctctaggtcgtgagtgaaccaaccttcaattggttcaaccaagaagcatcttccccagcaagtgagtaagggaaaagcttgcacaacaagtagtcctctgcgactccattagctttgatgctcagaactaggtcctcaaaacgctcgatatggtctattggctgctcatgagacaagccatggaaaggatgctggccaactaaagcaaagtagccaggcttcagctcatagtcgttcctctggaatggtgggggtacaatcgctgatcgattagcatagaacaggtctggtctgttgaaatccccaagagtacgacgaggttccgcagatggaagaatagctgcaggaatctggtgttggtgtcgatcgacacctctgttgtgtcgttcgataccgattgcatccgcgtgctgctcccgatggtgtcgatcgacacctagttggtgtcgatcgacagcgagccctgctacatctctggcagctaattgcgcattgaggcgcgcctgatcctcattggcgtcctcaggtaggatgagtccatgatcatccaatctctgaccagcctcattgtaggcttgcccatcctcatctctcaaaactccttctgcatcagctctgatgactctgtcagccattgctaatttctgagttttttggttggtgcgttcaagttttcccaagtccagaacagacaagttgataagctccttctgttttgtgctccttgtttgcctaggcatacacctgaaacacagaaaagaagaaaacaagaaacgcgtgagtaacaaaatagaagtaaaaactagacgaaatctctaaacaaaactcaatgatgattcccaagaacttcggcgacggcgccaaatttgataaggttcaaattaccctagaactactctctcaaataagagatcaattgcagtatttaaggatcgatttccacaaagttcttttgttcaaacaatgagttgaatgtcgagattaagctagaagagaatataagaaagtaaaaagagaacaaagtaaaaagacagcagattgattgtgttgtaaccgattaggaaaagagctaggaacagggtattctcaggaaactattggttagtagatctaatgaaagataggttgttatcgaacaattcttaaactcaaactctaattatggaataaccggtggtgttccgcgaaactccctatatctatagctaagaataatcggagaagccgagagattattaacctaaatatgcatgctaaacgagttcgattgttcaccttagtagataggccgattcttattacacccctataaaacaggctcatcaaataatagatccaactacatatacctatggcggggatacctattgtctggattcaagttctagttaattactctagatctagcattaagaacaattaaagatgaagaatcctacagataacctagcaaagggggcaatctactaaatcatctaaatccctaatgagaaaccctattcctaacaagcagactactctaacatgatcaaaggaacacaaatcatagtctaaataagatttcaataatgaaaagaacaagagaaagagtaagaaagatcttctctaaagggagtctccataaggttttgctcccaagtacaaaagagaaaaaggagatcagcctttccaagcttaggtctaaacaatgaccctaaaaacctaattatatgacctaaaacacgtgatgggccttcattaaacataagggaaagttctgggccgaatttgaaaatcttcaagacatcaataagttgcgtcttcgaattgccgtcaggtattggtgtcgctcgacaccagggtgttgtcgctcgacacctacgcggtttttcgtctctggatttcttcagaagcataaattctctattttccttcagaatgctccattatctccaaatgaatcccaaacatgtaaaacctgaaaaagactagaaaagactctagaaataacaatttgactctaaaacctatacctaaaacatagttaaagccgataaaaatagggatatatcatttattaatacacgtcagcgattacaaacttgacgactcggtttnnnnnnnnnnnnnnnnnnnnnnnnntgtaattacgttttttcctataacgtttagtagagacacgatggtatacaaaatagggccaaaatatgatagtaataaaaaatgttttgtatggttcttgtaaatacacctaatttctataacatccgagtaactctccctaaaagatatggttattattattagaacggaagaaaaaaaaccattggcgtgaaccccacgcactcctctcttttctctcttcagtttcaaagaagcaaagtagatataggcaagactttgtattgcctctccggtatgctgtttccggtgccggagagggctccctttttttacttctcagttgtcttttcctccccctttggtaggctttgagtttgttatggttctctgtcttgatctgcagctctagaaggtggttgttccgaggtttgatgcggcgtggtggcaaggagtgtcacagctttggctaacgtcttctctttgagcggtgattattctctcaggttctggtcatagcttaggtgagttgtctagataagatatgtgagcttggtttggtggtttgcgttttttgcggcattgtgtaagagctcgcgtggaagaaattcagctcggattattctgcatggggagagcttgatggcagaggaggtgatggaatttgaggacagctctgaatctaactctttcttgccttcgatgtggtctctcagccaggttttggaattagatcggttttgcttctctctttgggctctttgtggtgataactgcctcgtcggagttctcggtgaggttttttttagtcgttcattacggttgtggtagtggttgatggctgggtggttttgcggctccgtttttccgtggctctttcgtgacttggtttgattactacttgtgtgttgctggtatttgttgttgtagtttcagcctacgctggtttgcagcgaagatctctttgcgtgttgccctggtggggttctctgtggggaatagaggtggtggtttggtctaggtggcttcactgtctatgggagatgtttctttggttattcgcaaaaagattggtggctggaggcagcttatctagctgcccatagatgctctcgtgtcgtcgggtaagggtattagttttctatagctgctttgtttttgcgttagtcttcggaaaagttgtaggtgctcctactttaggtttgaggacggctttgagtttgggttgctaatggcaacacagatgaggattctacgtccttcgagttgaggaaaccacgcaactgtttgacctttactgttcagaatcggtgtttcttcatgggtttctgcttttgttcgctagtatttgcttcatgttttttgcttgtgaattgttattttggtctttttgtagctttcagtttctcattcttcttgttttctctataatttttgtccaaaaattgcgaaaatggtaaaaaatttaacttttactaaaaataaatatggttattgttcatttagaaatacaaagaaataaaaacttataaaatatataacgaaaaacagttatgtatttttcatataaaattcgataaatcatgttttagaactgctcatttgtaccaaactgctcatgccatgagactgtcggattttgaagtttcaatatttttcacgtatctgagaagctaac

SEQ ID NO: 35514 - DNA, 2474 bp, Arabidopsis thaliana landsberg
ggaccaccggatcgtttcatcctcggaaccaacatgtcaatttcggtagggacctaggatttaggtaaacaaaagctttgattttctggattttatttttgttttacgtaaattgatttttcatcatctaattaatgtttgttagataattcacaaatataatcttgtgaaaaataaattttatataaattaatttatagtagttgtgagagtaaccaaatgaaatgaaatggaaataagtgttaaaataattattaaaaatatatgagacaataagtcaacaaaaagtaagtaaggtaaaaaaaaaaaagtaagtaaggtaagataattagaaaatatatatatatatatatatatatatatattttaacaggtatgaaatcccaaatcagtattttaggaatacaaggatataaaacaatggaatatctaaaatgtgaaatgtcaaaaggatatgtatatatgtaaaagtacagccggtttcgaagtcaaaattggtattgaaaaaatgtaagataaaataattagtaaaaattagatatattcttgtttcttattttgtgtgtatatataatcagaattttaggaatataaggatataaaacaataaatatgaaatgtgaatgttaaaaaggaatatgtaaatatgtaatcataaagctggttctgatttttatatataattagtcaaatatatgagctgtatgcatgcctattgtatataaattagtcaaagtttcaagtatagattattttcctttttcaaccaatttttatgtcatatttgaaattgtacatgcatttgtagttttaaaatcagtctacttatatagctatatattcgaattcttcacattcgatgttacacacaaatttgcatcaattaattttgtttgtgtatatagggaaggagcccagtttgcttttaacgggccgtaaagtggtttacaatataaaaacaacacgggccgtaaagcaaacccgaaagagattattacatgaactgggtttatggatctcggttttccatcttaaccgattcaaattgaacagataccggttattaaaataaaccggagactttaggttcaatctcggtttcggctaatctgaagcaattgatctgtggaaaaagcaaagcaaaggtcgaaaacaaattccattcctgaagctgtgaacaagtaagctctttcacttcatcatcatcatcatcatcttcttcttcttcctcaaagtttaattgggtatccacttaggtgtgttgtaatgtcgctgaagttgggattgttatctccaagtagttagcttctctgggtctgtttcgatgcaatggtgggagattccttcataacttggtgtagaattataggattccctctatagttctgtttgaagttcccatttctggagattgacttgttcacggttctatggggacaatatgagacaatgcccataaggtgtttgtgaaattgtctgcctgagagtttttgggtttggaatcattctttgataaaatatatgacctgtagtacacgaggctagtttttttttcctatcaggtcaacttgtgcatttactggtatatgtttgtttacagttttacacgataaaggtcggttatttatcgttttttcagctatttggtgtttctgattgattggcagttgtagttaccagcttggctattcaagaaaggatccagcatataaaatttatggcatatgcaacaggaataacgtatgcctcaaggagtattttgcctatttgttccagaaccttcttatctccattgcgtgtgccttctttactcgtccttcctgagaaaccatctgcaactttcttcagaaggggccaaggtcctcaccttagatttttttgtactactactcagtactgttctgtggagagatcaatacattctactcgatctaccgagacagagaatcaagctgtttttcggcctaacgtagtccatatactagaagaacgaggtctgctccagtcaatcacaagcgagaatggcaggttattttgttctgatcctaatgtagctactttaagggtctactgtgggtttgatccaacggctgagagtttacacttgggtaatctacttggtatcattgtgctttcttggtttcaaagatgtggacaataaaccgttggtttaattggtggtgccacgggacgggttggtgacccatctggtaaaagcttaaaaagacctgagcttgacgctgatacactggagaaaaatattgcggggattacaaaaatcattatcaagattctaggtagtaatccgagtcccggtggctcttacgtgatttttaataactatgactggtggaaagatatgacaatgctcgactttctgaacatagtcggtaggtttgctagggttggtactatgatggcaaaggagagtgtgaagaagagattagaatcagagcaaggtatgagcttcaccg

SEQ ID NO: 35515 - DNA, 1155 bp, Arabidopsis thaliana landsberg
acttttgttatattaaatattatgctatctctccatgcgaagagacaaagtcggtcaatggacgaaaaagaaaaaaaaaagtccgtcaatgtcaatgacgagcgtatgcgggttcatccaattgccgtgctaagatattaggaggcttaagtcaaacttacaaaatgtggcctttaataataaattcttttgtctcaaaacatacatataatagtgtcaacaaaactcaaatcttaaaacatacataatagtgtcaataaaaaaacaaaaaatctacttctcttttaattatatctttattgtcatttaagtttcttattccttttctaaaaattatttcttaagcataattatgtggtctgtggattatgccctttattagatgtatagaatttggttagtgtaaatagagtttggttatgtatataaccggtttgcaccggattagtctctttgtatataactcatgtatcattcattaaatgtgaataacagaatctattttcatcgtctctcatcttcttcctctcaacatcatcttcttcatacatccttcttccttcatcgattttgttcgtgttatacccttattctattatgtattaaacaaataatactaaacgtcaacatcatcttcttcatccatccttcttccttcagtgttatacccttattctattatgtattaaacaaataatactaaacgtcaacatcatcttcttcatccatccttcttagtgttatacccttattctattatgtattaaacaaataatactaaacgtcaacatcatcttcttcatccatccttcttccagtacgtgttatacccttattctattatgtattaaacaaataatactaaacgtgtagaaatttccatacaaataaaaaagttttaatagcaattataaaggatttgggttttaagtttcttaatacacaaagaacacaaaacagatttataaaactaatgaaaccttattaaaaaaaaatgtggcctactaaattttaaaagatctggtggccttaggcaaatgccttttttccaatgcgttaagcacgataaaaaacttattgatacattttgatttttgtcaatttcatatatagtacgtcccccatgtgacgtccggcgatacgtattaaattact

SEQ ID NO: 35516 - DNA, 1167 bp, Arabidopsis thaliana landsberg
aacacttgggatgacagatttcaggccaatcaatataaaactcatctcttagcggatcgatccaagagaatttctgaaggtatcttagaagatgttccagtgaaaattggagaatgcttgattcctacagacttcatggttttggaatttgaagaagaacctccagatcctcttatactgggtagatctttcttatctattgctagtgctcatatttatgtgaaaaggtcgaatcactttaaatgtatgtgatgtggttatgacttttgacatgggcaagctgaggaagccacccaccattgatggttagacattctctatagagacccataaacactgttgttgagactgggaaggtattggatccaagcgagcattcacatgaagagagttgcaagacagttgtcgagaaacaagctgcagcatgagtgtcgatcgacaccatctcctaagttgatggacaccaaggacaagcagagacaaggttgtccaaaagagctaattttcgagttggaatcactcctacaagtctaggattagttgtcacaataactactgcacctctactatttcatccacctcttgaccagccaaggtactcatgttctccacctaaacctcttgatttcatcaataagagtttaaaatttgcaaaaattatttcacggttgtagcaagccacgagtttctcgtcgatcgcttgtttgttctttggatattgtgcaggtaaaaggagtattccacccatacctgagtcccaccctgctgatgctcctctcttcctagataggcctcatgcactaactgcttatacgccagcatggatgatgagagtgtctttctttgcgatatatactaccgccttctgatccacctgatctccaaactccgccaagtcaagctattgactcaaaacaagcgcttagtgggaggcaacccactggtttgatttatcttttccctttcttttcttttcttttatttttgttttatttttcctgctttctctggatttgaatgccactggggacagtgtcgtttaagtctgggggaggttcttactaatgatgcttttatttttgtttcttattttgcagttcatttggttatttctttcccttcatgatcatgttttctttagtttagttaggaatcatgatctatacg

SEQ ID NO: 35517 - DNA, 3601 bp, Arabidopsis thaliana landsberg
catcctctacaacactccaaccactttaatcgaatcagaatctatttcttcaatgtgttcttccgtgttactgacagcacaagctttttcagggaattgatcactgcgatgttgctcaatgccaacctcctcaatatatgaatcaccttgtctcatttcaaaagatgacctgctggtgtcagtatctatactaccatcgatcttagtttcttctgcttgttcctgtgtttgatcaaatctctccctagaattatttgaatctgtttcacttcgatcatattcaagcatttcagcatgagaatctgcatgctcatttatctcattaagttcagaaagtccttgaacccagccagcttcttcagatgcttcctgcacatcttcttcttctaggctagccatttctagttcttctcctatcagttcacggaccaaagacgttttaccttgcacttctaccttaccatcctcttttctacaatatgtttcttgtgccgactcatcttcattttctctggtatgtgcataggcttcataattcgttcttactgtctccacctcaacctgttcatatttttcttgagctttttgatggatatcaagatgtcccctttcagattccactaagcagtaagtttcatcctctcccttagtatctgctgtctgaaacatctgcctaaacatctgtttaagaacggtccaattttcttgcaatcctgaatcactagcttgtccagatgtgctttctatttcctcgctagcatgatggatccttacaccttcctcatgaaaggacatcgctgtggtttcattttccgcactttctagctgccagggcctgttgtttcccttcggagcctttatcatattatagacgtcttcagaggtcttccaaactcttcttcgcctgggaaccttgtgcactgcctcttgcacctcatctatgtttcctggttcagaaatatttactctgataaaagacaccatagctccaacactatcatcggactgagttttattcaaactcggtgttggggtttcttccacttcccttacatatgttttggaatcatcaggaccaactaaggtatgccgtgtttaagaggctattcctaacgaaatggaaaaaaaaatagaagcatagcaaaaattacgtgaattttcattacacaaccggttttgaacaatttctatatgtagtggttaaaccatgttgagaatttggtattacagtaaccgacatatcaattccaatatgtcaacatctaatacaaaaataaaaaaaaaagatagaaatttacaggaatctctccactaagcatgcgctcgctagtcgctaccttccatgattaatgtccatgaatgtcttcgtcttcttcttgtaattattactttctccgtacaacgttgctttcttcgccgacgtctttcattaatgggcctaaattatgtaagcaagcccattttatcagcccaatttcgaattcacataacgatcctcctgctttattcctccatcttcttcttctcgaacgaacgtcttcaattccgtgatttaggatttcttatttgcaaatcaaagttaagaaggatgatcaaaattcaattctgatagtgcaacgattgattctattgaaaggtttcaagttatagagaacaaaacgttaagggaaaaggtacctcagaacgagttcgtctgcgtctacgactgttgttgatgtacaacaccttgaagaaccaacgcggtttggaggaaagcacgatgtgcccaatggtcaatccaagcacgataccaggtgtgaaccctatggcagctgcaatccaactcaagacttgttctgattccaatgtttctgattcccctgaaggcgtcggctcatggacaactctacattcttcgagaggacgaccacaaagtccaaggttttcttcaaaagacgaagcggattgcgttcgaaactgggtgcctcctggtacttgaccgacaagctggttatgagagaagttcatatacgcaaggaacgataggtttcctagttcttgtggaatctctcctgtaagcttgttttgagaaacgtccagtgactcgagctctctcagattccccatagatgatgggatgtggccggtgaaagcattgcttgacaagttaagaacatgaagctctttcaaaagaccgatggatcttggaatctctccttctaatttgttttcagaaaagtcgagagctgtgtagatttttaggatgcgtaccagctccatctctaagcctttattcatcaaaaccactgaatcatggtaatatcgaaaagagtctcccatgtatttctcttgagaccgatcctcggttgccataagtgatgacatagcattccagttcacaaaatagtttgctggcaaagttccactgaattgattatgagataagtcgatgattcgcaatgtatggaacgaggcatgatgtatcggtccgtggaatgcattggagcgtaagacaagaacttgcagctttttgagagaagacaaccagaacgggaatgtgtcgttgattctgttgttttccacattcagaacttcaagagcagagagacggatgaaagatctaggaagttttccgactagttggttatgaccgacatcaagtgaccttagacttttaaatatactccttggaagacctccaccaagacgattctgacgaaggtttagaaatgaaagagtactcttaaggtttcccatacatggagggatggaaccattgaggttgttgtcagataaatcaagagtgattagagagcgcaaagcgcatatgaaagagggaatctttcccgtgaaattgttgttggagccaaccaagtactgcatagatggtttggtgattaaggatagtccatgttccgttgatctttcaaaaccggtaaaaatgttgttggaaagatcaacgaatatcaactttggtagtgtccatagccagccaggcacctgacctttgattttgttgttggaaatgtctagattcgtcattttgtgttggcttcttaagagctccgggaactcagtgatgccgcatccagacaagtacaactgacttatcaattgcgtaggatgatgatctgcaactgaaattttggttgtggctgaaacatggttgcctgagagatccattgaatagattgagttgagatgcgaggaaaagagtgcattcaagtcaatcgtagtggtggtgttcaaatgagataggttaagaagttggagcgacttgagattcgtgaagatactaaagtcaactgggccttgggtgttgagatgagaaagatcaaggtcctgaaggtttataaatttggaaatggatttcgggattggccctatgaagttgttattgctaatgtctaacacagttagtgtagatggtgaagatatgttcccaaactcaagagtgccgttgagttggttatttctcaaattaatagacgtcaaagaagcaatagtgaagagagaagaagggagagttccagtaaaagcgttgccccatgcctcaaagtactccaagtaagagagtgagctcatgttagaaggaagggtacctgtgaactgattgcgggag

SEQ ID NO: 35518 - DNA, 1150 bp, Arabidopsis thaliana landsberg
aacagaaagacaaaagtaaaaaacagatcacaaacctcattttcaagctctgaaattttctcaggcaataatcttgggtcatcgaactggatctcactaacccgacccgaaactggggtcaccatgtctaaaccggttccatgactagagccattcgaatctggatttgtcgctttcgtcggtgtagaccaacgttgccacaccttcaacggcgtggacatctctcacaattcgcagagatctcaaaacctaactttcttacctaattcggaaattgaacacttgaaataaaaaaacccagaagccaaaaaacgaaaccctctgactttgtcgacttcagtctctctgagaattttctccaattaatggataaagttggaagctctatcctttagagattggctccggatttgaacggagtttctaaattccggtaccgaaactggtttcaagtccgacaacgtttcctaagcaatctctctctctcttctctgtgctggaaacctttattgtgtggctcgcgcggatcgttcacgttcttgttcttttttttttattataaaagtggaccctatatttatactttatttacatttatggccgtcgtcttaaagatttgctcgaaggttccaagggtagaactggaatttcgttggaattacaacggttatgcgttgtgcaagtgtggaaacttttgtaagacaaaaataccctctacaaaatgtaatgatgattagtgtttaattaattataggatttgactggtttaaatgtgaatacgaaaacttatggaagcatccataaattcgccgaaaataagaaaaacatattttggatataaattaaaaaaattctaatttttgtccattttgtcttagaattacagcataaataggaaattatattttataataaattttcatgtaacttttactttgaaagtcaattatggcgtgctaattaacaataaatcccatatattattattaaaaaaaaagatgtacattttggaaatggataatatgaagaaaaaggaataaagtaactaaaagaaagaaagaaaaaaaggaaagccaaggtggctaagagctgtgcatatggctgctgttgtgtttggatgcaagcatatgttctgtctccatgtggctcc

SEQ ID NO: 35519 - DNA, 4127 bp, Arabidopsis thaliana landsberg
gatatatataaatatatatatatatatatgtatttatgttattgaatgttataaaataacgatttaaaagcaaagctgacagtttttatattgaattttaagaagtcaaaactaaattttgtaaatgcgctaaaaacttgcggtaacatccgagccaatctcacaaacaagaaagagacgggctaaggtcctcaacttacataatctgcgccaaatccagcttcctgaggtcgagggattgagatcccagaagctcttattcctgatgaggttgactcttacccacgacacccaaagcgagcctgcagccgtgaaaagcatccagataagctttagagccagcaccttattccaagccaactaaattcccgctagccaaggccgccacaaactttggaggaacaaacaatgtcccaggataacttcgcacctatggccgaattcggggctcctttcaaagaaaggcattatacatttgctccagttttcgtaaacactgattgggtaagaggaagatggaggtctaaaaattaatagtagagaagatgacagacttgagaagctgcaatcttcccgcaaaagaaaggtgccgagaagtccatgaactattcactttgtcgatgaggggttgaaaatcctgcctcctcattctgagacatgaaggcatgcttcgtgttcattatacataccacacatccataaaacagaccaaaacgacatcgtatatccctgcccaaatgccacgtcaatgccacaaatcgtttgattcatcaaccgttaatcgcaaattatcaccgtatattcttatgttgaaatcgtctaattttctttaagttcaggtagattatttgaataattcttaggtttaggtttaaaataaatcaaaggattgagttcaggttggaaaaacccgccaacaaaaagtttgggttgataaaagccgttttcccatcacatgtactctactgatttatgctagtgttgtattgtgttactatttgggttcaagtccacgtaatgcatgttgttgaaaaaaattacggtataaccaagtgtgggtgttaaattgtaaatgaagtatactgcaaacacctatgtgttcttaaatcttaagtaacatgttagtgaagggctttaggttcggaaacccgaaatttggtaaattggcaacaaaacaagaatggtagtatgagcagcctaaagtcaaatctgtttgaaagatagttttctgatgtggtgaaaccaaaagtggagcttacggtcctctattttgttgccttatatctaaatgtaaaggagaagtatagttaaggttataaatgtaattattcatgagctaaaccctatggttaagcctctatatatattgtaaatcattcctatcaatacataatacaacctacgttcatatggtatcagagccttaagatctgaaaacctaaaattttaagtttaaacggccgcctcctttttccaccttcttttcttcatcatttcttcaacgtgatcttcacgtcttatttaccggccatgtctacctcctccgagatcgttgccaactctgacgcaaccacgcttctcaacatcaacatgaacaacgtgactaaactcacaccaacgaacttcttgatgtggaggcgccaagtccatgccttgtttgatggctacgacttagctgggtaccttgacggatcgatcactgctcctgccacccagctcaccaccgacggcatcaccactgcaaatcctgcctacaaacactggaagagacaagacaaactcaactacgctgcgcttctcggtgcaatcacgatggccgtgcaacctattctctctaaggcaatgacatcggctgagatttggactacactcaacgagacgtatgcaaatccaagtcggggtcacatcctgcagattcgtgatcagctcaaacattggaagaaaggcaccaaaactatcgatgagtttttccaagggttcattactcgatttgatgagttagctcttcttgaaagtgctctactccatgaggatcaaatcgcacatattctggctggacttcctgcagattacaaagatgtcatcactcaaattgaaggccgtgagatcccaccaaagctctctgaaattcatgaaaaactcattaatcatgaattgaagctgaagaacatgcttgatgatgcctctgtagctccggtgactgcaaatgctgccacctacaaggcatctaatgcaaatcacaacggcaacaacaacaacaatcgcaacaacaaccagaatcgctctcgtgggaatcaaccatggaatcaaaacaactctgcacctcgttttgactcccgtggctcacaaggcaagggatatcaaggaaaatgccagatttgtgggatccatgggcatagtgcacggaggtgttcacagttccaaggtcctagtagtggctacccatctgctggcggtggttatcaagcatcaccgttcacgccgtggcaacctcgtgccaatgttgcaacggcaccatggatttttgacactggcgcgacccaccatttgacttcggatctcgccaacctgtcaatgcaccagccatatcatggaggcgaggaagtgaccattgccgatggttcgggtctcccgataacacacacgggttctggtcttcttcctactccctctagatctctttctctaaaggatatattatatgtgcctgatgttcgcaaaaaccttatttcggtttatcgattgtgtaatactaatggtgtgtcggtggaattctttcctgctcattttcaggtgaaggatctcagcacgggggtccagttactccaaggcaaaactaagaatgagctatatgagtggccggttaatcatcacgccatcaccgctttctccgcatcaccatcaccaaaaaccgacctctcatcttggcattatagacttgggcatcctactttatctactctcaaaaccattgtttcccagttttctttacctctttcaaattcgtttcacaaacaattgtcatgttccgattgtttgatcaataagagtcacaaattgccttttcacttaaacacaatcacttccactcaacctcttgaatatctctacacagacgtgtggacgtctccggttatgtctattgatcatttcaaatattatttggtgattgttgatcatttcacgagatatacatggttgtatccattgaaacaaaaatctcaagtcaaagaggtgtttatagcgttcaaggcacttgtagaaaaccggttccagacccgcgtgcgcaccttatactctgacaatggtggcgaatttattgcattgcggtcttatttggcggtacatggcatctctcatctcaccacaccaccacatacaccggaacataatggtattgctgagaggaagcatcgtcatatcgttgagacgggactcactctccttactcatgcctctataccaaagtcatattggccatatgcgttcgctactgcggtgtatttaatcaatcgaatgccaaccgaggtcataaacggggtgtctccttatgccaaactatttaagcaatctccaaattacttgaagcttcgagtttttggatgtgtatgttttccatggctgcgaccgtaccgggctaacaagttgcaagagcgatcaacgccgtgtgtgttcgtcgggtattcactaacgcaaagtgcctacttgtgcttggaaatacagagtggtcggctctacacttctagacatgtgcaatttattgaaacgagttttctttttagctcgccggtgttgccgtcatccaccgttgttgctgaatcgccaatctcgcctggtcaacctccggtgacattcgtgcccactaaaatagctcattcttctctgcctccgtgctcggttcttcaccctccgtcgccagctcaaccatcatcagtgtcacccaataacgcatcaccgtcgttgtcgccaatcactccgtcgtcatcaccacacagctcgtcgtcgacgtctccacctgcgccacaattctcatctcctccaaattcagaacgggcctcattcaacaagggcccaacaacatcaactccaagcccaaacaggggatcctctagagtcgacctgcaggc

SEQ ID NO: 35520 - DNA, 1546 bp, Arabidopsis thaliana landsberg
  unsure (1)..(1546): unsure at all n locations
aatctcaatataccccatataacaataacagtataaaattgaggttgaattttaccagtttgaggaggcgggattcgtgcagctgcagggagaggactactataacaaggacggtaactagatcttcctgcataacaatttaatcacacaaaatcaatttctccttcctcggattatcacaaacccatgaacaaatgatacacatcaaaccctagattggaagcataagacaagctaaagactaaaaagattggtacctttgttagaattgggacgaggaaatagctagagacgaagaatctccttagacgaggagaagtaggacgatgagatagcgggaaagtctaaaatttaatttcccccacatgtgtaaccctagatttttaaaaaattgggccaaccaattatccgggtggactagcccattatgcccgcgaacaaaatcgatttttagaccatatgatccgttttagttgcgggctgaccacagaccgtccacaatattttggactgagcttagcccatggttggatgaccatttgacagttctacttattaaagcgatacagcttgtacaactttgacagttaccaatcacaaaaactttatcaaaagcgttacaaaaagttttactcagagttttttttgtacaactttttctaacagttttgcactgttccaataaagctaacagctaaaaatcttgtacaatttttggttactaatcagatccattatgttagggttctccctactttgagaaaaatcagcccaaatgtctaagtaataaatatctgaatgagtttattctactgtatatattttacacacataaaacttggtttcttataaatttgaaggaagttttgatatttttttgaataaaaactttgagacataattcatcatttaccttttatattacaattcatcaagatttttattttattacatttctaaactactgaataaaagattcaattcttataaatgtggagtcagtaaagaaacaacagagcttgtgtatacacagggaaagagtcttccgtctttatgtttagtttcaccaataatccatacacgagcatgagccatcttggaaatggtgaaaacgtttccggtctcgtaccgttatttttctcttgtaaactttggagatgagtttgatggacgaatgacaatcctcacagatacgtaggttcttaacaatgcgtattggtttgccagggctcgtgcttatcaaccnnnnnnnnnnnnnnnnnnnnnnnnnnnnnnnnnnnngtacattttctttatcttcttcctccaagtttaacaaaacctgtgtggtgattggtctatacccagctagtctcagtttgtctgagatttctacgagcattgagttgatttctttggcttttgggtgtgaatcatcttccacaacaaactcatgaagcacgccatcaatgtcgatccaactacgacccagggtcttttcttatatccttctccnnttcattctcagcctcatctctgaaaccctctgaccgagtnnttccttgag

SEQ ID NO: 35521 - DNA, 3107 bp, Arabidopsis thaliana landsberg
ctccctgtttatgcgatgtcatgctttcagttaccgcaagatctgtgcaaaaagctcacaagtgtcatgactgaattttggtggagcagtggaaatgatcgaaataaaataccttgggtagcttggaaaaaactatgcaagaaaaaagaagacggtggccttggatttcatgatattgtcaaattcaatcaagcacttttatgcaaacaagcttggagacttttagaccagccacaatcacttctagcgagattcctaaagagccgttattttaagaaaaaatccttcttggattgtggtgtaggcaccagaccatcgtatgcttggagaagcataatccatggtcgagagttactgaaaaaaggcttgaggaaatctattggaaatggacaaaatacatgggtatggatagaaaaatggatccctgatgactacccgagaccgccgacaagtttgcaacggaacagagacgttatgctaagagtatcagatctgttggatcgtaacacgggacactgggacgaagatagagtgagacatttgtttattcgggaagatgctgattatattctctctctaagagtgtcgactgacctccaagattcatatgtttggagcttctcaaagaatggcctttataattctcaaagtggttataaactattagaagcacttcctgagcatcaagaatttccaatcacttctcttcctccaattgagaagaagttatggtcacgattatggaaagtccaaaccatgcctaagataagacatttcatgtggaaggctctagcgggagcattagcagtttcagacagattgcaatcgagaggtatccacatagacctaacttgtaaaatgtgtgggaaggaaactgaaaccatatgccatgttctcttccattgtcatgtggcaaaacaatcttggggactctctaatatccctgctcccgagatgggtttctctaaaaactcagttttcttaaacctttttcaccttcttaatcgtgctgaaagacgtgacagtctcaccaataatacacaagtttttccttggcttttgtggcatatatggaagtccagaaactcatttgtgtttgaagggaagcgatatggtgctaacagtattttggttaaagcccgagaagatgcagagacgtggatggcagccaacaaatcagatgcacctgcaacaaatacatccctcttcacatcttctcatacccatcatacttggagaagcacgatgcttagttttggtaagtgtaacattggatgctcttagattaaacaagagatgaactgtggggccgcctggattcttcgtgatcattcaggtaaacctctgttccatagtcgtcgatcatattcgaaaattgcatcacgttttgaagcggatctcttgagcctactatgggcagtagaaagcttaagtaaccttagacaaaacaagatcatctttgagatatcatcccaaaaagtagtggaagcaatgcgttacccacatagataccccctctttcgacacttgatctcagacattagaagatttttggatgcctttgagttttcagttatagttaattctgcaactgaatgtaatcgggtggctaatgaaatagcaacaagtttcacgagagatcatcgttaccaatcttatgttgcacgggaggggccattgtggctacgagaaatcatcatagaggaatctaagctcttggtttgagattcttcttcagggacttcgtgcctttacgttttactgttgcagtcctactggacttgtttttgttttgttttatcagtccatttacttagtgttcttaatttcgtcttataatggtcttgtgtttttgttatattatatttttagtctgttgttgatttttgctgacttcgtatacgtttatagccgtgccctttaagttttttgggtcctttgtcttgccctgtgtgggcgtgtaatgtttctcactctcttgtgaaatatcaataaacagtgttaaaaaaaaaaaaaaaaatgatgcaagagagagggattgtcatcattattagtcgtgggccgaagcgaaagtgggcctacaagggtccatatctgaagatccgcacgcataatgtgagccgttagatgacaagagaacgtgcagcccaactgcttggtgttgagtggagtaaaataaaatatttttgaaataattaaaaataatacggaaggctaaaatggtaaactcatatcaagaggtaaaaatcgagaaatccaacggtcacaaacttgcaagctcccttatctatggagtttagaagaaagcagcagcctcagaagaaacctcaggaggaaaagagagatggtgattcttcgtcaatttcagatatcttcctttgagctcttccaatctccaaaacaaacaggtaaacatgaagattcttcgatttaatggcgtttattaggagctgaatcattcatgataatgttaatctcagggttttactctagttcaaggagtgttcctctacccagagctagattttactctgatttcagagttatgagtggcaataaaggaacgaactttgaaaaactttatctgggtatggattttggtacttctggagctcgatttacagttattgatgagcaaggagagattaaagcacaaggcaaaagagaatatcctcctttcatggtaaaattttcgcattaagtatccttgtaaatatatcatatacaatttctgaacaaaatcaagagaaagctatagactgagacatttgttttgttatctagatagaaagaagaaagcatggattgggcaagctcatggaaagcaactcttttttcgttgctagaggacattcccgttacagttcgctccctcgtctcatccatttcgcttgatggaacttctgcaactactctcatcttaaacaggcatgtgattcaccgtggatcacttctcttttctgtttctgtattccatttacattagaggatttgatgttcagtcttgtggtggattcagtaatggtgtgtttaatctcctttgcgttgcagtgagagtggagaaagtctgtgtcaaccttatctatacaccagagctgccctgatgc

SEQ ID NO: 35522 - DNA, 9670 bp, Arabidopsis thaliana landsberg
  unsure (1)..(9670): unsure at all n locations
atttttttttttggttatctacaagtttctctctcctctctccataggtagaccaaggcctaatcagtcttaaccctcaaggacgcaattgaccgaggggcccggacccacttattggccaaccttccgaccggaattccctttaccattcctattaacttgggttttatatcgatttggtaatgacatatttagcacaagaattggttattgaaatggttaaacttttaaggttcctttatcactatttattgttcaaaagagtccaaaccccaaataagaaaaaagtttaaagttaccatgaaaactctatttatggctattatattctcaaaacaaagcgataggtatctccaactggcaaaaacaattctccattttccaccagatttgagttgtcacttttttctacttttccccaaaataagactttaatcataaaaacaaaaacatcaagacactcgagaactactgcgacaggttcaactgctgttacattttttgaaaaaaaaaaaaaaaactttaagtagcttcggttgccatctttgcttggatggactacaatttgataatcaccgcatcgtaagaggacctgtgttagctggtttctggaaaactttaacagaaggcattccatctccatcttctgtgttttgaaccctccaagtccgatcctttttcctctgtggctttttgtgctgtttatgtgacgcggtttgcttctttgctgtcactttctttgaagacttaagcccattggcaagatcaaacgagctcagatcatctagcacatcatcaataccaggaacttgctcgttttctgtctcatctcctactgcagagtcatcggactctgaaccttcgagaatatcctccagttcttgagtgtcttctatgtccggttcatcagcttggggcattccaggtggcattgcataatgtggcagcttacctccaatgtaatctttcagaatcagccttgcagctttcgtttcatccggtagtccactcgaggcaacatagccacgagaagcacagtaactttttaagagctctgcagcatgaggcgggcgggactgacgctcataggttttgggtttaggaagagaaatgttgtacacactctcaattacacggcgagggaccttgtcagccaccacctgaatagcttcacggtgctccgtcatccggtcaatcggaagtacaccagaagcaatcatttcatatcttgagcttgagaacgaagggaagactaaaccagggcaatcgcatagcataagctcatcagagatgatcaaagtctggaaatgctttgtttttcctggggtagaggtgacacctgttcgcttctgacccaccaatgcattgattgtagaactctttccaacatttgggtacccaacaaatccaaccacggcttgatcacgttgatattcaccagtccatgactgtgatgatacggatgctgctctagaattccttactttgacaatctcttgagcctcaaattgcaaacgactcaacagctcgtctctgccatatatcataatgtctggatcatctgtcttctgcaagttatcgggttgtctccattgctctttcaagactttaccttctagggtagctgtagcagctatggctgaccagaaaacaaacagaatggtggggaggcggaaatattctgcccatttctccctacaagtcaaaagttaaaccaatcggttagaatacaaaaaaggttggaggcaaagtattaaggccaggaggattggctaacctgacatcagtaggtaaaagatccgccttgttcactagaagcattatttttttatgctcatcaatttcttgagcatatgcctgtgtcacgatgaatctttaagtaaatatgaatcaggaatacggtgccaagtggagtttcaagctgggagaaaatgcattacctcaagatcagggcagcggtaaaacagtggatctctagcatcaactaccataacaatctgaaaaaaggacaagtataagtaatcaaaactgttttgcaattaactaaaacgcagaaattgaacttattgagaaggttaatacattattgacaaagacttaccaaatcactgcgttcaagcactctccaaagctgtctccagatgtcaaggttcttttcgaatggagtcaacactagcttttcattttcctcaaggctaaaccaaaatacaggagaacatgtaagcatgcgtaacacctataaacttcccaatccaaaagattgattagggtcaaacatctataaactctagtttggtttatatacgaaagatatcttgaacacaactcgattctataaaagttccggctttagcaaacactatcctacatgagataaacttatacacagcacattataccaataacaacaaaactgagattttcagtttccacaacaaaactgggaaatggatacaagaatgagatcttctcagcttatcccatttcgaccttctcagtacgatacaaaggtagaatatttgctcaaaatacatgcattttatcaactacagcatcagcttttaccatttgaacaaaactatgtgacagaagctgcctaaattttatcatcaccaacaaacaatttggtgacagatattgatttgtttataacacaccgaagaagtaaaattaagatggggtagaacaaaaaaagctaacctcacaagcatccggcgccaatttagaaaagcttgtttttcattagcatcaagttcttccactgacatttcaggtgtccacggaggtctggagatgaagatagacaaaaaaaaacgttgtcttagagctatgatagaaaggaagaataaagctaaagagaataaaaaccacataccttcgaggtacttgaagactactggcgtgtaaagcctcctctatcttctgttgctctctccattcttcagctgctataacacttgagctagactttgtgtctctgtttcaccaaaaacattagagaaacagcacaccataagaacatcaagaggacatgtaattgttctttaatctcattaccatattaaatttatacaaacagaaccacaaatacctaatcaatcaaaggacaataaaaaagaggaatttagaagaagagaagcatacagattgatagacaaaggtgtggaggagctgtgattaatggtgtaaagacgctctgcctcctcagcttgctcaatgatggcgtcgatgtcactgacctcagtcacagattcgagaactttcttctgtagattcttgtagtacttgcctttgtctttggattcttgtatcatatggttgtggtgcttcacaagtgatcgccccaacgacgtcttttcgctcttccccatctctctgttctcaagtaaaccctaaaagtctctaaacccttaaaaatggattcgacggcgcgtttgttatgttgcttcaaaagtgttagggtaaagaaaacgtcagccgccgactacactcgctgcacggagaagctaaatttttttatcaaagcgattttttttactttttattttcttcaaagtaaatactaacttttagttaaacttaagggaaattaaaaatcataacataacccatcattagactcagaggacacgaaggctttagaaaacaaaaggaacaacctttttcccggcaaatgcttccgatggaacatccacttccactgtcgttcgtcttgccaaacccggccacccttcccggtctcgcactaggctttattgacggtaatttcgtagacctccaagatctgctcctccgcgcttcgactctgacgtccaatttaaaccacgactgttctgatctaaacgaccgtcttctccatctccggacggatctcacgaagcacgccgtttcctggatctcaacctcactttccgctaaagtttcactcgaagatttgagattgaacctggagagcctcctctgtctccgtaagttaccaaaccctcgtgttttatttttggtgacgtaaagatattgagttttcttattgtctccaatttttcattgtagctacggattctgtcggaaagcaaacgaattgggagttacagcaagtcgtagaggaattgtgtcgtatacagaatcggcgtaaatatttcggtgagtttgactcgatttttgattcttgaacattatcatcaagagctagctaagaaagattcaatttttcagtgactgccttaaagttggaaagtcttgttggcgatcttgaagattctgtgtttcatccgataagtaaacgcaaaggaagtacgcttcaagtaaagctttttcaatccacaagttaagtactatatggagttgtgattggtaaatatgaaagattaaaactttttatttgtacgtgcaggatcttgcattgaagcaagagagattcagtcatgctattaagaccatgaatgagattgaagaaatacttggtgatgttacaaggcatcactcacggtggcgtcgccttgtagattctgttgatagtagagtagataaaagtctgtctgttcttcgtccacagattatcgcagatcaccgagcttttctctcatctcttggctggccaccaaaacttgcaacatccaaagtcgagcatggagaggttgatagtatccctaatcctctactcttgatgcaaggagataaaaaagagtcttattcccaaagctttctactcctctgtggtttacagcaacataatacgcagaaggaaaaacgaaagaagcttaatatgaccaaagaaactgataatgatggactttgggcgaccgatgaactagttaaaccggttgcatctcggatggagtatcattttctaaaatgggctgagcaacctgagtttatttttgaacttgtctataaagttacaagagactttgctgatggggttgacgatttcttacagcctttgattgatagggctatgttagtaagctgtagtgctaaagaagcttgggtttcagcgatggtccaaatgctatctggtttcttagagaaaaaagtttttcctgggcttatagatatgtacaaggagaagcacatgaaatctgaaggtatttcatcgtggttccatcttgtcgatcagatggttacatttgataagcgaatgcagtcttttgtgaatacagatacttgtctatcttatgaaggctcttcgacagcgttttctcaaggtatatcagtaatgggactgttttgtaagaaacctgagtggctcaaaacctgggggaagattgagctaaaggatgcttatagaaaaagtaaagaggatattaagaatgagaaagcttgggtaattgatagtgaaagaactagacttggtaatgaatccaactcacagtctgcaaagtatgttctatctacaagagaagattataaagcgccattagtagcagactcttttcttaataggacttggaggttgatagaccatggtctatctctaccggccattctaccaaggatccaatttataagagctactgccaccagatttctctggtgtatattcaaaattctgttattggagttcaaaaagactgatctctctcattatggtttgtctgaagatacactgatacaagcatgtggaccggttaatgctgctcggtatcttgaatcaaaactacgagaatggagtgatgatttggtttttgtagagatgtgggctgccgaaaccagtgtcaaagttgatagaaaacctgaagtttcctgccaaggctgcttttttggggaagaactgaaaagccttgttgagttggaaaccaattggcttatggagattataacagtttttctccaccaatttgacaatctttgcagcgaccacttccacaacaatgcagtttcatgggacgaagacgtcattaccagctccagcaatttaacagtgtctcatggtgtcgcagaagcattggacaatttaagaaggcatctgtgtgttcttcatctaaacatgaacccgaaagacttcttggacttgtggagaaatctcgcggaagggcttgaccattatgtttctcgtaaatttttctcaggagaacctgttttacggagacaaaagtttgataggtttgaagttgacgcagaggcacttcttactgtgcttaaaccttattgtgttcgtcctggtgcatttttccctcgtgtgcgagagattcttaggctgttgaggatgcatgaggaagaaaaggcacgattgagaggagctctaagtcgaagtggaaatacttgtctaaagttgtttggtatttctaacttgtctcctcaacttgtggaacaattttgtaggtcttactagtaatgaatgcctttttgtaaaattgtatcagtatttgagtccatgatcaagaagatgagaagtgcagcagaaattggataaattgaaaactagcaatggtgtgttaaaaatgatacaaccttgcttttgattccgtagaagtacatacccatgactctaaagatcatcttcaataaacaaaaaaaggattaatctggtctggtgaaactaaaagaagaatagataagttaagtgaagtgaagaatcaagagaactcttggatcaagggctcatagaagagtctgtatgcgtccatgacttctaaataccacatggcttcacgatctgggctcaccgacaggtcaaccatcttatgaacctggtttcagtttaaaacaacaatgacaagtttcagtaatcaaagcattgcatgtaaatgcagatgatactttgactcgaacatcacaagagaagatgaatcttaatcactagtgattacaagcatcttcatgccacacctagatatatcatcacaagatttttactaacacattgaaactcaaaacctcttatggaacttaagctccttagtcacctaagcttgtgtcagcctgatctagtgatcataacatctaacattctcacttaactctttaatgtgccaattggcataataaaccaatttgactagtctgcaactctagcgaaactaaaatcacattggagtgatccaatgtgcatatcaaagacctaaagttttcaaattaaccttaagtagaggtatctgcccagtacggacttggtagacaccaacaaccatcacgtacattcctgatttccattgacggagggcaaaatcgttggtgagaccgagctccaaaagaccggttccgtcatcaagtaccagacaattatcgccgccgccaccggagaaggggaccaaaacgccctgcaacgcaagacttgaagtcatcgaaacaggaattaacaatttagctatagacaatgagaggatgatagattgggaacctgtaaccaagcacgttgaaaaagtacaccgcctagggaggcggcgttctgagaaggcgtcggtttagcgtcccggagctgagaacaaagcatcttcaccgccgctaagctgtagtccattttacccgccgatccgactcggctgatcaatttcacaaatgcctttaccccatcgattaccggattaaaccgaaccgaacaaatggtatcggtacagtaatttgattttgatttttggcagatattgggagagggaatattgtatttgaaaagaaaaaaaaaatggaattcatggtgttttggctttttgactaattaaaatcattaacatgcaaactaaaagatgtaaaaatctttataaaatacaaacaaaaaaaataaacaaattttgagacaaaaaataaatctggaatcaatcttatccaagaaatagacccacaatatcaaagaaaataatgaggtgtcacaaagctattgattgataacacatcctcgaaatctctctctttgtccacagaataaaaatctatttcttgtgtttgtgttgtatttacttaaaaaaataaaggagatcagtttgggagaaagcagcaaagaagaaaaatggcagcaacatttgcaacaccatcgacggtgataggcctcggaggatcatccatcaccaccaaacccttctcttcatgtactctttttctctctttctcttttcgaataatttcaatcaaacatatatatgcatatgataatcttgatttgtgatttctcgtatgttttttagcctttttaaaaccaacattaagcgccaagaaccctttgagactcgccggtgcatcgggaggaagagtcacttggtaggttactctttattttcttctcatagtaataacaaagatatcacattttatgaaaatgcttaaaactccagaagtatcactagttatgttactaaagatataggaatgagtcctaactgatcttaggaacttaataaagcttgttttgattttgaggtgctttttagggtattttctaataaatttatttgtttgtgtcaaaaatgaattaaagctttgagaggaactggttgaggagagatttgaacgtggtaggatttgggctgatcggatggctagctccgtcgagcattccagcgataaatgggaagagcctgacgggtctcttcttcgatagcatcggaactgagctcgctcacttcccgactcctccagctctcacttcacagttctggttgtggttggttacgtggcacttaggcctcttcctctgcctcactttcggacaaatcggattcaagggcaggactgaagattacttctaaggataactattcttgttttcgtttgtactatatgctctctcttggttatgtgtaatattatcaatcaaaacaaagctttctttgctatttgatgtttcattctatatctcgacaagtctttcttatatgatcttgattttaagaatgtctgtcagtctaactaaagtattaaatgttaaaagcgtttctcgagggaaagctcacaaaagattgggataatacttcaaaacgaaacatcacaatacgtctttgacttgaaccatacaaacagtttttgtcttgcaatctcgaatcttttaaaaaatagaaaaattatctctctttcttcttactctttcatgttttttgtattaatcttgatgtgtatatgttccaataaactctaaacatgcatgaagatttgtgaatctaaagtctttaacatgtctttcgactacgaaacaaaaattgatgaggaaaggtaaaaacttgaaagtagataaaatgaaaaagtaattccaagagttaaacaaagggggcagtgcagtatcttataaggttccaacaacactttcagagggaacaaaactacattttaactacacattctagatcaaacagccactatcccacacgtagannnnnnnnnnnnnnnnnnnattgttgaagtgcattttgtaaagttcgggtaatcttgtcaatgaattcatcctcctgtcaaaagcaactcgttaggtttgcacagcagctcaaataaagtgatgtggtaaaggacgaacctgcaacagggataaaagggcttccttcactttgtctctgctgataaccggaccagtgggtgcaggagcgagtgatggtggtggagttgggggtgtgaaaagctggagcaccggagtaccatatgaccgctgctggtgactcgcattattaggattgagaggaggagcagtgggcatagatacaccaggaatgaggtgcggctgtgccatcattcgtggggggccaaagaagac

SEQ ID NO: 35523 - DNA, 1090 bp, Arabidopsis thaliana landsberg
atttaattggaaaagtttatctattggaaaagttgcttaattatctcaaaaaaaaaaaaaattatctattggaaaagttgcttaattatcttgaaataataaatccaaactttctttgctaccaaaaatttatctagtggctgagaagagctgtataaaggagctggttccaagcgtctgggactccagggaggcaccaatggctgcagtcttggtacagcaatggcgactttttctctttttccgataagctctgtttccggtatactgacgggtgaccatccttcctgtagtccgataatctcgtgatgtttagataagtgacaggtgttttcatacctcttagcactttctcaagcactttcattttagacgggtatggagttaggtatgtatcgttcttgatcggttctgtttcgctatcacatgctcctcctgagttccattgcccaccactgcaaaacaattccaaaagtgtcaagatttagactagacctaaatgattgagactctacataagcagatttaaagacggtctgcgtttacctgaaatgggatgcggaatagccccgaaagaaaacgagggactttgccggattcacattcttctcaacccatcgaccccatgtagtcaaagctttacgaaaagcttcaagaacagcgagttcatgataaacattacttccttcttgataataatcctccctatgaaacaaactccaaaatcagttctacattatacaacacaaacaaagacagagcaaatattccagtagattgagagagattttagtaccctttggatgttttctcatgagtccaccaatgtccggtattaaagacaataacataagctcctttgtactgctcagaggacttcccaaccaaatccaaccttaaagtctccttctttgttcctttcttgtctacaatttcccactcttgaaccaagaagggtgaaacaaagaactccaccgtgcagttataatcctatcaatcaaattgaaaacttttaatataaaagtataaagaaccaattgggctataagcaaattaagaagaaaagccttacttggaagacaaatgagta

SEQ ID NO: 35524 - DNA, 2202 bp, Arabidopsis thaliana landsberg
  unsure (1)..(2202): unsure at all n locations
gggtttgtgcataaattatgagagatgagatttttggcaatatttggaacacattaagcattttttaaagtcaggtttcgagtagtagagggtagggaaagtgaccagtatgcgtaattggaagacccgaaccatctccgatgagaacagattcatcagcaaagtaaggatgatgcaaggctaggttgtgaagatcactgtttaagcgatgtgttgcgccattgtctagaagccacatattggtgggatgcggggatactgcagtgaggtttgctcgtgggtgccacagacaaaaaggtgacgggagtagacattgctgtgggttggtttgttgctgatgaagttgaggacatcgtttggcgctgtgaccaaacacgccacacaattgacactttatttggtagccctttgtcattcagttgtcagatttgagctgataggtttgttgatttataccattccaagtctgtttttgagtgaagcgttgtttatcttggtgcgatttttggttttgtggacgcgagacgtagtttgccgagatcagagcaacacttgacaaagagaaggaggctgcctattattctaacattaacatctacaaaattagtttatgacgcgtttataattcaaaactaacaaatgattgtttaaaaattgtgaatgatacatttttgaaaataattaaaaaaattgtaacactaaaactaattactcattggatgaatggatgattagatacttaaaatttacacataaaaaaatatattataaaaaataaaattgcagcatagcgcgaaaatgatcatctagtattattaatattaaagtttaaattatttataattatctttaactatattatttacatttatatttattttatattagaataattacattaatatcattcttatatagttatataaaagaatataatatataaatttagttttacgagaatctattctaattcttccgaaacacctttgtgtttttactctcgtcaaaatttatcatacttgctaagtattgcattcatgttgtaatttcaacggtttggtcaatgtttttaagaaagaagatgtaaaaaaagataaaaatgattaaaattaaaaaaaatgccaaatagaaaccctcaccttctcttctctctctctcgttgtcatatcattccatttcgtcgcaggtcgtgcgctcgaaaaactcaacacgaaattcattatttcgaaatagatctctttttaagcttcaaagatcaaaactttatccggagaaagagaatatgaacacgaatcacattcaatctctcaatcttctctaaggtctattatcatcttttaatcatttcgatttttgatcatcttttttcttcttcccattacatcggatcgatgcatcaacgccataattatctcaaaatcgtttctttgcgtctttgtttatcgaattgccatttttgatcttgtgggtcaaaaagtttggtcttttttcttacaaattttctggttcctgtttgattaaagacatttttatgttgcagggatttgttttgtcttgattctgcggagaaatcgattagaaaaaatgtctagttacgttggtgttcttgtctctgatccttggttacagagccaatttacacaagtggaattgcgtacccttaaatctaaggtatatctagatcgcattctttttgattcatgtgttttattacattacctctgtgttgaaagttttcattttttttgtacattttaatttgtttcgaacaaaactcaattaggacgtttcactgtcggagatttaccacctgttttcgaaaagttgaaagcttttaacggtaccattgatgaggatgagatcaaatctgtattggacaagtcttatcccaatgctgatgatgaagtcgattttgagttctttcttctggtgagtttttgtacttatgatgatgagtctgaagatttagaatagaaactatgaaggtcattttttttacatggtttatggtgacatgtttgataggcctttttaagtgtgcaagcacgaggagttgagaaatcaggaggatcaaaaggcgcttcatcgtttctaagacaagtactccaacgttccatcactcgataaacgaatccgagaaagcttcatatgtgtcacatatanatagttatttgaaagatgaacctaacttgaagagctatc

SEQ ID NO: 35525 - DNA, 1420 bp, Arabidopsis thaliana landsberg
tacggagggggggcttttggaaaagtaaaaatatttctctttaaaagaaaaaaataataaagattttgttacttaaaattccaatatttgtttcccttttattgttttcctattattaaaaggattagattaacataaaagcaatcaaccgactttaattaccaagtaagaaattgtttttacatagatctataaatagggcaccaactttccaaaccttgagaccatcacacaattcacaatcaatcgcagagccgattctcttcaaaacttgtctagtcctttgtccttgttgcaaacgatggcagaaacgaagaaggtgatcatcctcaagagctccgacggtgaatccttcgaggtcgaggaagccgtcgcggtcgagtcccagacgattaagcacatgatcgaggacgactgcgtcgataacggaattccacttcccaatgtcaccggagccatcctcgcgaaggttatcgagtactgcaagaaacacgttgaagccgctgctgaggctggtggagacaaggatttctatggttccaccgagaaccacgagctcaagacttgggacaacgatttcgtcaaagttgatcatcctactctcttcgatctccttcgggttagtaatgtctttttctttgttttttggttttatgtttttagaattagggttttttatattttttccatgactatgttagggttttatttatattattgaatgttgtgttttgatttggagactaatcgtcttggtttgtacaggctgcgaactatttgaacatcggtggacttcttgaccttacgtgcaaggccgtggctgatcagatgagaggcaaaactccagagcagatgcgtgcgcacttcaacatcaagaacgattacacacctgaggaagaggccgaggttcgcaatgagaacaagtgggcgttcgagtgattggaaaagaatttaagaacatttgatatcaacaaataacataagagaaatttattttgcctgaatttctttttgcttccaatctcttttgtcacaaaactcccagaagtgtttcacattttcttcattcaatcccggctaaactttatatacataaaatcacaaagtaatatgcattatcaatcaaacgatttcacagacaaaaaaaacagaaaagagataataatacgtctatctatataagctatataattatgatgtatttatatatccaatttgccacgtttattttatgatacaataacatgtttgcccgagccatagacgatatgaggccagatgaacatggtcggatctgaaatattctcaatttctgaaatccaatggtaagagcttatcttcctttcttatctgcttaagatatagattttttgaatttccttataaaatgattggtatgtataactaaattggttacaga

SEQ ID NO: 35526 - DNA, 2257 bp, Arabidopsis thaliana landsberg
gatgccttatgagttggccaaggagttcgacaggttgagtctcggatttctgaacaattcgcgaggagtcacagtcgagttggaacctaccttagagcgcgaaatcaaagaagcgcatgaaaagatcagtgagattcggcgactgattctagatggcagaggcaaagattttcgagaagatgcagaaggcgtgatatggttcaaagaccgcttgtgttcccaatgtccagtccattcgggagttgatccttaaggaagctcatgagacagcttattcgattcaccctggcagtgagaagatgtatcaagatctgaagaagaaattctggtggtacggaatgaagagagaaatcgcagagcatgtggctaagtgtgatagttgtcgaaggattaaggcagagcaccagagaccagttggattgttgcaaccgttgcaaattcctcagtggaaatgggatgaaatcggtatggatttcatagtcggattgcctcgcactcgtgccggctacgattccatttgggtagtagtggaccgtttgaccaagtcagcccacttcatacctgtcaagaccaactacagcagtgcagtattggcagagttgtacatgtctcggatcgtctgtcttcacggtgtgccaaagaagatagtgtcagaccgaggaacgcagttcacctctcatttctggcagcagttgcatgaagccttgggcacacatctgaatttcagttcagcttgtcatccgcagacagatggtcagaccgaaatgaccaatcaaattcttgaagacatgttgagagcctgtgcgttgcaagacaagtcaggatgggacaaaaggttaccttatgcagaattctcctacaacaatagttaccaggccagcttgaagatgtcgccgtttcaggcactctatggacggagttgtaggactccgctgcattgggaccagcctggagagagacaggtgtttggccccgacattttgcttgaagccgaagagaatatcaaaatggttcgagagaatctgaagatagcacaatcaagacagcgacgtatgcggaccgaaggagaagagagctgagttttgaagtgggagattacgtctatctgaaggtgtcacctatcaggggagtcagaaggttcggagttaaaggcaagttagcaccccggtacattggtccatttccaattcttgaacaatgtgggccagtggcataccagctcaacctaccagagagcttgtctgctgtgcataatgtgttccacgtgtcacaattgaagaagtgtcttcgggttccagatcgaaccattgaagtaacagatgttgtccttgaaccagacttgacatattcagaacatcccattcgagtcctgaatcaaaaggacagggttacccgaagaaaaactcttaagttctataagatacagtggaaccagcattctgaagatgaggctacatgggaaactcaagactttttagataagaatttcctaggctttttagcctcttgtaaattgtaaagcatatgtatagctgttgtaataaaggagtaattcccaaaccacccctgccttgtaccagaaataaggaaataaaagtatgccgtgtttccttttccattacttaccctaggacttttaatctcgggacgagattcttttaaggggggagggctgtaacacccctgatgttactgttactaaaacttgagcataacatcataagcattggcattccatatgtttgttacacctagagtgcattcactaggcaaaaatttcaaacaagttgtattgttatggtattttgcaaatagaaccctggatagggacttaaccctaaatggggttaaagggtaagacctaacccaaattgagaaaacctaaaggatttagggaaataattataaaatgtccccaaaaataaagttgaatcacatttatacccctgggataccaaaaatccccatttgaaccctggaaaaccctaaatccaaaccctaggggcatatgtgcaaaattagtccactttgggactaaagtgcaaaaaccaagttaaataagtatcttaagtcatttgggtcgctcatatgtgaatttgcaagccaaaccctaagttttggacccatttgcaaaaaggaccctaattgagatttcatgttaaatatcagtgtgttttcttcaactttgcgcccttgtatctttcaaactatagggtttttgctctaggtcaccacatcaaagttatagagtaaacat

SEQ ID NO: 35527 - DNA, 2833 bp, Arabidopsis thaliana landsberg
aatcaatcttcacgagggcaaaagcaataaatacattattgtcacccaatgttgaagaataattcaaacacggtttggggatttcaatttctgttttaattgtaggacataatgagactatgggttttacgtttttttcttcttctacagattcatgtagtctcattctgaaaaagtatcagagacaatcattgaaaatcagagaataaagtaccattaagcaaatatgtttttgttctctgttcgacacatatgttataacaacaatgtagtatcacacctatgttccatcatctctgtttctgacactgatcaagtcggcgccaaatctctaaacaacactcggacacttccatcaaaactatcaggcctatatccataatatatctatttgatagctgaaaagtgaaaactaatgctagttccaacagaaactaaatattggggcacgaaattaagtcaaagtaaaccaggtgaggacaacgtcaagaatggcgtttaagactatgatggtgtctgttccctaaaaactcttgggtccaggcctgaaattaaactcatccgttaaacgtggtaaatgaccggcattatatatgtgaagctaaataaataggctcaatatcaataaggagaatgaagacctctgacatcttaaaccttgtgacttgcattgcatgacatacatgttaaatctgttttctcaaaagctttacaaaagcagagagggacacaggagtcaactttaactactgacctaacaaaagagagaacataaacgctttcattaccagttgccactgatactgtcttgcattcttcaaagtgatcagataacgtacccttatttagtcataataagggttatatacatcgctatcatctgagtaaaagtcgtagtcgtcttctcctgctgaatatatatcggaagaggcatcaaaaggggaatcagcggttgagtcatcagggcgtctcaaatctctgatcctctcagaacagcgcttctcgagatccccgagaaggttaatgttgaagcagcggcgtaaatcaagatgtaccaagtgaacacagttgtcaagaatggcttccaatcttaagttggtcagtccgttcccaaaaagctcgaggtgtcgtaattcgggcatggtttcagcaattgctagaggttcatcatcatatttaacgaaccggctgaaagaaggacggtttagcttgaatgtcttcagtagtgggcaagcgtggcctatagctttcaaatccagttgtgtatagccctgtgaaatatcgagttcctcaaggaatgagagcttcatgactgcactgacaaatccattgccagttagtggatagcacattgcaagcctaaggcatctcagattacttgatctgaaaaaaagaaaattgtgataaaaggtcaatcttatcaactcagaagcatatatacattccacataaccatattcatcttaaatctcagagaacactgctttatcaaaaccacagattcatcaacatgacctctaacttgcaaggccttcacacaatcccaaggcaacatatccagttaataaaaaccacaagctttgttaaattttgccctaattcgcccaattccttctccaatcctgttaataatctgatctaaaccctagaaagtttactgaaaccaaccaaaaattctaagaatagaaacaaacctttgggcgatgtaggagtagagagaatcgttgccgaagtgtaccatgttgatttcgactaaaccaccttcgctgagataacggcgtgacggcacatcctgtcgtagtcgtaaccaaagattccgttgtttctcatgtcgattttgcgccacatggatgggtctttgcagacgcgtcgccacgatctgcatacaatttgagcgtttcttagtatctcaatcgtgctgagatggagaagaatcgaagatgttagttccggcggaagctccgcccagtttctggactctccgtctttcaacggcagaggatcgtactgcgacgaagaggagaaggaagccatttctgtgggaatcggaaaattgttgagatcacaagtttactatctagtcctcatcgcactaaaaaatctacgaatacaatttgtgccaattgcttactggcccaataagtattgggcctaggatcatacaatacattaggcccaatatcatagcggattgtttcggaaacagagcaatgttgtttgactaaaaaaaaaaacagagcaatgttcaaaaatccaaagaaacaagaattaaagaaacctagcaaagaacttagaccatccctattgcataacttctagtgtgtgttttaaagactaaccatagttaaaattaaagacattcacctttttggatgtcaaatatgtctttcttaagacattttagacacccaaaaaagcaaatgtctttagttttaatcgtggttgatctatttttaccatggttagtcttaaagacattaataaaaggttatgctatggaaatgctcttagtgaagtttcttctacaattcgtctgtgtagccacgccggactaccccaaaccaatacaaattgagacgtccttccatagtagtgctcttaagagcattattattaggaatgtttttataattgattgtgaaaatttccacgttaagaattttgttaaaagattaaaattttgactgtaatgaaaggttcttaacttggactttttaaaataaaaatattttaattttaaatatcttaataattattacaactcctcccatttgaaacagacatgacataaaaaattaaacaaacatgacgtaaacataaacgaaaacggtta

SEQ ID NO: 35528 - DNA, 1984 bp, Arabidopsis thaliana landsberg
gagatgttgctcgatcgagtatcctcggctgttccagtcgagttagttccttctgttatcttgctcgattgactgctagagtacacaggtcgagtagaactttcttccttttctgtgactgaactgacttcttctgaacagatattcaattcctcaaatgtctcccatgcttctaccggtctattggagtctaatagatctttgtaaccctgggtttctaagtataggtatccctcttctccatccttggtaagagcgctttgtaaatgatctttctcattaagttcctcaagcaactcatctgccaatctatccatctcttcaatgtagaaaacttgaccctgaatggttggcttcctcatggttttcttaatatcaaaggtcatattgaggtttcccccaaggtttagatcaattttaccttttctgacatctatcaaggctccagcagtagctaagaagggtcttcccaatatgagaggatccttaggttcttcatccatctctagaaccacgaagtcagttgggatttctactgatccgatcctcaccggcaaatcttccaacatgccatgaggtattctccctgacctatcagcaagaactagctgaatgtagcatggtttgtacttggaaaatcctagcctcttcgcaatagatagcggcataaggctgaccgaagctccaagatcacataaacacttgttgaaaactagagggcctaaggagcaaggtagagtgaaggaacctggatcacctaacttcttaggaatcatccgcctttgtaatatggcactgcattcatgactcaacactaccattccttgaacttattgaattctttccatgatcatattttgtattaacttgtgagaatctggaataagcataaaagcatctatgagtggcatcttgagctctatctctttgatatgcctagagaacatggctctgtacttttccaaaatctgcttcttgaaccttcctggaaagggaagtttgggtttatagggcggtggaatgaacactttcctcttatcttcttcagcagctggtttctcatgaactggaacttgtgctcggttggcaggcaaagtatcctggtcgagttcgactctatggactgattctggagttaaatcctccccttcttgaacttcactgtccctagtgatcttttctgttggctggttgttgatcaatttccttccactatggagtgtgactgcgtgtgcatattccttgcaattgtgaatggcttttcctgggtgttgccctggatacgttgaggaggtattggcaacagcttggcgttccatgtatgtcatttagatgtgagatcctcatatttgctttttaactcattgtaggaacagtcaactttactattaatctcagccaatcgttcttccagaactagagctccagtagtttgaccctggatgatttgttgaagcattcgtttggtgtcaggatcttgggctgctagggcttgttgtggttgttgagtgaaccctggtggtggattctgctgttggtagccaccattgaactgttgtttagggacataaccttggttgtactgaacaaaaggcttggactgattctgttgtggtggatacacttgatcttgggggttagctacattggtgcttctgtaggagaggtttgggttgggcttgtagttgttgtagcccttgttaaaccctccttggttctgaatgtagcacagctcttcagtttgatcattccccccttcttgcatttggaagtgctcttcatcagtgatgtaatttatctgcttctgctaaccagcaacagcttgtctaacttttcattcagagccttgatatccttgctctgtttgtcctcacttcctccagttcttctgattgagggatcatagtcttttgtagcacccatcagattgtgctagattttcaaccaactcccagccttctactacatctttgttcaggaagtc

SEQ ID NO: 35529 - DNA, 3684 bp, Arabidopsis thaliana landsberg
  unsure (1)..(3684): unsure at all n locations
aaaacaatatgcctgaccatgatgtcataggataactgaatatactttgccagagttcacacaacgggagcagaaattacgacgcagaccacaccttcacaaaaaaaataaagagtagaaacatgccacccagaatatacttccaactatccaaaatgatcattttgaagcaaggctcttacagttacaagacctttatcttggaacatgtacttgagaccttcttgtacaagctggtgagcgcgacatactagatcaagattgttaatatggttaaactgcacaagaagcaaaaccacagatcagggaactgaaatacatttatttcttttcacaccttattcaaatttcaaccccagaaaaaaatataaatacctcagtggtaaccctggacccgaaaagccaaccagctccacgtggactgacagcccatgtttcaatatcttcaggatcactccacataagatcacagaagggtccttcatgcggtatttcgcaattccgctcaatcaatcttatctagagaacaaaataacatctaaatgagtaaatgagatttaatctaatcataaataacacttgcatggtgaaaaccaaaagtaatttaaaatagcacattttaacctggtcaattgtccgtacatcaggtgaaaggccaccatgaacacatagaacctacattgaggatgcaatacgttttaatatggtatacagctaacttatgcattcataaaattatacaagaacacatcataacacaatgccaaagaagctgagaaatacttacagtgccatctataatagctgaaagtgtaagatagtcaaaaacatccgtgcaatatctccaagcattagcattaccatacttcctttggcattcgtcatagaaaccatacacctagcaaatataaaattggtacgacaatttaagaaaactataaaaatgaacctgcagggcacaaaatatcactacaatcttcgtccttgacagtggatgttaaaagatataggatatggtgtaggatagagataaatcaagagcttcctaagaagaaaacttatggttgcaaagggttcacataaaatgcatcttagttaacatctatgcctatatctagcatggcattgccacatgtacaaaataaactttcaaaactagttataacaattgagcgaaaattacttctcaaccagtaactgcgtgaagagcacagcaagtcagcaacaatagatataaatggattagaataatgcatacctgagttagctgtctactttcatgatttccacgcaaaagagtgatattggctggatgtctacatattgaaatacaaggaaacgagtgattttaagctcacagcaaagtaagttagaatataaatttcctggaatacaagttaaatcgattttccagtagagcaatgcgtttacagcttaaagagcattctcaagagaactatgatatacagtgtgaaacggaaggatgacgatccatgacatatataacgcacaatttctacggaaaatcttaccttgctttaagaagcaaaagaatggtgaaaacttcaagactgttgtaacctctatcaacgaaatccccctgagaaaatcccccacagataattaaactatgtgttacatattgatatgtcatacgagcctacgcccaaagtcagagtctataccataaatatgtaattggtctcgggaacatgacctccggtctggaaaagcttcataagatcatgaaactggccatggatatcaccacagacggtaacaggactgttgacaggttgtacatttgattcctcaataagaatttctttcacctatataatagtcaaaatatcttgtgaattaccagagtatcttagcaaatcattgtcatgaaaaaagaagaagacggctgctactacaagtttcaacactaaaattactataataaatcctcaaataacagtttgcaagcgtggacttggtgcatccataaattggctaaagaagagctaaacttatccctaattccttagaatttagaattgaaatagcaaagtcaataaatcctctattggaaaaatgagagaaaaaccctaaaatccgtagaccaaaatggcaaaggaaacagtaagggagagagaccagattcaaagtaaagtgccacaaagcaagctctaaagtctcaaaagagtaagcgaagaattgggtttttgtagatgcatgaatattcggggaagagaaagcaagcaagagaagaaagaagaaagaagaagaaggcgtacgtattcgcagagaagttgaagctcgtcctcagagagatgttggccgtctttaaccttggaaatccattgatctaaatccatggcggccttttattatcctctctgtctctctctttcggnggtgaagtggaaattggtgctgtttcttcgatttcaatggtgagtctcgacgatctctggtgaagaattgaaagaaagatagatctagcagagcattgctccgtccgcttagggttacgtaagggggaaagagggagagagagagaaaggggaaacacaacgaaccaaacaatctcgacccgaacccgatttggtcttcctccatccccaaactctattcgttggatatttatttttaatcatttttttggcaacatgttaaacatcaatttaatttttatctattacttcattacacaaatctttaatggagtatactacacattttcaatgtttttgcaattcttttcttggtaattttatttgtctacttgaatgtgacaattgataacacctaaataaaattccacaaatacttaaaccttctttatagtattttttcttctttttaattttaaaaaaaaaacacatttcgatatatgtgttgttgaatttgagtaagacctttttgataattaaaaactcctaaataaaattatttaaaagtcttgttaaacaaattgtgtctaaagacacatttcgaaatctatgtgatgttgaacttttgaggaaggttgtttgtgggagaccgtacgggatatgttagaaatgaatcaatgatcttggataggcattagcaatacgatcgttcaagagcgaacctcactcgattcatttcaatgtttatgtttgggtcttcccatttggcttctggttagggataatttgagaaggaaaagtattgttatgatgacctctaaaaatgacaaaatggagtttgtctcaccaaaaaatctccaatgttcaaattacatccgaaaaaatcactagtcggagggccaaatattacggaaagtatatattggtgttggtttggtttatacttggtcgagaggtgatccgaaacttagttccacttaaaaaagtgatgcatcgcaaaggtaattcgaaatttaaattgtgaagagtttactcagctgcaagaataaaaatgatttttctcagacatgttcatttcgggtttgggctggattgagtttttttttaacccacgacaacattccaagaaaggtcacttgttgaagagggattccaccaactgaccatgtgatacaatgtgcatttttcatcatatgccattttatccatcttattatctcaataaaagtaggagctaggtcgagatatcactgaaatcggccaaaaaaactagtagttacataggttttaaaatacacaaggc

SEQ ID NO: 35530 - DNA, 1678 bp, Arabidopsis thaliana landsberg
aaaaacccccatttattatattgcattcattacgtagattagctaatgatatatatattaaaagtagagagaggagaaagacagaaactgaagactttttaaagtctttttggctccgaaattgccaagcaatatcgactatttaaattgggataacatgcaagatctataattgagaataagacagcatgtaaatgctacagttacgaggaaaattatcaaccatgtcatatgattggagcttgatctgaaagagtcttggcattcccagcagtcgacaccatcaatcgtcaccggacggagcaccaagaggaagtggccgaaacattagctgcaatctcatccacagtggattggtaaattcctccctgtgaaaacattagaattaatactcttatccgataatttaaataattcaattttgtttcaaaatacctgtccaacaacagttacgtagcttggagtccagcaaattctgacggtaaccgatgcaattttagccctttgtcgaagagcatcttcaaaaacatcatgaacgaaagcagctccaaattcagcttcatactctaccaagtacttggtccacatacgtttaagcaagaatcttttgacatcatgacgctaattaaaaacaaaacatgagttagaagacatgtgctaattaaaaaaaaaacacaaaacaagctaagactctctcataccacaccggagaattcgtcgaatatgtactaagaatgaacaattttgaaacgagagtgagtgaacaatatagcaaatcgaatcaaagcaagctaagtgtaagtgaaaatgaaactacaaatctgaagccaaagagcaacatgtgaaatcaaactgaaactaaacatcattaaatgtgaaacgcaataaacaattttttacctataaactaaatatgcaatacacgcataaaatgacattaccaagaccagctaaacagagtcacaacaaaaaacaaccaccacgtgagagaaagttgacacatttatcactaagtgtgagcagttttaatacataattaagttagggatcttaaaaccctaaccctatctcaaaataaagcataccaccttctatagcctatatgttatcacatgcataatcactgacaaaaggccttaaagatgcatataattaaggtacaaaaaagtgccgccacaagttttaattattgttatttccatcaagtaacaccatttaacgcatcctttaatttaaatatttcgctcttcttataagatattttttttctaggtatatgtatctaatctatggaccttatctaggctgtatctagggtttttgcccgaaaaaaataatagagaggttctttagggtttattgggtctagttttgcagtaaggtggctattgtatatcagagctcaaatgaattcgtcgttgtgactgtagtagagctttttgacgggaaataaggtgcactcacatgtgaaggtgaacattttttctaggaatatatgaggaaatggcaacagctgtagtgaggctttaatttaatttgtcaatcaaaactattcgtctagttgactttctctaccatgacttgtttgccaaaccttcgtgtaatttcctatgatctttctctattaaagtcaactttctttttatatcaaataaaataaaaagtacggaatcaagaa

SEQ ID NO: 35531 - DNA, 7079 bp, Arabidopsis thaliana landsberg
gtttaaattttgtatcagttatgtttttatttcagttacttatatttctgtaacactcaaatgttttgtgaaacttagtaaatttcatgatggtttgttattagtcaatcaatttgcgatctgattgggtatttaccttgaactcaaattttgctttctgatctttgaggctcattgtcgaaaaccttatctgaaaattcaatacgaagaatcctttgttaaattcaagctatttaatcaaacgtcgcaattttctcaaattaaatatgaattacgaaccttatcgacttgtgattggagaagaaaattgccacgggagatacagttgcttgttctatactagctccgatagagagaatgccactatctgcgaaaaagtaaccaggaatgtcactcttctaatttttattttttgtcgaattaaaaataaatgagaaaaaattcaaataattggcaaaagaccaaaaacccagatgacccaacaaagtatccgatccaattaagatccatgcccagcgatctaaaacccattccaaacttaagcgaaatccctaatttttaaaatcaaaccgtttctgctctcattcaattcaaattttccaaaatcaaattcataatttctcgcctttcgcgatttttcgacgaattcttgattcgtctaatagtttgatggctcgtgttagagacggtattgctggccctgtatatgattcgacggaaaagtcgttgtccgctgaagtttcgacatcagaacaagttacttcagaaattgagaacgacggagatgccgccgacttggttccgaccgaaccagcaggtccgacagaaccagcagcacgagatgttgcggcgaatgatactacaaaagaaagcgctgaaattgaaaaggctatggaggaacgcgtgatggtgatgaggcttctcctaaaggaaccgctgaaattgaaaaggctatggaggaaccgcgtgttggtgatgaggcttctcctaaaggaaccgccaaaattgaagaggatcagacagggacaactttgaaacctctaattgacgctgtcattcaacaattcgaagaagcgaaagacgggaatggggaggagttggaggaggaggaaatggtgaatacaatttcaaaagaaggggtagaaaacgttaatcgtcaggtatatacaattgaatctctatgacacacatttgttttgtttgagtattagttctcgtattagttagaaatgttcaactagttcatctgtgacacatgtttgatttaagtaatttgatggaactagttcaattggtacatatgaattgttagtttggtacatatgaattcttcaattggttaatgtttattgaatttgcaggatacttgtgaggccaaggatgatgaggtttctgttaaagagacagaggaagatgaggctggcaatgatggtttggaggatgatgatttagtttttcagccactgccgccacagaccatgcattttcctttttcagaatacgccaaagtgtgcaagataagcagtaggtgccaggtcacgcagacagttgaactgatagagagcaagtttaaagaagaagctgtatggttcaaaagacacgatcagtgagcctcaggagcctaaccaccagacgcaaggcatgtgggtgcttatgctgcgcacagtgaagacagatttgctcgaggaggcttggtttgtggtaaatggagtacctattaggtattccattaaagagcatgcgttgttaagtgggtttgattgccacagttacccaaaagaactaaatacaatggggaatattaactttgtgaagaggatattttaaaaagaatgtgggataaaggttgtagatgttcttgctaagtgctcgaagatgaagcatggttcagataggttgaagttagtgctgttgtacttcttggtcaaggtagtaaaagctggtgcaaagaatgatggaaacattgaagagtttctgttaaggattattggcgatttgaatgcgtgcgagacgtttccgtggggctgttacacctttttggaatgtatggcaggaataaggaaaatgatgaagaacatgaatggtttcgtgaaaccaaaagctcaaccttggtttagtggattcattgtgcctcttgaggtaagtaatttatgatcattatatgagaataaggtgtaatgtacatgttttatgatattaacattgttttgttatttgtagattctggcttatgaggctattccacagcttggactgaaatttagagtccctgtacgctccgctttgaatgactgtccaaggatttgcaagcataagtttaaagaatgtagcacgaaaggtgtcccgttggaagttatatataaagagcttgggaatagtaaggttagagtttctgtatttacttcattgtgtgtctagtctatcatgagattgattgattgctaaatgaatttcttttaacaggattttccacgcattttggtacctgcctatcatgagaaatatctgttgaaagatctcttaaacaatgatgttgatgatgactgcggtccaatagatattgttattgacagttggagagagcgactattagtagagaagaagaggatatggtggaaaggaatgtgtgagatggacatttcttctagatgtattgtaaatgatatttcggatgaggaagtccatgagattgagaatgaggtccccgagaaagatgtccctccgactgctgtccctcctcgattccctgatttagatacagttgtggcatctataacctcactgacgcagatgatgaccaaaggcttttatgaaccaaaagataagattgatgtcattgatgtgagagtgcagtctattgagttatttgtggcagatctgaaggaaagggaacatggtaagcaaacagaggaggcaagtcaacatgggcatgcaacagacgatgacgtgttatttgcttcgccagatggttatgtgaccaccggaaacgaggaacaacgggatatagtgatcagtgaacattctccagaggttgcagaaaacagtaagtataataattaatatctgttgggtataaaaatgtgaatatatgacttaggttttgttttaaaatgtgtgcaggtaataaggagacaaacacgacggagaaagaggtgaaaggaaaagcgaagaagaatggcgggggcaagaagaagcaggaggtgccacctgtaatagaaaccggaaagaagcgaacaaggggagcatcccgccttattacatcaccgtttgtggcggatgataagaagcgtaagagaatgcggaaggcagattgatccagttactggtagttgtggaacaattggtttatttaaaaacgtttggtttgatttgcattgtaatgatgtttacttttgtgaatttttaaacatttggcttgtaattggtcttttaggttcaactgtttattttggttcgactgagtagttcaaatagttcagatagttcaacactaggattagtcggttcgacttattagttcaaatggttcaatttggttcgactgattagttcaaatggttcaaatgtgttcgactgattagttcaaacggttcgacctatatagttcatccggttcgagtgattagttcaaatagttcagatagttcaacactaggattatctggttcgactaattagttcaaatggttcaaatgtgttcgactggttagttcaaacggttcgaccaatatagttcatccggttcgactgattagttcaaatgtgttcaatttggttcgactgattagttcaaatggttcaaatgtgttcgactggttagttcaaacggttcgacctatatagttcatacggttcgactgattagttcaaatagttcggatagttcaacactaggattatccggttcgactaatttgttcaaatggttcaatttgcttcgactgattagttcaaatagttcagatagttcgactaaagcccaaatggctcgactaagaagtccaaatggttcgaccaaacatccgttcgactgattatataattgttagcaaaatttcctttcaaaacacagatagttatattcaaacatttagattcatacattgtattcaaaacatagatagttagcaaaataaagatttaaaaccacaatttagatttagatttatcttacaaacttaagcaaaacaaaggcataatgtttattgaaagagagagtcaggaggatactcgcgtggaggctcatccactctcatgtaggaggaggtcgcatcatctggttcatcgtcctcctcaatgggatctggctccatgaaaaacgaccaatttggtgacgatccatcgtgctcaacacaccatttccttagtggcagtggaatgtcagcaactttgtcgaaaccgtatctcacccagtctttcggatgaacctccaaccgcctcatacctctctccaggtcttgcaactcaatgagtagttggcggtgacgccttctataagcttggtgttgattatccacctgtccaacaatagaaatgttaatttctcgcaaaatatccatcaatacaactatacgaccactatatgattcacctaatataaccaacaatcaacacaactaaacccaaaacctgaaatttgattaaaccctaaacctaaccaaacgagcaacaacgaaacactattcttacatttaccttttgaatgaccttagacatgtgtcatgcatctcgttggatagattcgtttgaccaaaaaactttccgggatgaataacttgacctgggacgaaatctcttggggctggaacaaaatccggccctatatctcctggtaaaggagacctcatccacggtaccgtcggctccacttctccaggggggattacacggtgaagcggaacccccaaatgtcggcggataaacccgatgtcaactaaccactcaggtggtggtggagaagaacaatccggtgatgttggagtcgcagacgccggagaggaaggcgccgacgttcttaccctctgaatggtccgtcgatgatcaggacctccatgatgaacttcaccggtgaacagtttcaatttcttgaattctctggtttcgtgtaaaattaaaagcagacgagtaaattgaatagacgtgactcttcgcctgtcccatctgaactttcacgccgaacgattaagaaaatgggctgggcttgggcctttttttactaggggttttagcatccctaaaataagtattccttttaggccttttgccatttttaatgggcttataaattaccaaaaacaaaatccaataaatttcaaaaaatagagtccgctttatgcaaaattcataattcaaaattcgaaaagacaaaaacgatttcaatcaatccctaaatcgaaacattcgaattccaaaattgatttagggttttgtgagtgccttctctaactactccgatgagttcaagttcagtgtcagtgtcatctggggttgacgaagcccgtggtttccggtgaaatgtgcgtgtggagtagatgtgacggtcttcacagccaagagtcaagacaatccaggaagacccttttccggtgtaaaagcaaaagagatccggatatgtggacaaacaaaagagatgtaaatagagttggtgtttatattgtgtatttgtgtagtgtatacttgcttaacttgtcagatttggtttgtgggttgtgcaatagggtcatttgtttaagtaggttgaggatgctgtgcaagaagaggtcgaagatgctttagcaaaatttggaatcattgcaaatgagattaacaaagtcaaatctgaggcaaatgagctacatgcgatgttacaagaactgaaagaataagcaatattgaacaaaaaggaaatctgcaagttgaaagtgtgcttaaaagtgtgttttgtgtggctttgcttgatcaacattgccaatatttacataatggttggtaaggcaaagaaaaaggaatttgtaatgttgtattagttgttgtctttactagcttataatgactttgtaatgtcgtatttgtgacttatatgccgtgtttttataatgcttttgttgttgttttaatgagtaacaagacttttacccgcggtacatcgcgggactatatgtttttttacaaaaagaaaacatttaatttgtttagtagattaaaaatatatatgatttaatgttttttattttctaaatatacaaattttatatctatatatttttaatgtaaaatttatatgtttgatttttactgtttaaaattttaggaacaataaacatacagttcattaagttaaaatctaaattataacaattataacaataatttaaaatttaaattttttttgttaatattgtttcttttgtatagtgtttaagataatataattgtattttgattgttatatctaggatttcacccgtgatatactgtctcgtattactatcgaccaaacccgtcctaccatctaatctcgtttagtgaaattaaatatatctattgaatttcacctgtagtataccatctcatattactatcgacccaaaaccgtcctatcatctaaccccgttcagtgaaattaaacattattttgttgtttttattttaataatatttttatttaaaaaatatataattcaaatcaatttaaaagatatataatttaacagatatcgtagggtagaaatactcggaaaatgtatgttgggagtaattagttgatgaaaaaatctcggattataaatatgtgaataaacccgtgtagaattttttggggagatttttggaaacgtttgttgagcgcaatataaaatatttaaattttcaaatctgaataactttttttctttcacatctgaataattaatatcaattagatatcttgagagatttttggcaactattattgaatataatatcttgtatttaattatcaacagaaaatatttaatgtcagtggcataccattgtaaataagtgccaagtacaggatttatttgctaaaatggctgcaaaaatgtatatgtagataacaaaaaccgaatggatacaaacct

SEQ ID NO: 35532 - DNA, 6278 bp, Arabidopsis thaliana landsberg
gcctcatcgatggtttacaactaataactaaggagacagatgcggggtttgcgggcggttttgaagcccttatggaccctcccttacaacaatcttaagaaccatagtcttgactgtcataggctcattcatgaacagaaagattgaccggatttgatatttgaaaacgaaaagaatgcgggaaacaaatgatcagctttgtcccaaactttaaagacagcttctagaaactttgatacgccaagagataactaactagcccccagggaaaggtgtgaaacgtgtggcacatataacatagcatattaggattatcacccccattcaaggcagagtaataccttatccgttaggacttcaactcagagagattctgtccccccctacagataggcaccctcatagtagaaggtcagcagagagatctttcgacagagctcccagcagagatttggtctctcactacccgtcaagaagaagcagctattacccaagaaactcccagcaaccgtggagagaaaaacataagagtgattttgcatcccagtttgaactctctgattcctcaagaagaagacgtaccaccttggagaaaaatgtaaaaaatattggtcaacaatcatcatatccctttcaggccaaccctgctactagaagaaggctaagtccaatagaagttggatccccccctcagattatccctacaaaagaacaagttatgagtgaactacaagaagtcacagtccaatatataacatgtgcagaccctacagaaagtgcagctagaaagcaaagagtgctacaaggtgaggcaaggaatttaatggccaatacagctaacctaataattcaggcagcaacagtttctacttcctctacataaccaaacgaaataatcaatcaatataaagagagactcaatgtcatagaagaacaagttcaaaactcagtccccactggggaacacacaaagagaagaagaggcagaccacctttaaaaaatggcactaaaccagcacccaaattacttggagttagcccaaaagtgaaaccttactactggatcccctaagaaaactccacattagaggtgctctccacagaaagtcactaacctagcggacccaagtactgtcaatcgggacccagaagagaacctccctccctcaattggtccaatttccaaagctggttctactaaaccacgaatacctgctgccccaaagatcaaattgatccttgcaagcataaaaaaagatggtggatatttagaacccgccagcccctattctttaagaatggtaagctagaactgttgtgggctggggaatcctataacagttcgcagactcaggaatatccatagccacatatctcctgacatactattccttatagagactaagcataactctgaaattgtcctaaaaaactagaatggatggactatacctcatatgcgtttgagtctccagtaactccgggagcaggggagtggctctttttaggaaaaacaagtggagttagaaattctcagctcttgtctacactacatcgataccaaaattacgacaaaggggaaaagcttctatgctacattcatgtatggagagccagacagaaccaaaagactacaaatttggacccaaatcaaagatcatgctgcttctagaagtgacctgtggatactgactggtgatttcaacgatatcattaacaacaccgaaaaaaagggaggaccaatcagataatagggctcctttgtagatctcagaacatttatatatatatgacctgaactacactagaaatttcctttcatggagaggtcatgatattctcacctggttaaatgcagacttgacagagcaatgaccaatagcgcatggcctaaagcttacccttttggaagaagtgaatacttgcgttttaaagggtcagatcacagacccgtgggtgtatactttgaccctgttaaaaagagacaacaaggttaagcagttggtagtcactgcttggaactctgatccctccgacacagtggagaatataatcattacatgtagaatgataattatcaagtggaatagagaaaaacacaataacagccagtcaaagattttgtcaagtgattcaactacttgagacaaaatctccaatattaataaagaactgctactggcctatcaaactgatgaagagttttggaaacaaagaagtagacaactatggctagcccttggagataaaaaattcaggctatttccatgtagctactaaagggagaaaagctataaacaatatttcagtcctagaagatgataaaggagatactatttttgaagaggaaggaatagaaaaagaaatctcaacttactatcaatctctattcacttcccaacagggcgatagaaccaccactgttcaggaatctatttctccatgtatttccccagaggtgaatgcatcccttatccatgcacctactcaaaaagaaatgaagaatgcttgtttcgccatccatccggataaagcccctggacctgaaggtttctctgcaagcttctttcaagcaaattgggctacaatggggccacatatcataaaggaaatccaagctttcttctcctctgggatcctgccaagtaagatcaatcatacccacgtcagacttataccaaagattacaagcccaaagaaagttgttgattatagaccaatagccctatgttctgtttactacaagatcattgctaaactgatatccaaaaggctgcaactagtgctacaaaggatcatttcagaaaatcagtcagcttttgttacaaagagggctatattagataatgtactaatcacacatgaaactctccactatcttaagacctctgatgcacaagtaaggtgctatatggcagtcgaaaccgatatgaacaaagcctacgatagacttgaatgggattttattcggctgagttctagagagaatggggtttcatggccaatggattaactggataatgcaatgcatttctacagtcacctactcttttctcttaaataattcagcacaaggttccattgtacctcagcggggaatcagacagggagaccccttatccccttacctgtttatcctttgcagcgaggttctctctggattatgcagcaacgcccaagtggatggctctttaaccggtataagagtggcattgggttgtccacgcatcaatcacctactgtttgcggacgacacaatgtttttctgcagatctgatgagaagagctgctttagcttgcttaatatccttcagagatatgagaaagcttcagggcaaatgattaataaaggaaaatcggctattaccttttcagctaaaacatcagatcctgctaagtccaaagtccatcaaatcctgggaatgcaacaggtgggaggtttaggaaagtatcttggacttcctgaactttttggaaaaaagaaacgggacatgttcaacctgattatagacagaatccgacagagagctctgtgctggtcttctcgcttcttatccacggcggggaaagccaccatgttaaagtctgttctgtctgctatgccaacttacaccatgttttgcttcaaaatcccagtctctttatgcaaaagaatccaatctgctcttactagattctggtgggattcttctgagacaaacagaaaaatgtgttggatttcctggcaaaaactagttcagccaaaaggagaaggcgggttgggttttagagacataccttgctttaatgatgggttgttagcaaagatcagctggagaattctccagaaaccctcctgtcttctggccaaaatcctgttgggtaagtattgtaggtctgttccttttctagactgcaatgcccctggaaatgcttctcacggttggaaaggaattcttattggtcgagaccttctcaagcatcatctgggaaaagcaatcgggtctggctccactaccttgctctggtccgaaccatggatttcgctttctcagtcgattactcccatgggaccaccaacagagtcaagtcagaaccttacagtggatcacctcatatgccctacaaccaaaagctggattattgagagaatgctactccctgacctggaacaggaaattctttctattcgaccaagcaaatcaagactgttggataaatttatctggctactatcaaagaatggagattacagtgcaaaatctggttatcaagcagccttgatgtttaaggagaacccggttcctccttcattcctatctggattcaactggttcaaagaggtttggaatctaaaatgtctgcaaaaaataaaattctttctttggaaagctttagcaggagccttaccagtgggcgagttgttgcgctctagaggaatcagagctgagtcttcttgtccccattgccaggcggctgaaacctgcctacacctcttcttccattgccctttcgcaaaggagatctgggctgcagctccttttaaaagtacaattaaccctcttcggatttccagctttcgttctggaatcgagggctccaaagcctggactaccttacctcctacgggtttaggttcgaaaccccttgccccttggattctctggaccatctagaaatgcaggaataagaaaatctttgaccaaaagcgcataccgacctctgatgccctgtcacaagccatttctcaagctcgagaatggatcgcagctcagccacaacgccccaacctctggcacccatttcaccggaagccttccgcctccagtttctcctgagacaatgatctgcttctcagatgcggcttggcactccgacacaaagatggcaggttttggctggatcttcttaaatcaggcgtccaagctggagatccaaggattcggcaccaatttgaatgtaggatcttctctcttggcagaggctctggctctctactctgcccaacaacaagcgctcgatctcggtttcaaaaaactccactttgcttcagattcgcaactgctaatctcagctctcaattcagggtcctcctccaaggaactctacgggattctacaagatatcctttcacttgcgttgaattttgaagaaatttccttctcctttgtttatagaaaacttaattcccgtgcagatgcaattgcaaaatctgctatcttggcacttattgtaccggcctctgtaacatctaccccaccggttcacatttaatgagaagttttccttgacaaaaaaaaaaaaatctactattttttatgtttgaatattattctcatttttgtgacctcctttttcaaggaatgggtgcttcagcattttataagcaagttaggattatcaaaactcgacggaatcttattattcttgtaaggcaatgtatctcaaggtggttgacgatatgtcatcagttaactttccgccagttctagtggcttatcttcgccatggaactcattatctttaaaatgttttttttatttttttttgaatatctggaagttcagatctaaaaggctctacatctctgagaggcgagaccgacaccaggttagattcatctcttttgggagacggacccacaccaggttaaatacatcttctttggataagagatctctctcaatatacctcgaacccagcacctctacataaaaaatttaacactgggccaacagctcgttggtctccactcgctctttttgtatttgagaataactttttagctcttcctaaaaacaaagacaaccaaagtgataaatacgaatcaccaaagaaccaaggaagaaatgtgcgcaacatgaagtcactaagcttgagaaaatcgaatctgacatgaagcagaatgtgtctcaaggagttgaaacatataaaaagattcaatcagtgcttgagcagattattgggagtagaagtcacattggatttagtaacagtgatgcaacagcaaaatgtttttcttttgcgcctgagaacaagctacattattcgagggcaagagtattgataagctaggaggcacgtgtggtagctcaaaaggattcgttgaggctcgtgagtaagcaaagagaagcagagaaggcacgtgaaacagagttaaaacagagcaagaagaaacagattgtgtaaccaactgagagttgtatataaatagatagaagagaaatgaaaaagttatgcattaatgcatgtatagatgtgtgtgtaacaaactcatcgtttgcagaaaagagttaaga

SEQ ID NO: 35533 - DNA, 4115 bp, Arabidopsis thaliana landsberg
gaagtgttatatcggagccacaagacacgttcaatctcattgacctcgttattataaaaacatttcaacactagtcattgtctcacatcaataaatacattgttgaaagaagataatcacacaaaataaaagagtaggaagaaaactcttcacttaatgatttccactcaagattcaatcacagtgagcatagggattttggtgcaaagcgtgacttgaaaggttttctttcctcgtacacatctagtcgtcaatccacaagataaatttattcatagaaacacaggttttcagtttccactttaattttttgtacaaaaattcttcaatttattcatagtcaccaattctttatagttatattttatttaattttttcttttcggttattcattggagattgtatacatgcttaatgtgagaatttggtattttaataagataataatgaccagtattataagtagtattcagaattttcttactcctaattaaattaattaattataatgcttttatcatctagctactaattgcatggaattctctacgtaagtggtccttttcatagaataccgcaacaaaaggcatggtaacactccatgatagccataaaaatatattccaatatctaatgtttctcctcacacttgttaattaagcactttgtattaccctctcttaaatgaatgggtcgtctatcgatcataaacagcttccctcctaaataaggtatgtgattctaaaatacctttctccataagaaaataagaaaaacttactacaaatgttggccaatcagcatagggattcttgaatgtcaagcatgaaattgacagattttatttcctcgtatgttttagttcttcgaattcaattgaatcccacgtccaaatatgtataacgagttaactttttttgtagaaggttttcactttacctctttgtacagaattgcaagaagaaagaatggtttcatacgtcaaaactaactcatgtataatgactaagctagcagagagaattaatgttaagcgtgacttgaaaggttttctttcatcgtccacatccagtcgtctactacaaaatcaatttattcatagaaacacgttttatctttttaaaggttttcagttttcactctaattctttgtacaaattgttgaaaggaggttttaaaacttaagtcgtcaattgttttctatttatctcttttcactgaagattgtatgctttatgtgagaatttaacttttaataagattatacaaatttcgataatttaagtaataaaaactacattatattcttatatttgttgatattatataataatataaccaacccatctctccttaatttttaattacttatttagtgagtaaataaaaatgattaaattgggaaaaaaacaagaacaaaaaaaaactagtctccacttcatttactttccattttgtattgctttcagttttgtataatttgaaaatagtagagcaaatcacagcctgggcttagctataactttttttttttatcatctagctacttttctttttgtgtgcaccaattcatcttgctactttagtcatcattatttaaattttgcatcacattttcttcccggttattatttgaagatatatactaataatatactgtatatgatgattgtagctcggttgagttaaccctaattaaggtttagtgtgtagaccgggttcaagaggcctctatataagtcagagtctgtaacaaactctctttaacgaaataacatgctttatatgagaatttagaatttcaataagattatataatttcagtattacctattaagagttttcttgatattggctaaattaattaacagggttacaaatttcagcctaatatagttattaaaaaaacgaatcaggaagataaatcccttcgttatgcagcagacacgacgtaacaacaaggcccgcgagtgttttaagctctagagtagacatttgactgttcagggaatcttgaagattctcttcagtttcaataggagcttccatttctctgtcgacatttctttctgcaattgttattggttttaatttcgagcatttgttttgggtcagaataatgagtcaaagaaaacgtagatgggaaacaacttatcttatccttgacttaccatgtagtcagctttgagtatgtcgatagatctcctcgaaatgtgactcacaagctcatcttccatgtcaaaatgccttccaaacatcttctgttcttcgcgatttgaagcaacaatctgttatacaaccagagaaaagcatcaagttgaaacctcaacaacttttgtctctctctctctttctctatacaaaggttgttgaagggaatgatccccttattaccttaatcgccacctcgtcgcccttctctgcatagtcaacaggcttgtggttgttctcaatagaggcaatgcggccaatatctgtgaactctctgcccgggacgcaaatgggggttccgatctaaaacaaacaagacgaatgttaaaaggattgagaatccttggacatgtgagcaagttaccgagaatatagcagagtaagaataggataccttaagtataccgtcgtggaccttaactccaaggattattgggtctctcttattgaacacacagttaggtaaaatctgaaggacacatgggaagactgcctcaccggctgattccttctttttctcctctttgatattctcaatgtaaacctgaaactgattgaataactgatagatgatatcagcgcagaagatttttactcccatttcgtctgcaagttcacgagcctctgtagtcactttcacatcaaaagccaaaattgtagcatattcctttttcttctcgagcataactccagccttcattacatccttcttatgcacaggccctatgccaataccacttacaggtatctttacagctggggacttcaagtattcaagcaatgcttctaatgaccctaatgtagacgcttgtacataaactccttcgccacttttgtcaattctgctcaaaaccgactccatatcttccatagccgactccttaattgcctcgatgtcatcatcaggtccaaccacatgcagggcagtaccagcaattgcgtgttcaaggcccttttaaacacaacccaaaaatggttcaggatgtgatctaaacataagtatatttaataaagaatatagaagtccatttcacctgggcagtaatcttgataccctgtgcagcctttatttctttgtaatgcagataagtaccctgaaacatcagaccaggaattctcattgtgtatagaaaaagaacctaggaagtgatttgcatgaaccatatttctggggaataacagtaataaaacacatgaagtggaaatcagaaagtaccttcacccgtaactccttcattggatgcggggtcagtaatgctctaattgttgtgacaataggtccctgaaatatgaggaagaaaatatgatcacttagaaaagttctatgtctacccagtgccatcacttgttcgggtctggatcataagttttttacttgcctgtagcccacaaacgacgatttgatcaccttcatggagttcaccgtttaccaacacaacatcaatcgttgtaccatggccttcaataactttgacctcaagtacagtacactgttcaacaatttcaagaaaagatcagaaatccgcatgctgaagtattgcagaaacaagtgttacctaaagagaaaggaaagagacctgcacttcgtcaacatatgtaagtttctcaaccattgttttctgagcccattgaaccaaccacagcaagagatctgggaccccttctccactgtaatatcaagaaccaacgttacccaattacgtttaggatgaataacttgtctgttacgctgtatattacaaacagtaaatagagattcatacctaatagcactagtaggaacaatactgaaagtttctcccatgtctttattcttgtaataagctcagtgttgagtccttgctcctggactcggttataatctggaataccaatgaaacacataatttgacaacatgtacac

SEQ ID NO: 35534 - DNA, 6735 bp, Arabidopsis thaliana landsberg
aatccgtttcttgttgattgttgtaataacatctttgatctaattggttgcagctggaaacgcaacgttattggaaaacattatcctctgtgtcgtagctggtgttccattgattggatgttgcttgtttggtgttggatcattaagtgcgatctacggttacgctgttatgtttgatttcatgaggtgtttaggacattgtaacgttgagatattctctcacaagctgttcgagattcttccagtcttacgatatctcatctatactccaacgtatgtcttgttgacgtttaccttaccttacttgaaaagctttcacatgtctatttctttttttgttgccatttctggatttagttagattggggcttcacaggttttaatgaaaaggatctgactttattcattgaattaggaaaacacaaacgtgactttgtcatatttttctttaagaagcaagttttgtgtttgctgtgaaagatgtctatagaaagtaattggtggttttacatttactgcttatacaaggtaatgttttaaatgcttaaaaagttgatatattttcttgttgggtgggattatgcaggtaccatagtctgcatcatcaagaaatggggaccaacttttgtctatttatgcctctctttgatgttttgggcgatacacaaaacccaaactcatgggaactccaaaagaagattcgtttgagtgcaggtacttagcaaatattagtccgaaccaagttttagttttgcagatttaacccataaaacagaacacactatagcagattcttttttggttataaattatgagtaccaaacaatttatgccattaatgaggagatattagtagagtgtagcagaagtgggtgagacttttcaaagtcaaacctttaagagaaaatgacattactgcccttccttgacctcaatattacagctttttcacaaaactgatctcccacgtgcaggggaacggaagagagtgccggagtttgtgttcttagctcacggagttgatgtaatgtcggcgatgcatgcacccgttcgtgttcagatcttttgcttcaatgccatataccacaaggatattcttgctaccgatgtggccattcacgttctgtgttatgttgggcatgtgggcttggtcaaagacttttcttttcagcttctataccctcaggaacaatctttgtcagacttggggcgttcctagattcggattccaagtatgtctctgttttacctagttttgccctaaatctctcctcttgaaaacagaacgttttaattgaagtattttacttattttcttttgattattcttgcagtacttcttaccgtttgctacaaaaggaattaatgatcaaattgaggctgcgattcttagagctgataagattggtgttaaagttataagcttggctgctctcaacaaggtacttaccataaatctcaaaaaccctttaacttttgtgtgtgagtggttcatttagagtcaagtcactaaaaggattatttttgttttggggtttggtcagaacgaagctctaaatggtggtggaacactgtttgtcaacaagcatcctgaccttagagttcgtgtggttcatgggaacactttaactgcagcagtgattctctatgaaattccaaaagatgtgaatgaggttttcttgactggagccacttctaagctgggaagagctattgctctttacctttgtcgccgtggagtgagagttctcgtaagtgtttatactaatcttttactcaactattgtctcaaacatacggtttaccaaaagaattccaaaggctgacaatttctgatgttgggacaattgacagatgttgacattgtctatggaaaggttccaaaagattcagaaagaggctcctgttgagttccagaacaaccttgtacaagtgaccaaatacaatgctgctcaacactgcaaggtactgcaatgatttctaactggttttggtttgttgtgtaagtgtaaatgtactgaatttggagagtttaaatatatgtttgcgcagacttggatcgttggaaaatggttaacaccaagagagcagagctgggctcctgcagggacgcatttccatcagtttgtggtgccaccaatccttaagtttagaaggaactgcacttacggtgatctagcagctatgaagctccctaaagatgttgaaggactcggaacttgcgaggtataaagagtgattggttaataatcatgtcttgtttgtgtttttatactaaactgtagtgtatatgtgtggcagtacacgatggagagaggggtggtacatgcgtgccatgcaggaggagtggttcatatgcttgagggttggaagcatcatgaggttggagccattgatgttgaccgtatcgatttggtgtgggaagcagccatgaagtatggtcttagtgctgtttcttcactcacaaattgagtgaagagagagacacgtttcattgttgtcttttgactctcccaagattggtcattctttgtacaggtgaaaggagatgcaagcaggaaaaaaaagtagaatttcaccttatgtattgttttatcttttattaatgatgtattactttctttttagatttccttaatattaatatatgcacctaatttccaagaaaattcaacaaagcttttaattatccagcttgatttgcttctctgtttggcacttacacaatcagacgacaaagtgtcttcaatgttgctgtcttctatacttttaatttgattagacattattagttgagagaaatatcgaaatatcaaactaaacagtgcattaacagaaattgtaaaaagctgatcagattgttgtttgttctgctaatgaattttttaaggtaaaagtttcaatgaagatttttgaatcaaaccaattgtttatactttattacaaacacattctctacactaaaccaaccaaaatcccacaataacaaaagagacagaggaagaagagctaaacatttgctcaaagagacatctgcttgagttctaaaacaaatgcagaagaaagagattattttacctaattagaaaagactccataatgtgactaacccttgaatcgttcccaaaaagtagccaagaagatcaagagatgagacatgagaagaagaatggaaatgacgatcaagaagataccgagctgccaccatttcctccttaccgatcttatgaatccgaacttacaagatctacaatcatagcataaaatgctccaatcgttcctccatagttgacagtcgctaatccttcccaccatcatctcatcaccgtacattaggttcatagacgacggtggtccttcgtcttttcttctgtaccaaaacgtcgcgtttatcgcgtccatgttacatgtctctggtggcatacaacatccattctgtaacaacatcaaatgtaaacataaaaatgtttgtaaaatcttatacaaatgttttacaaaacgtatatttgagtgatctttttatcggtatattgttcgaatgtactaattgtacactttaaaagtcggtcttgagatcaaagaatatatatctatgatgatcaaaccttgattggtggcatttttcttctattgtaaggtttttcatttggagatccgtaaatgaggtcgttgcaagctcctttatcatagacacacgatttgatattgttccaggtcacatgatcgtccatgattttgagcttgaaccacatccttgtcgccggaaaccgccggctttgcatctcatttactccggcatacgccaaaccgatgaaaagcattaacaacaagaccaccaccatcaccacaagtgcaggcatcggaaacttccgccgcaaaaacagagctgcgttgctgacaacaaacaccgcgagaagaccgacactagctagcgtctggacacgtggcagaccgagaatatcttcgcagtcgtagctacgcatgtaaagaagccacactgcgtagccgaggagtgtaagtgagaggacgaaagtgaagatcggaaggacaccagcggctaaaatgttcacaagtgccatcaatgttcccatcggtggcttattatcactttgtgactccatttggtctgaactcttggcttctggctcagtcgttgcggttgctgtagctgtggctgtggcggttgcggctggttcctcgacgggtactacttgagcattatcagccatgtgaaagtgaaagaaagctctctctctctatggaggtgttgagttgatatggggaaatgtatatatagaaacagagagatcataaatataggtgtctgactgagtgagtgtgtggtgggttttacagagtcaaatttgtaagttagagataaataagtacacattaattaagtacaacgagatcttgtccgaatatcaattatccaaaagtgtttttttttttttgatttgtttaaagtataaattcattacagtttttaattgtttgttttgtttaatttatggataaatgaagtaaaaacccttatagagaaattataaaccacacaaactaatgcacattaagattaatggatatatgtagtgaactaaggcaaacatataaatccctaaaaataatacattaaattttctaaaatctaatctaaataataggagaacagtaattattatgttactgtttttagacaaaagaaccagtcgttcttacacattactttgagaaaataaaaaaatgtttgtctaaatttgtttttttttttttttgtgtgtgaataatttcaatcccaaatatcatatcaaacaaattaaaacaaaatataaataatttctaaattctaatcaaaaatattagagaataaatgatgtttctactttcggacaatcgatccagtcgttcttagaccatccacatcggtcatttttttaaaatgtctttaagtataatttattaataatttaagctgatgctgccacgttgctgccatgtaagatgtctcgaataggtaaaatgtgtctttccaaggacacaatagacacgggtcttacttctttattctgttttttattaacttttgttatacttaatactaaagacctatcaattttttgtgcgatgtggatgctcgtaggtcaattttatatttaatactaaagacatattgacattgattttaaaaaataaaatggtgaatcagatttcaatctaaaatcacataaacaaattaaaagacttaattttgggcccattaaagcccaataaaatgggctacttcggttcttttgtagtaaacggtcgaaccggagagatatgagtgtcatatcctgatttccccactcgacgctgatttcttctctgcttctgtaatttctccaattcattgatcagatcagccatggaagacgaggtgatttctcgttcctttatttatctcacaactacgtatacctagagtaaatcagaaaacgttaatgaatttgatcttcttgaaactgtgtgctacagtaatttcgattgcttattggtttctatgtatcatagaggaattggttgataaagttttgatttttatgatgtctgtggcggtatctttatcatctgatgaaacttgtcgagacaattctgggataaaggaataaactttaagccgtattggtggggttgattcttcggatttggatgatagtatcttcttgattccgtagaattgttgaaatgtttggaaaattgagatttctagaggcaacaagtattttggagatttctatgtttggttattggttcattgattgaggaaagaaacaaagtgatttaagtttacaaaaccttatacagtttctttcacacttgtgtttgtatttgcattagattgaattgaaaactgctcctgctgatttccggtttcctacaacaaatcaaactaggcactgcttcactcggtacatcgagtttcacaggtacctcattgctagctcatccttgagaaaatcattattttaatctcttgttgacatcaaagatgattctgcacgtgtacaactgcaaagcgacaggagtctaatgactgtgaaaggtttgccaagtattaccgtgccctctgtcctggagaatgggttggttccttttgtttggaccttagattattatatcaaagagtggtacacacaaatcacactggtatagtttgatccatctgacaatttctgccgcttatcttacatcgcaggttgacaagtggaacgagcagagggagagtggaacttttccaggtcctctttgaaccaagccttcaatcttgatgaagaggcaatcaagtccgtaataatacatggtttcaaagttaatttcttgcttgcgtgtgtatgttttggccttattatttcctctctagtgtaagtgttttattgggatgtctaagaaaggccaatcaaattataatatgaaaacattcgcttattttgtttggaacttataataccagaatgcataaactagactaatgttggatggaatttccaaatttaaatgtgaataacaagttaatggtacataaataatatttaaatgttaattggtttggcatagaaaaaagggaaaaaaaaatactcgaattaaatttacttccttctataaaaataaaagtaatgtaactttgtagattcgatgacatggccatctaaatcctaatcatcatcatcatcaaatttatttacaagtactctaaac

SEQ ID NO: 35535 - DNA, 4467 bp, Arabidopsis thaliana landsberg
tttgcaagagaacacctacaagaaggacgctgagtttaatgaacgattcaagcatagtgagtcactatctctgtatagcagtattgattccattgtttcaagctgtgatcaattcttatgtcaagatctttgctttggtttaccttttctgaaattcaaatttttggtatgttaccttctgttgaatggtttgactaaagaagagactatattgaattgggattttacagggccacccaaagctctggatgaagatgagaccgagtttcttgataaactggaaatggtgagctatcttcttttattgccaatggactgcatatcagtgtagatattactgagttagtgcttataagctctgaaggatcatgactttatggcgtgatctttgggcttatatcttctctgtcatcttaacaccctcatttgcacttgttgtttatagtcaaagagggaatatgaacgtcaattggcaaatgaagaagatgaacagcttcgtaatttccaggtaactttcttttgaatcttgaataacagttaacaaaagcttacaaaattgttagattaagattgtatcatggttctattttcaggcagcggttgcagcacgatctgcaatccttcacgaaccaaaggaagcagcactgccaccaccagcgccagtcaccaaggtgagtatctcatgattcaatttggaatgttagataaaatttgcagatcttcatctgagcatttgaatcacaaggggttatatatatcttgaactcttttacaggaacaaaaaccaatcgggaagagaaatcctgcgactcgtccatttaaagcgatcataaaagtcaagccacaacccaagaaggctaaagcaacagagaaagaagagaaagagatcccagggaatggaaaaccggccagccatatcgaccaggcttctttagattctgtaaaaggcaatgtcacaggtaaaactactgaaggtctgcaaactggtttagccttagtctcatatagtgatgaaagtgaagacgatgattaatattttgtgttactgactcaataatctatataaacattcacaatgaatcaaaatattgaatcttttggtgtcagttccattgtatagtattaactcagaaatgctaaaaaatcattagaaaggaaattttatgtagaagcactcagatgaagttgtactaaagaagcataaacaccatctttgatattaatcaaagtctcatgctttcccttctccacgatgactccattcttaaccactgcaattacatcggcgttcttgattgttgataaccgatgtgccaccaccacggtggttcggttaaccataacccggtccaatgcatcctgaaccacacgctctgactcagcgtctagagcacttgtggcttcatcaagtagcaacactttagggtctttaacgattgctctggctatggctactctctgcttttgcccacctgataattgaactcctctttcacccaccattgtatcatagccctgcaacggtaagcaaaagtttcagtttaatctgtatccatatggacctggaaattatggctggacactcttttttttggttcgattattcgggttattttaagctgttcaatgttcgaacttagaattttggttgggtgcggttaaagttacctgttgtagtccactgatgaagccatgagcgttagatagctcagctgcggatactatttcggtttcagtagcatctcctcctttaccataagcaatgtttgccctaatcgtttcattgaacaaaaccggttcctggctcacaagcccggtttgctgccttaaccatttcagctgcaatgtctttatctcaactccatcaagagtgatctgaccagaatctggatcgtaaaacctctgcaacaatgcaatcaccgttgttttcccgctaccgctttctccaaccaaagcaacgtggctggaatgtgaaacagagaacagaggtttactcaaaaggttctgccttttttgctcaaagaatgaaagttttgaaatcctaacctttccagctcgaatgcttagacagaggtcttggaagatttgaacatctggtcttgctgggtatttgaaactaacatgacgaagctcaatatctcccttaacattatccaacactgtccctgtctcatcgctcgagtctatctttgattttctatcgatgatcgcgaagattgaagcagctgcgaccttggctttgcttgaatctggagcgaaagtactcgactgagaaattccaatagctgccatggttaacgcgaaaaacacctgtaagatccagagcaagatccattctacttcattactaggcaccgagatttccaaaaatattttagtcttgccatcaatgacagtagacgaggacatcaattcacctggaaaacatcaatgaaagtagttttgccatcttcaaccaatctagctgccgcgtagaagcttgtcgcgtagacacaaaacagaatgaagaaggagaatccaaaccctaatccgctgatgaaaccttgctttactccatcttttatcggaccttcacattgcttattatacatgttcatcaccttgtcttctgcacagaatgaagcaacggttcttatgctccccaccgcgtcattcgctacttggcttgcttcctcatactttgactgcaaagatattcaaaaccagagtaagtttcttgatccacaagaaataaaccctagatagccatgaacagacctttgcgtcggcgctgaatcctttcataaacttgacttgaagaaagccattgataccaataagaggaagcatcactaagattataagcgccaattcccaactcgcagtgaacgctataatcaatccagacgcagcagatgcagcgttttgaaccgctaaagacaatgcatctcctactagagctctaatcaaagctgcatcagtcgagagccttgcccccattgtaccactcgagttctctggctcatcgaaccagctaacctccatgtgaaccgctttctcaaagcacattgactgaattcgtcgtataagttttcctccagctactgcaaacagatacatttgagacggtgagacaatcaacgaagttactcccagagctacaaatataatcgcccagaatcttgaatctttctttaattggtcagctggtttgaagaacgcttcgatgactcttgaaatcagaatcccgaaaagcgggaaaatcgcgccattgattgctgctactacagttccaagaaggagaaccgggatctcaggtttgtttagagctgcgattcgggtgagtgatacttttcggagcggttcttgactcgtcgttccagtttcctcttggcctactctttggctaccgctaccaaggtctagtccagcgaataaaccaaggacattcaaagaatgatgacgactgctatttccaaaagacgaggttccaccactgataaccgatccctctcttgatatgttcaaattcgaattccggaaagatgatcccgaagccatgtctgatggttttgcatcatgacccttgtttatctcttgacaccgaatgagctgcgaataagctcccacggaatctttcaacaactcagaatgcgaacctttttccaccatttttccgctgtgaattactgcaatcatatccgcatttcttaccgtgcttaatctatgcgcaaccaccaccgtagtccggttaaccatgactctatctaaagcctcttgaaccactctttcggattctgtatcgagcgcgcttgttgcttcatccagaagcaaaacccgcggatctttaagaatagctcttgcaatagctatcctctgtttctgtcctcccgagagctgtgtcccgtgctctcctacctttgtatctaacccctgaggtaagttatttatgaactttgctgcatttgctagctctgttgctactttaatctcttgaagcgttgcattttctttcccgtaggcgatattctccatgatgctcgacgaaaacagaacaggttcttggcagaccaatccgattttgcttctgatccatttcaactgaaactccttaagattaattccatcaatgagtacttcaccggctttcggatcataaaacctctcaatcaaatttatcaccgtagattttccacttccactttctcctaccagtgctgctgttgcaccgctcgggataaacagagagaatccatcaaatatctcctcgtctggcctcgcggggtaactgaaatgcacatctttcagttcaatgtctcctcggatatctccaagaacctttccatttacgtcataagcatcaatcaaaggctttcttttgatcgtctcaaacatcttatatgctgcagcttgacctgctgcaaatgcggttacacatggaaatgtatgcccaagcgacctaaagaaaaacaaaacagaacacagctc

SEQ ID NO: 35536 - DNA, 2883 bp, Arabidopsis thaliana landsberg
  unsure (1)..(2883): unsure at all n locations
ttgcacatatccaagtccatagggattttagcttctaaaaatctacgcctaatctctaatacagcatctttattctgcacctttatataactatccaataaagtactataagtaatgacatctcccacaactccttttgaaacttcatctgcctccgacactctccctgccatgcaaagtccattaatcacagtgttatacgtaagaatgcttggttgtatccctctctgctccatatcccccaacatagagaaagctcgattcaaattccctttcctacaaattccatctatcaaagtcacatacagaaactcatccacttcgattccaacacttagaattctattgaacaacacaaatgcctcttcaagtttacccattttgcagagtcccctaataatagctgtataagtaatcaaattcggctctactccttcctttatcatcttccctaataaccccaacgcttcttcaacattcccctccttcgacaacccatctattagtatcgaatagctaacaacgtctcgattcattcccttctccaccatttccctgtcctgcataagtgcatccaccaatgcacctcccttaaagtacccatgaatccaattactatagaacacacagtcaaactcaaatccttcatcttccaatctcctaactaaatccctaacttcatcaaccttacctaactgacaaagagcactcacaagcgtagtataagttacaaggttcggcactagaacacctgaatcgacagcactttcgaaaaaccctaacgcaagttccggtttaccaatcttacaaaacccagaaatcacagcactacatacgaaattatcaaatgggtaatttacattcttgttcgtcatcatctctaaaacctcaatagcattatccatctctcctttctcaacgaaccgataaatcagtgaacagaacgttaaggaagaaggaaacgcaccgtgattccgtaaacaatctcggagaatcagaagacccttacttggatcatcacgtgtgatgctaaatccatgaattagagaatctaacatatgggtcctgggaaaaatcgaagcttttgaaatatggatgttgataaacttctctgcgtcttcgtatcgattcaaattgagaaatgcccatgaaacgattgagtaaatccggtgattgatgttgatttgcttcgaatctagctgagagtagaattgaagaatgcaattaaacttctgaagacggtagagatatcgaagaaatctgtcgatagagtttaacgttggagagaagccacttttgagaagagattggagagaaaagagtcctgaagaagttcgaggatagagcttcatggagatttcgcaaaaaaggcgtctcctttctcttgctaaggaaactaaacgaatatagaagagtcggtttacaacagtgaaccggtttgattctgattgaaccggtttatttggtttaaccattacattacttatgagaagtaaaaggtcatgtttacttacacaagtgttacactaaagatttcacaggaacaagtaaaaggtcatgtttcttatgagaagtgagtccagaagcttcatccatgtaaatannnnnnnnnnnnnnnnnnnctggtaacttccaatcaaaatgatacaaaagattagccaaaccaaactcgaccattgttgtccccatataaactgcaggacacattctccggccgcctccaaacggtaacagctcaaaatgctgttcttttgcatcaatattattatccataaacctctccgggagaaacacttcagggtctttccaggtatcgggatcacgaccaatagcccatacattcacgtgaagccgtgtcttaactggaatcgtgtagccgttgatctcaaattcagacattgcttcccttgggattagaagaggtgttgtaggatgtaacctccatgtttctttgataaccattttgaggtactcaagcttatcagtgtcatcaaagctgattctttctttgttcttgatttgacttctgatttcggattgaacttttttcatcactcgtggattctttgcgagttctgccattgcccatgtcatggttattgcagaagtatccattcctgctagaagaacatcctgtaacaacatataaacatcaattgtttaaatttttcttacagatttgattgtgaatatatgattagttaccatcaatatcgctttgatatggtttctagtgagcttgtcatttccaagaacagcttcttctttctccaacctcaacagcaagtccacaaagtcttcactaccttcttcctttttctgtttatgcagatcaaacatttgttcatagaaagcatcgagatctctcatgcttctctctcgccgtccttgcaaacccgtcaacaagtcgatgatccttccgacatacggaatgaaatctgaggcagaaaagcttcccaacatctcgagcgcctcacggactatgttattgaatcgttcactgttgagcacagttccctcaaaattcacactaaacgctgtcctgcagaccacactaacagttaaagccagcaatgtcttgttcaagttgatcggagtcttctgagcagctgattcggagattgaatcgatcagtttcttgacctcctcgtccttcatcggttgtatagagtgaacttgtttactactgaaaagttcttgaacagcgagcttccttacttctttccaataatcatcataaggagaaaaagcaatgtctagatagttgtaagagagctctcttgcccctaaagaatgattcangatacaaaaagattcangatttcaagattcaagattcaagggttttgacagagaaaccaaaagttaaattgtagtacctgc

SEQ ID NO: 35537 - DNA, 234 bp, Arabidopsis thaliana landsberg
gacctttgcggtcattgattcttaggcgcctgactacaccctacaagtggacgaaccttgcggaggaacccttgggttttcggggcattggattctcaccaatgtttgcgttactcaagccgacattctcgcttccgcatcgtccaccggcgctcgcgcggttgctgcctcataaggcggaacagtgccctaccgatgcattttgacatgccacagctggggcagagcgctcat

SEQ ID NO: 35538 - DNA, 2214 bp, Arabidopsis thaliana landsberg
tatacattgaaataacgaatggtgatcagcggacgacgtatcagaattcggacaactccaaacatcaagactccaatcaccagattctaactttaaaagaccattatcctccaccttctccactgatcaaaatttcaatcgaattcgattagatctgttgaaattgtgtgattaattgatgaaatggtaggatcagatttgttgacatccgaaaaacccagaaaagcttttgaaattagaatcgaattgaaggaagctcaatgtaaaaaaaatgaacttaagctccacaatatttttttccgaataagatttttttttacagctataggttatatcacactctttttttattggttagtcaaagtgtctttaaacataagttttttgtttttttgttgtctttaattaagtatagatgatttagaaaatttaaaagaataaaaggtttttacatttataatttacatattctttttattttattttgtgactttgttttgaacatatagagttcttaattgaaatttataatacacaggaaaaaataaattcagtttcatattataattattcacaataaaaatattttatttttattattaataaaatagcaaaatataataaacaaaatatctctaacacttgacaaacatagattataatatataatactatactaaattcatatataaaattccttccaataaataaatgcatatcaaaacaaatatactcaaatactataattaataaatctaacatttcaaccatttgctacaacattattatatataaaaaataatgagtgtcaacacatatatattataataatttagtattataaatataacaaaaccataagatcaaaaaaaaaaaacaaatacgataatacaattaaaatgtcatagtacaatagtttccaaaaatccccgcaacatgtatttatatatcaacatttaacacccgggcgaagcacgggttatcaatctagttttattatataaagtatgaacgtatggtttttaaagttaaaaatttataggattgtatctcatatttttatatgtgtaaaagaaaaaaccttttttattaattttaaaaatataaaaagataattattaatacattgaacgatacaaactctaaattatcattttctttagatactcatatagtttaatttgaatttgattttgtaagtgtagcatactcaatgagcaatatgagctcattttctggcagtctttttcgattcagattaggcgatgacgaagagatggtggttcctgcatcaacagagagagtgtccgctaggtacatggtaagcttgctggattagattcttgtgattttcctctcttattattctgctatttggtcatttgatcttatatggtcttaaaaacttcagctgttttgaatttgttttgttattcaagtgtcaaacaaatttagaacaaaaaaaaataatttacataattttaaagtaagatatcttatattcaagtgtaacaacagaagaatttgacatctcgctttttcttgtatggctatggtttaaattgaagatttaattgctgatacgataatttttcatgaaacaagttttatgattcgattgaaagatttgattactgataggttagaaacttagaattttacgatgaataaggtctaaattgaatatttaattgctgatacgatagctttttccttaaacaagttttatgattcgattgaaagatttgattgctgataggttagaaacttagaattttactatggaattatgttggttataatatggaatagtagttataatattctcttagattgtgtatagaatttcatatttcttaattaaaaaagatatggaatatatataatatattcttttggtttaatatggtaacttcattattgtaaatgcggctggagtgaatctatacaattgcaagattccaaaagacagtaagccaagtccaatttcaccatatatatgcatgatgcttgcaacaacaaactttgttggatttgttactaaagaagctagaggaacgatgattactgacatgtccaatctgttatattttcagatattattcttttatataaaatataaaaacccataatcattcccgtattcaaatttaaagttaacattgtaaaaggaattaatctttgacactttaaaatacagaaaggatttataaa

SEQ ID NO: 35539 - DNA, 1923 bp, Arabidopsis thaliana landsberg
aggggcagtaaccaaacctgaaacacataaacaaaaacataaaaaatagcaagaaagatagaaagttatatatatggatagacataggacttcctcccaagtgagcttgttttaagtcactaagcttgactcttacagagcttagtcagaaaagaggttgaagagaggaacagagaaattctcatcttcagtggttgaattttcagtgcttgaatcatactctgcatcctctcttgagatatggtaggatgagtactcatttgatttttcttcaaaataagcttctttctaatcagcagagtagtcttcttcttctgaaccagactcctttgaccaatcctcaaattcgaaattggggtagtccttgaccatttctttaagttccagaatggtgctatttaactcttccatcttatgagttaactttccaattatattctcttgagctttgtatccaacttagagtttcagaagttcttcagcaacagaatcatgaatcaagtattcttcttcagcagaggggttggtgggctgtttaggcactcctggagaataaatcggaataggagtttcctcctcactcaacaacttgctctctaggcttctttcctctaagtgaactactttctgatcttctggtgcaaaccattctgttgtgaaattttcgtcctccttgatagctagtgcagtttccatcttctctggatcaataccatttgaaaaatttttaactcttttttcaaacatccaaagttgatctttcagcttcatcacccttgaagataatccctatatgactctactttgccatttaaatttttttctcatctcataccagtcatcttctgtaggatcttcagtctgagctaacccttctattgctcttttcttgtggtcaaaagttctcttcaacttgctgagttgagaagtacagttaacttttggtggggttccagcttctgtttcttcatcaacatccatgtcctgaatcccaaaactctaacctcttgtagttggtttctctgaagcttctctggtgtcatacttcatcttgatgcctttttcaaggttcagattaattttccattcttgacatctatgacagctccatctgaagctaagaatggtctccctaggatcaggggatccttgccttcttcatctacgtccaataccacaaaacctgtaggtatctcaacatgtccaatcttgacaggcagattttctattagaccatgataatgtgcaatagaaccatcagctaagagtaaagctaagttgcagaacttgtattctatgatccctagccttttagctgtaaagagaggcataaggctaacacatgctcccaaatcacaacggcacctattgaatgtcaatggtcctagagagcatggcagagtgaatgaaccacgatcatcaagttcttcttggatgactatcttcttgtatgtatcttgggtggaagcactgatgataatatgttgattgtgatccttcttgagtttttcaattttgaactttttcaagaatagtgagtattcagcaaaggtgtgtgctttatagtccagatgaattgctgggtggtaggtgtaacaatttgagttgaatcccccccttcttgaatcatactgtcctcagtattgggagtctgatgacttggtggagactcatcttcttggtggatggtgatagcatttgcagtagcatagtccttaggattctggactgctttccctggaagttgctgaggatgcttcgaagcagaggttgatgcaaattgactctccacatacttgattttggaattcaaagattcgaatttgacatttagatcgttgtaagaacaaccgatcttcttgtgtaattcagctatcttctaatcaaaaaaaatggctctagtagcttgtcaccggatgatct

SEQ ID NO: 35540 - DNA, 2952 bp, Arabidopsis thaliana landsberg
gcttaacgatttttaaccatctacataatatcggtgcttgatgtgttctcggcgctaaaggcatgagagtattgatcattcccataaggtggaggatatggatacgggtacggatacggatgcggattcggatattggtgcgggtttggcggcatatagttaactgccggtggtggccttgcgtacatcattggttggaaccgttcgttccccatagctcgttgctggttcataaccgccgctaaatattgctgttgttgttgctgttgctgcatttgcataggatctatcccggccccttggaaataaccctgtggtgcaccgcctggaccggtcgctggtaacccctgaaccgccggcatattccccatcggaccacccatacccatttgaccacccattggcatgctcatattctgtggtcctccgcctcccatgggtcggaaacctcccgaaactcctccagccatgggcccacctccgccgttacccttttttccggcgttgggaccaccgcctccaccgccgtttttgccatcttgtggatgtccaccaccgccgttcttgcctccaccttggttttgattcccaggaccacccttagcaccgccgccagcaccctttccaccaccggcaccgccgccgccagcagcgggagcgcctttaccgccgtttttagcaggaccaccggcaagattggcattcttctgagcgttcatcatcatctgttgagcattaggcatcatcgtcatgttgggcttcatcttattagacggaagagggagatcgtcaaactcatcatcaaactcgtcgtcatcatcatcagtaaattcatcatcgaattcgtcactgaaatcatcatcatcatcatcttcagggacatcaaacttgactcctttctggttttggttcttgttgacaggaacagagccttttaactgaggaggaagcttcagatcttgaaaccctttcatcttctgaagctgttgaagctgctgcaaatgttgtggattcagttgctggcccatctttggcgcattactgttacctccacctccaccgccgccacctcctccgccgtttttctggcctttcttgttgttattattgtttccgccaccaccgcctccggcttttccatggtcaatctgcattcccttaaactgattggccatttgggactgattgggattgttgttaccctttggagctcccagatttcagcatgtttaccagatttggcgagcttcttgatgagaactgaaggatctacgctcccagagacagtcactttcccttgctctgagtcaatcttggtcgtgaaaacacctgagtttttggtttggtttcagacaaaacacaaaaatgagtttcaagacttttagtcaacaaactgaaaaaaactttgattcgagactttaaaaagtcaaaacagatttttgtctcctctaccttcgattttctgcaagattttcttgactttctgcttacagccatcacagtgtatgttcactttaagaacacaagtctacaaataaaatattctcagattaagtcaacagaaaactttcattttaaaaagaaaacagagaaggaatggtgaagaaacctggatcttcatgaactcttctttactcatttttcctcaactcaaaatctctttctctcgctttagaaccagatctgagacagctcctctgttacttgcaacttcaatctggacaacataataacccacaaattgttatttttatcacattcaaagacgcaaagaagagaacacaccattacatagacatatatgctgtaactgaggaagatacctttttttaagtttagaacaacaaagaaacagaggaggaagaaggagaatgagagagggaaagcacttgaaagaaggcaaagaagaagaaagaaagatttcgactttgcagtattaagttggtgaacattaacttctccacttcatctttttcagagtcagaaagaaagagagagagagaagtaaaatcgctgcttcaatttattagccagaaaggagtgagcaatagtatcttatttccttgcctagactttagacaatattttttgtaataaattcaacaaaaagattagcattacaagaacaagaaaaaaaaaagagtggtgtggggctcgtttttatgaatctttttaatgatgaaggcctctcgtatagtatttcataatttatatagtgaacataatcaccgttttcggccagatctctcttaagtttcccctgttttaataataatactatttgttttccaattgcatttaattaatacaattttttcacgatttcattgttcatcgaggcatttactatcatcgcttgttgttgttaaagcctaatcaagcatgaaaccgaaattcttaaaagtgagatataatcaagttaattactatattttaaatatgataacggttttctttggggaaaaataatgtaatggttttcttggtgaagcgtttttgacaacatggaaaaagggttctcttggtgaaggacaatttattgtttatttaaatgaagcatggctaattttataattaatcacattcttaactagatgatctaagcaaataatagaaattgaaaattatgacttctaacacagatttgatatgacggttgtccaattattgatagagaaaatgaatattaagaagcataatctacacatttgggaaagttccgaacaaaaagatctgtataattgtttttaaaaaaagcaattgataggttaaaaaaatgtggcatggtgagatgaataattgatttttgtcgttgaggttttgcctaattcgatagctgttggtcacatgagtgtctctgcatatgacatggctctccttcttcttcttcttcttcttcttcttcttcttcttcttcttcacaaaatgacattaattcctcaagcttgtgtc

SEQ ID NO: 35541 - DNA, 2503 bp, Arabidopsis thaliana landsberg
cagaagcttgacttttgattacctcgtcaacttcaacattgaaagctacaatgccaccaaaggcactaactgggtcagcttttacagctagccggtaagcctcaagaatatcatcacgagaggccacaccacaaggatttgtatgcttcacgactacacatgttgggttttcaaattccgacacacagttccatgcagcgtcagcatcaagatagttgttgtatgacatttcctgctcacagaaataaatagaaaagttaaacataataaggcttgaaagcgaggataaggatataaatggcagtttaaaactatttgctctgtaaattacaccggacagaaaaagtagcatactttcttacctttccatgatgctgaatcgctgttgcgataccaccggcattcacttcagcaaggctcttatcaacataaaatgcagctttttgatgaggattttcaccgtaacgaagagaactcttaagtacaagcggaactgtaaagctgggagggaacttctcttctgagaaagacatgaatatcaatcaatgtaagttgccaattgccataactagtgtaaggaggatcacataaaaacaatcacatacttccttcagtctgcttccatagccattctgaaaccgcagaatcatatgcagcaacatgctgaaaggccttccacgcaagttttctgcggaattgttggtcgctctgtcctcctttgagatactccaaaacagcttgataatctcctgaatcgacaacaatgagaacgtctttgtggttctgttgaaaaaacaatagaaaatatacatttataatcttgaaaataatcttgcaagtgtaaagaaaaagtctcatatgcacagatatatgtattaccttagcagctgctctaatcatagcagggccaccaatgtcaatgttctcaatcccatcctcaaaactgatcccacctggagcagtaactttttcatagaacgggtacaaattgacaaccacaacatcaaatgtacctgtcatagaattaaaaaaaaaaaaggtacagttaaacataaggagacactataaatgacttagtctcaagcttaatgtagaggatcaatcaaaggtcaaaactcaccaatcccatgctcattaagagcttccatatgatgctccacatcccttctagcgaggataccaccatgtatgtttggatgcaaagttttcacacggccatcaagctttaagagaagaaaaaaaaaaaggagagctaagtttaatatactaaactcaacaaaacaatggtataaaccaaaacttaaatataaatatcagcgagatcacaagaccaaaacttttagcaagagcagcgagcataagagaaaagaaaaacatgccatttctggaaaatgagtaagcttctccactttggtcacagagactccagcattctccaaagtagaggcagttcctccagtagaaacaatagtgtatctacacaaatatcaatgaaaaaaggaatcatttacatataagatagaaacaaaaccaaaatttgtatagttctaagtaagagagagttgtgaagaacacataccccaattcttgcagaccgttgccaagagaagccaagtccctcttgtcagatagagatatcaaagcttgcttctcccctgattcaattaaagcccgattatttgaaaatcactaaaacgtaactgaaaatcgatcactgaatttgaaattgcagcaaaaagaaaaattgtaaaccagaggagcctgaggattgcggctgattcctctgagcagtctgagactctgccatggctcgaacagcaacgaaatttggacacagcgacgtacgatagacctgctcattgaaaattccactaatattaaaaagtttagcagaacatgaaacaaagacacaaaggaacacgtccacacacagaggagaactcacaggctgagtaaaacgaaaaggcgcgacggattttttgcgaaacaagccgcagagaatatcgccggagcgagcactcacggaggtggcggtggcggctgagctgagcatagtagtctgattttgaaacagtgtgtagtgttgagctctgttaggttttgtgattttgcggctaattttggaaataaattagaaaaaaaaataaaaaaaaaggaaaatatgtaatttattattggcgtcaggtggaattatgtatttattattatggccttgacagttagattacacctggaatatttggaaaattggaataaagcttctctttttatttcccccaaaaataaaactaaactattttaactccaaattttaaaaaatttagtagaaaccaaaattctcaagtgtaaactaattagtaagaaataaaactttattggatcagagtggaatattacaaaagactactatggagatgacaaaagctctatgtttatatgaatttaattggtttcagatttaaatatgaagtgatacattattttatggaggctaaagtttttt

SEQ ID NO: 35542 - DNA, 10134 bp, Arabidopsis thaliana landsberg
agttaaagatcaggttcatcccagtagtaatggtgtatgtctctgaaaaacttctttcttttataacaggtcaggttgggaggatctactctgcatgccaagtaattgacgtgatcagcataccatggagatcctccttcaacagcattcagttggtggaactctttcccactgtagctccttccgaagaattctacaaccatgagctgctcttctggcattgaatcgtctatcggaatgggttcttcaattctcatccttgacagatggtcagctgcaccatttttaatgcctttcttatctactatctccatgtcaaactcttgcaatagaagtatccatctcaacagtcttggtttagattcttcttggcatacagatgcctcaaagctacatggtctctatagacagtgacctttgatccaaccatattgcttctgaacttctcaaatgcgaatacaacagctataagctccttctcagttgttgcatatcttccttgagcttcatccaacgtttggctggcgtaatatatgacatgaaacttcttgtctattttcaggcctaaaacagctcttactgcgtaatctgatgcatcacacataatctcaaatggatagtcccaattaggcgctcgaacgacaggagcatataccaaagcatccttgatggtgtgaaaggatttgaggcagtcctcatcgaattcaaattaggtctccttgcacaatagtctggttaacggcctagctatcttggagaagtctttaataaattgtctgtagaacccagcatgaccaaggaaacttctgatgtcgttcacagtttttggtggctgcaactgcatcatcacttcaatttttcctttgtcaacctctatacccttttattatatcttgtgacccaacactgtgccttccttcaccatgaaatgacacttttcccaattgagaacaagattcgtctcctcacacctagtcaatatcctgccaagattcaacaaacatgaggagaaagaggagccatagaccgagaaatcgtccatgaaaacctccaccatctcctcgattcaatctgcaaatatagaggtcatgcacctctaaaatgttgaaagagcattgcataaaccaaatggcattctcttataagcaaaagttccataaggacatgcgaaagtggtttactcctgatcattagggtgaattggtatttgaaagaaaccactatatctatcaagaaagcaataacaggttgattagctaagcgttcaagcatttgatcaatgaatggtaaaggaaaatgatctttcctagatgcaacatttaactttctataatcgatacacattctatcacaagttataattcaattagggatcaattcatccttttcatttttaacaacagtcataccgccccttttagggacgcaatgaactggagaaacccaagtactatcagatatagggtagatgacaccagcatcaagcagtttcaaaatttctttttccactacttctttcaagttgggatttaaactcttttgtggttcaacgctagagtaggattcgttttcaaggtggatcctatgattgcataaactaggtgaaattcccttaatgtcagataatgaataaccaattgctctcctatactttttaagttcaggtaatagcagtttcacttcatcatcatttcactcagcattaatgatcatagggtaagtagagtttggaccaaggaatgcgtaccttagacctttagaaagtggtttgagatcaaccttcggtgcttttagttcagaccagtcgtgctgaagttggaatgatcggctccccagattcgttggcagacaaggtcgagtggttggtcgagtatgtcctcgagagtgcaggttgaactcgtgttgacccttctttgctcattaccattacctccgttgctggtccactcaattccttaaagggttctgattcttccatcgctttatgggagtctaacagcttctggtatcccaatgtttccaaatgcagaaacccatcttcaccacttttggttaaagcactgttaagatgatcttcttctgccagctcttctagtaattcatcagctaactgatccatttcttcgatccaaaagagttgctcttctatggacggctttatcatcacgtttttgacatcaaaggtcatcctaaagtctttgccaaggtttagatcaatcttccctttcctgacatcaatcatagctcctatagttgctaagaaaggtctccctagaatcaaagggtccttgggctcttcatccatctccaggactacaaagtcaattggtatctccacagcaccgatcctgattgggaggtttttgagcaaaccatgagggatccttactgatctatcagctaggatgagggatatattgtaggacttgtattgagtgaaccccaatcttttggcgacagagagcggcatgagactgactaatgctcctaaatcgcataggcatctattgaaagccaatggacctaaagagcatggtagagtgaatgaaccaggatcactaagcttcttaggaatgatcttcttctgtatgatagcactgcattcatgactcaataccaccatcccttgcacttcttcaattctctccacgatcaagtctttcagaaacttgtgagagtctgggattagcgctagagcgtcaacaagaggtattcgcaactcaacctccttaatattcttggcaaacatagctctatatttttctgccaacgctttcttgtgacggccaggaaatgaaagctgcggtttgtagggaggagggataaagactttttctttgtttttgacagcaactggttttggagtagttggtgatgctgctgggaagataggtcgagttgttggtcgagtaacgttgtcgagtggcagatcgagtggttgctcgagtgataggtcgagtggttgcttgagtgactggtcgagtgattgctcgagtggtttgtcagcttgatcttactcgagacttaaatcctccccatcttgatcttcactgtcctcagtgaccgtctttggttcctccctagttggaagtgcttttccactacgcagtgtgatagcatgagcatattcttttggattctgaactgctttgcctggtagttggcttgtctgttttggagctgaagaagatgcagaatgtccctctaagtatcggactttggtattcagtgtttccatcttgacattgagatcattgtagctacagtctagcttatggcgcaattcagataatttcttagcaatttccatcgagctagatgcttgtccctgtagcagctgttggaccatctgtttcatttcagcatcaggagtagcaggaccttggttttgctgaggtgcaaacccaggtggtggtggttgctggtagttcccctgaaattgttgcttagcaacgaaaccttggttctagggaacaaaaggtttgttctgaccttgttgttgctgtggaggatacacctgatcctgaggattagcaacgttggtgctgcggtaggagaggttggggttgttggttttgaagttgttgtatcctttgtagtcaccctggttgttgttgatgtagctgacttcttccaactggttaccctccccatcttggacttggtactgctcgtcatcaacaaggaagtgctcatgcatctaatggctaagaagaatcctgtccagcttgtctttcaacgctttgatctccttcctgtgtttgtcatcttagtcagctgtgcttctgacagtcctatcgcagtcctcgttgtagttaccaattgagcgagattctcaaccaattcccagccttcttcaacatctttgttctggaaattcccattgctggcggtatttagaagcattcttatgcgctggaaaacgcctctataaagagtgcggagcagagaggctttagtgaagccatgatgagggcattggttggtagaaccctcgaaacgctcccatgcttcacaaaagctttcaccaaccttctataaaaaaccggagatctcatttctgagtcttgcagttcttgcgttggagaagaactttgatagaaaagccttcttgcaatcatcacaggtggtgattgagtcatggggcagattcttctcccagatgtgtgctttgtcgcctaaggagaatgggaacaacggagcttgaatccgtcttcactgacaccattgatcttcgttaggttgcagagcctatcgaatttatcaaggtggtcgagtggatcctccattggcagaccatggaattcgttcccctggatcatcgacatgagaccactcttaatctcgaagttgttgttctggattgcaggaggtgcaattcctttcctctggcggtgatcacgtggtgcatctccagcaccaatgttggcagggctattttgttgattctgttctgcagccattttgagtggttgctgaggtacagggttgacagtggttctcctttttctgagttcgcgagctatgcggttcatgttatcatcgaaaaggaggttctgattgcatgttgatcgagttcgcatacaacagaggtgtacctggatcaagaagacaacatgaaaaacacacagttagtaaccgaaaagaaaattgaaaaagaacaagatctaagcaagtctgaaatctcaaatgtaacaaacaagcacccaattggcaacggcgccaaattgataataggtttttttagtcaattatcctaaaacaccaatcatatcgttgtagtactgaaggttgtcaatcctaatgggtgtgatgctaacaatcaagatgtgatcagaagtcactaagtcaagccaagcaataacaggttttggtgtgttctagcagttctaagtaaacatgcagaaaacaaaaattcaagcagaactgtaaaaacactcgaccaacacagctcgttgcagagcactgggtgtggtcgagtgacaggtcgagtaacaaacagaaaatgtaacagggatactcggctgcacagtctattgccagacaactgggtggtcgagtaccaggtcgagtaacagtaaagaattgcaggaactaagcaacagatgacaagatgcagttaacaatagtagagtaaacaataaaatcaatcagataaagaatttccgaggatggggtaattgagtagtttcgtttcctcagtttacaggtgattgacatgctcaataaattatctctagacaacaagttccttaaccaaatctaagtgccaccgcaacaaagaccctcaagttaacccagtcccagactcaatcaccattgacgagagctaacctaataggcattacgaatcaacaagttaaagccaaaacgctccctgcaaccaataccttggtacagggccacgaatctctggaataagtggttcagacatttcatcgaataccttttgggcgcagaaatgtctgggctcaaattccagttgatcagaaagcaataggcattaagaacaactaatccagaagggatctatcaatcaatactcaaccacctagcatactgagaattctatactactctaacccatcctcagaaacctattcactactcagacatcattggagagaacaacaacgttgaacaggatgaaaacatgataacaacagtgtaacagcaagatgataacaggatgaacaacagtaacggaaatcaagaacaaatgctgaatcttgaatactgaatagataaagagaaatccgaattacaaaaggtctagaatagagtgtgtacggaaaaactagataaaaactttttgcgaaattgtgaagtacatgctacttatagcaaaatattctgaaaccctaatacttaaaacgacgcagtattgagacggattaagaattgtactcgacccaggtggtcgagtgggaggtcgagtggatagctggagtcttcttttctttcttgtgctcgagtgtctggttgagtgtggaatgaagaaaactctgaagcttgccatcgcgtatgtagtcgagtggtggtgatggtgatactcgacttccaggtagagtgatgaggttgagtagtggtctggcaatgaaggtgaagacactcggccttgggtcgagtgatgtgatcgagtgatggtcaggttatgggatgaagacactcgaccttggggtcgagtggtgaggtgaagtggtgatgtcctttgctcgaccagggggtcgagtggcctcttgagatcttgaagctcctactcgaccacggggtcgagtggtttgacatgatcaggtccgcttctgccagttagctcgtcaatagctccaaatcacctaaatcaacacaaatattcaacatgcatgcaaatctatcctaaacatgtaaagtgatgacaaatgatgagaaatggtataaaacagtgatgatatgatgctaaagtgatgacaaatggatgcttaaaacatgcaaaatacaaacttatcagctacactatcaaagctttgagaagcaagaagaagcttggttagtgttttggatttgaatatgacttgatgtcatgtgtatgattgagtataagaacttaaatctcaaccggatcttaaaagcctaagtagtgtttccttgttagaagatacaaagccaaagactcatacggattttgataataggtttttaagatcaattattcttaaagcactatcatgtcgttgtagtactgaaagttgtctatccaaatgggtgtgatgcaaacagatgagatgtgatcagaagtcactaagtcaagccaagcaataatggttttggggtttctaacagtcctaaacgaacatggaaaaaacagaaattttaacagaattactaaaatcactcgaccacaactggctgatgccagaaagcagaacgtggtcgagtaactggtcgattaacagacaggaaatgaaacagttatactcgactacacagtttgttgccagacactgggtgtggtcgagtatgctggttgagtaacacacaggaaatgagacaacggtactcgagtgcacagtctgttgccagacactaggtgtggtcgagtaagttggtcgagtgattacaaaaaataagaaacaggcaatgagaacgataaagcgataacgataaaacagagaaattagatagagaagaaattcctaaggatgggataatcgaatggagttgtatcctagcctttccggatggttaacaagagcaatcaagctatccctagacaacaggttcaacaacagatcaattcactcacgtgatagaaatcctcaagcaaagctagcctagactaattcccattaacggaatctaactatgcaggcaatcagaatagactaataaagtcaataaacactctaaaagtccaatcccttgggatagagatgaatatctcagaaactaggggatcaaacattccatcgaacaccttctgggtgcgagaatgcttggaattgaattccagtttatcagaaagaaataagcagtaaacacaactattcctaaagggattcaatcaattctaaacttaaccattctacagaatacggattccacaactactctatcccatccttaagaactctatgtcactactcagacaacatgctcacagacataaacgcagataaatgataatattgcataagtaaagaaataaagagtagatgatagtgaaattaaatgcggactctgaataacttggaaaatctcaaattacaggttgtagaagaaaaagcggcgcaaccagagtaaaacagaaaataaaactgaagtaaagactcaatgtcgcctagatgtctcatgacagaaccctaaaacatctatttatacaaaacgaaataaaatgataatagacgggccaataacctaatcgcccggcccatagagtgataatgggccgagatgggcttcgtgatccgatggagctccagaccgcttccaaacacttcttcttctcctcttctcttccttgtgctcagcttgtgtggttgagtgcggatttgagtagactccgaagatgtgatcgagtgcttggtcgagtgatggtattggtggtgagtgatgatactcaaccagggggttgagtagcgtggtagagtgaatggtcgagtgaggtcaggtggtgtggcgaagtgatactcgaccagggggtcgagtggcgtcatcgagtggcctgagctgaggttactcgacctgggggtcgagtagatgggaagaatgtgaaacgtcccatcccgggctgtccgcccggtgaggttgttcccatccgaggataactcaagtgtccttaggtcctatccgaattcgctctaagtgtaattctcaccggaaattctgagattcataagtaaaaaagagacaaattcacacaaagaaacaagccaactttattcatataaggtttcgaacgacatgagtgtttgcactataggctattacaatcattcgatccaatactttaacttaaacaccacccacttgcccggacaaccatccttgccgctaagccatatccttcccacgaacttggtcacattctgaaattaacgaatcatgagtatgatgtggtttacacttagcgatcatgcatatgctatgatgctccccatgtttcaccccccacacataactcaatcgttaggacagaataatagaaggatagatcgcatcaaccgaattcccgagccctttaagaccgttcggcctaaggtcggtacggttatgcctcaccttggtcgttcgaccattcgcttcctcggcctccgtcggcctagtggtgccgggagtgcccatgatctcaatctcggccatcttgttccgttcgctcgcacccttagaaagatcacgtttcttttctgagttttggtgagagttttggtatatggacttctgttacttccttggctgaagggcgagttatttataaggaaggggcgagtaaccgcccttgcgaacgggcgcctctaggtccttccagatccttcagggcgcttccttcctaaccacacacgtggcgcgtccttatggcccggtaaccgccgggtaaccgctcaaggtaactgtcggggaaaccgtccgacaaccgtccgagtaaccgcctcatccccttccagctaagtcgagctagtggagctagctagcagtctcccgagctggcccagcttccctttgagctgtccgagctaccccgagcttcccttgagctgctccagcttcccacttagctttccgagctatttattcccacttctttccctcgggctcttggccattcatgttcacacgatttggccgcccttctctgggccttgggacgagttttcttgcccgactctctataagtctcgtcccagcccttcccctcgattcaagttcggatcggggatgttacaagtctcccccacctgagaaggattcgtccccgaatccggcccaagtcgttcctcgacggttagacttttgtaccacttaggatagtcggcgaccattcgattctccgtttcccaagtgaactcatctcggccgataattgaccataggactttaaccattcggatgggttcctccttgtgccttacagattctcgttagtaagtcggccttgtccgccgcacttaatcctaacggttccgtattcgcctccaaggtgttgagactcattgccctgatcgttccaatcagttcctccttattcctttccgtgtctacctctgcccttcttcggcttagagcatcggccacggtgttagcctttcctagatgataaacaatgtcgagatcgtaatctgcgactagttccatccatctcctttgtcggaggttcaactccggctgcgtgaatatgtacttacgactcttgtggtcggtgaatatctgcaccttagagtcatagagataggatctccatattttaagtgcgaatatcaccgccgccatctccaagtcatgggttgggtaattgccctcgtgttccgcaactgccgagaggcataggcaatcaccttttccctttgcatgagtacacaccccagcccggttattgaagcatctgtgtatactacatagggctcgtcggcttccggcagaaccagaaccgaagcgctcgta

SEQ ID NO: 35543 - DNA, 2152 bp, Arabidopsis thaliana landsberg
  unsure (1)..(2152): unsure at all n locations
gtatacttcatctctctcataacctacatgattgtttaaaatactgaaaagattttttaaacaaagttttttctgttccaaatttctcgactttgttgccaaaacaaagaatactaaaagacaagagatagattccttcgatattctgaataggacataataaattaggctttggaaactgagactaataatcatcccgttggcctcctcctgcggattnnnnnnnnnnnnnnnnnnnnnnnnnnnnnnnnnnnnnnnnngttttgatcaaagcgaagcttttctaaactgctttgccttttccttttgccttgtgcaggtttcttaattcggaccatactaggaacataagagcacacacagttttcgcgtgcacgctctccagcctcttcaataatgttgaagttttttgcgatcgagttctctaaaatatccagcctctcccataatgttaaatgttttgtgagagttttcatcaaaccccatggcgactttcttcttctcctcgtcaatgaagaaacccccacatataaatggaaccattatgtaattgttaggttcgctatcaattctcaagaacttgttccacgacaccatttcggcctcaatcttagtcgtaatccatatctcacgctcatatggatatgaatcgttgtgctgaaataaagccgcaatcttctcttctctaacacaagataaagtcacatattcatattcattatctataacgttaaccggtagaggcagaagcggaccaaatctctctcttgtaaaatcaaaacagattatatgattgtaaccatctgattatatgattatatgattgtaaccaaatctctttcttgtttcgatatgtcttccaagctacactatatcatgtgtggcgcgaaagaaacgcaaggagacatggtgaagttccagctccaacgactcggctcataaaactcatcgataaaaacgtgcgcaaccgtatcagtgccatcaaggacttgggagaccatcgctacgatgcaagcctaagtttgtggttctcttctagaccagcttcataagcaaggcgtcggttttttttttaactcgtcttttggttcataagcttttctgatctctttcaaaacactttcagctaaacagatgcattcattgtaaacaagttttttttgtggaatataattttacattctttcaaaaaaaaaaaaaaaaaccatctgagttttcttctctagcacatcagtaagtgttccctttgagatagacgccttggacacaagaccaattagacaatatataccaatgtggagtgacatcaagagttgtccataaatcagagtcaaaattgtagatttcatgccaacaaatgtgcttttcggtgtagcaataatctataaacctcaataatttaaggctacgaccagatttattattctcgtatccaagagcatatctgatattgttcattacgtatggacggtgagaatatctaggtatcatccaccttgtttcctgcctatacggattccaaacaacaatcctagtatcgtctttcaagatgcataacaataaaccctcacagtgaaagacttgagatatcttgacttgttcgttaagacaactaagtttacctttaaactctatagatggatcaacgtcatcctcgaggacagcgctcatcaaaaaaacattgtaatctatcaacatgatcaccctagattctccttctctcgttgatgtaactttaccaatgtgcatcttcttaaagctctcactattggataaagtattccaacttttgcaagttaatcgcacaactctcatagatgtcatggaaacccttgaaaggatttcttctatcaaatcctttggaagatcggtgatcatcgtcgacgtcgtcattagtttcaaattgcaacaagggtttgactatttacattcaaaaaaacgctttttgttttcctcaagtgtacactatatataacagttgaagatacaaaagccctaaacaaatctgggccgatagtgggcttcagaatgtagccggtcttttaatgatattttggtgtcaacccaataactccagtttcatctcaattctcaacatacaagtatctcggtggcaagagcagggagaggaagagagaagatggaagagatt

SEQ ID NO: 35544 - DNA, 514 bp, Arabidopsis thaliana landsberg
cagagagatttaaatggggaataaatgcatcattgtcttttatcaccagaagagggatattttgggagagcttttgcgaattcaacaatatttgctcttggatacttcacaagtatgtgcttttaaggttcttgattagtttatgatttgctttttggggaaacaagcttcatcaatgtgtttattgtttttccttcagatgatgctttaacccctaatttaaataaaaaaatcaaaaaagctcatcaggtaagcaagaaattgtttttttttttcatttgtgtgtgtgtgaaaggatacagttaccgtcttctcacgtttcaggcgttggctgaagcagagtccataataaaggtaagcaagaaatggtgttatgcacctcaagttgtttgattttgaaaagacaactatagttatggttaacatgtaatgtcttctcatgtttcagacgtatgaggctaagctggctagaaagaaaaaatgaaaaagatggcgaaacaaatggttcaggtaa

SEQ ID NO: 35545 - DNA, 2920 bp, Arabidopsis thaliana landsberg
gtatggcctgattcatcttcagtggatttgtcttcgaaaaggcttagagttggagatttcgttcacgctttcttctctcttatcgtgttcagtgttatttccttgttggatgcaaacaccgtgaattgtttctatcctggctttggctccgctgggaagatctttctcatggttttgcctccggtgatcggagttatctccggtgctgttttcacggtgttccctagtagacgtcacggaattgggaatccctcggaccacagtgaggatgatgcttccgagatgaaatgatagtatatgattttatactatttatatgcataaaacattaaaatgtaatggcatgtgtttattcgtggaatggtaaatacgaaagttgtataattgtgatctttttttgtgtgtgatttttatttatgtatttgagtgctgatcatatgttgtgtgtttgttttttggtattttttccatatgtttgttgataaactcaaaaataataacatatctctttttatgctcatagtgagtgaatcagcattattgaaatcactagatgttaaggagttgaaacttaagagacacttatatgaactaatgtatatacacacaaatatttctatatatccttttattttgaaagaaattagctaggaaaaattaatgtggatgggccctttaacaaaaaaaattaaaaaaattaatgtggatgttaaaaagataagcctagagtatgaataagataaaaagtgtacgttcttgattttctttagatgataatcattcaattattatacattgatttttaagaaaatgataaaaaattactaatattggtcatggatgtcgtgagccatttttctttttgtttgttctgtttcgttcttagtaccaatgattacacaacatagttgcaaattgagaaaacaaaagtttgggtccgaagagtaagggcttcaaatctattgaaataaagttaggggttaaatattgaatagacaaaaggtttaagactatatcgcaatttatcaaaagtaacattggatgttagaaccctgctgccttaaccactctaaaaccctaaatcccgccatcaaaagctagaagaagaagaagaagagaaaatcaaaaccaaagcttttggagaatggtgaaggcttaccaaagattcgatgcagcgacctctttcggtgtgatttcatctgtagattcgaacatagcttacgattcgacgaggaagtatgtgcttgctccggcgttggagaaggtcggaatatggcacgtccggcaaggtgtctgctccaaaaccctaactccttcctcctctcgcggtggaccatctctcgccgttacctctatagcctcctctgcttctagcttggtacttacttttgttcgttttttattttgatttgcttaatgacttgaaagttgttcactttgtaatctatttggtagctaaatagagctagaaatgtcgtatttgaattttaagctagaattaataatattcatggtgctttgtactattgagtatctgaaggagtttgctgttgtttgattctgtgtgataaaccaggtggcagttgggtatgcagatgggagcataagaatatgggatactgagaaaggaacttgtgaggttaattttaatagccataagggggcggtgactgctttgcggtacaataaggttggatcgatgcttgcatctggaagtaaagataatgatattatcttgtgggatgttgttggcgaatcaggtctttttcgtctccgtgggcaccgagatcaggttatttaatgtctagcttgatatttctagtatttagtgtttgatgattctgctatggtgtgtgggtgtttatagtggtttttgacaagagcaatgttcatgtgtctaatgtaggtcacagatcttgtattcttggatggtggtaagaaacttgtcagttcatctaaggacaagttcttgagagtctgggatcttgagacccaacactgtatgcaaatagttagtggtcatcatagtgaagtgtggtctgttgatactgatccagaggagagatatgttgttactgcgtcggctgatcaagaacttagattttatgctgtcaaggaatattcgtctaacggatcattggtatctgactcaaatgcaaatgaaatcaaggccagtgaagaacattcgacagagaacaagtgggaaattctaaagctgtttggggaaattcagagacaaactaaggatagagttgcgagagttagattcaatgtttcgggaaaacttctggcttgtcaaatggcaggtaaaactattgaaatattccgggttttggatgaagctgaggctaagcagaaagcaaagcgtaggcttcgcagaaaagagaagaagagttccaaagtgggggatgaaaattcaaccgctaatggcgaagcaagtgctaaaattgaactagctgatgctgtttctagtcctactgtccttgatgttttcaagctcttacaagtcattagagctgggagaaaaatcagctctttctctttctgtccgacagctccaaaagaatccttaggaacattagctctctctttgaacaataactcactggaattctattcccttaaaagcagcgaaaacgcgaaaactgttaccattgaacaccaaggacatcgctctgatgtgaggagtgttaccctcagtgaagacaacacccttttgatgtcaaccagtcacagtgaagtaaaaatttggaatcccagtacaggttcctgcctccggaccattgattcaggatatggattatgcagtttgattgttccccaaaacaagtatggtattgttggaaccaagagtggggtacttgaaatcattgatatagggagcgctaccaaagtggaagaagtgcaggcgacgactctg

SEQ ID NO: 35546 - DNA, 760 bp, Arabidopsis thaliana landsberg
ccaaagaattccaccgtttcaagatttgatcagaatcatcatcctcctacttactactactactactagtgctcttctttcatgggttaatttaagttgccttctttcttgtattataacaacaacactttagttaggggcgatgaaatttgggttttttcagaaacaatatttttgtgacctctagtgtctatctgtttattcatcaaccttgccacttactaaagatttcactgaatgctttcatattcttggacttgttatgaatgttccatcaagatcgtattgcactaacaattaaaaatcttatgattgctaataacttagtagctgcaaaatgctcccggtgaagattctacttggcttatgaggatgaagactttccccaagatttatatgttacttaggtaattagctactttccctatgaatatgttgttctacctctctgagccaaataatgcgaaaggattcatgttttatagtttcaaaactttggcataaattgtatgtcttttgtttaaccatctgagttttgatgtctgatgattgtaaagttgctaaagtttattgaacctagtagcccgtagggagataactaataaaacatcgtggattcaaacaactaatctcggttgtctctttcaccattcgattcattttttaaggcgacattatgaagtgttcaccaaaatctaaaacataaaataagtttaaaaactaatcggtttcatctatttttatgtgatcttagactatt

SEQ ID NO: 35547 - DNA, 889 bp, Arabidopsis thaliana landsberg
cttttaatttgttttttttatccaaccaaaaccacaaaatataaggaagggagaaaactaaaatttctctgaaacgaaaaacaaatttgaatcgaaattgttaatatattcactttacctttagatactaattatttgcccttatttctaaaccaaaaatcttaaaagaaaaaaaaaaaaattaatccaaaatccggattaaacacatagacggtgacgtgtctccttatccatttggaccaataaaaacttcagacaatttatagaccatataaattttaaaaccgacgagagaaataaaaaaacaatttttaaaccaacggttcagaaacaaaccacgccaagcccaaaaggcttcgttatccccaggccatacgagagattacgagtaagtgatacgttagccaaagagtgtcaccaattgattcaatatcccacgaggaagaagaagaagcacgagaagaagaagatagaagcgatttttataaaatggcggcggatgctctgagaatctcgagttctaggtctggctccccgctttgtcatcttaatggttcacacagacgacctgttcttcttccctctgctcatcgtgctacctttttgggtcgttctctcgagctcatcttcttcacccctgtctcattcctcagatcctggtactcctcgtattgggctagcgactgccaagctctcacaaaagaaaaaacaattttcagtcttcgctgcagctgaaggtctgtgtcctctctctcacaaagctttcatctgttcactctactgagataaaagtccaacagatattacttgccttctaagtgatcgtcaacatgcccctgagaattatatttactctgatattgctaaaaatcatgacctttattgctga

SEQ ID NO: 35548 - DNA, 4269 bp, Arabidopsis thaliana landsberg
  unsure (1)..(4269): unsure at all n locations
tccttgctgcatctccagcaccaatgttggtgggtacattcgggtcatcttgttcatcagccattttgaatggatggtggtgttcaaggtcgaatgtgtttatcctttccctaagtcttctgttgaagcagttgatgttatcgttgaaaaggaggttctggttgtgttttgatctagtttgcatacatcagagttgtacctggatcaagaagacaacaactgaaaaacaaagttagtaaccgaaatgaaaattaaaatagaacttgatcaaatcaagtccgaaatcttaaatgtaacaaacaaacacctaattagcaacgacgccaaattaataataggtttttatgatcaaatatcctaaaacaccaatcatgtcgttgtagtattttaggttgtcaatccaaatgggtgtgatgctagcaatcaagatgcaatccgagttcacagagtcaagccaagcaataccaggttttggggtgttctaccagtcctaagtgaacatgcaggaaacagaaaatcaagcagaaacaataaaacactcgaccaacacaacttgttgcagagcactgggtgtggtcaattgactggtcgagtaacagacagaaaatgaaacagggatactcgactgttcagtttgttgctagacaactgggtggtcgagtatcgggtcgactaacagtaaagatttgcagaaactaaacaacagatgacaggatgtagtaaacagtagtagagtaaacaataaaatcaattagataaagaattcctaaggatgggataattgagtagtttcgtttcctcagtttacaggtgattgacatgctcaataaattaaccctagacaacaagttcattaaccaaatctaagtgccaccgcaacagagactctcaagctaacctagtcccagactcaatcaccattgacgagagctaacctaacaggcattacgaatcaacaagttaaagccaaaacgctccctgcaaccaataccttggtacagggtcacgaatctctggaattagtggttcagacatttcatcgaacatcttttgggcgcggaaatgtctgggctcaaattccagttgatcagaaagcaataggcattaagaacaactaatccagaagggatctatcaatcaatactcaatcacctagcatactgagaattctacactactctaacccatcctcagaaacctattcactactcagacatcataacagaaagcataaacgttgaacaggttgaagacatgataacaacagtgtaacatcaggaagataacagaatgaacaacagtaaacgaaatcaagaacaaaagctgaatactgaatactgaatagataaagagaaatccgaattacaaaaagtctagaacataaagtctgcggaataaaactagataaaaacttcttttctgcgaaaatgtgaagtacatgctacttatagccaaatattccgaaaccctaatactcaaaacgacgaagtattgggacggattaagaactgtactcgacccatgtggtcgagtgggaggtcgagtgaatagctggagtcttcttttcttcttgtgctcgagtgtctggttgagtgcggaatgaagaaggctttgaagcttgtcatcgagtaaggacgtcgagtgaatgatgataagggacttgaccatgtggtcgagtgattggtcgagtggatggtggtgttaatgaatcttggagaagtctttaatgaatcttctgtagaacccagcatgaccaaagaaacttctgatgtccttcaccgtttttggtggctgcaactgcatcatcacctcaacttttcctttgtcaacctctatacccttctctgatatcttnnnnnnnnnnnnnnnnnnttccttcaccatgaaatgacatttttcccaattgagaacaagattcgtctcttcgcacctggtcaataccctgccaagattcaacaaacatgaggagaaaaagggaccatagaccgaaaaatcttccatgaaaacctccaccatctcctcgattaagtctgaaaatatagaggtcatacacttctctgaaatgttgcaggagcattgcatgggccaaatggcattctcttataggcaaaagttccataaggacacgtgaaagtggttttttcttgatcattagggtgaattggtatttgaaagaaaccactgtatccatcaagaaagcaataatatggatgattagccaaacgttcaagcatttggtcaatgaatggtaaaggaaaatgatctttcctagatgcagcattcaacttcctataatctatgcacattctatgaccagttatagttctagtagggatcagttcatctttttcatttttgacaacagtcattccaccctttttagggacgcaatgcactggagaaacccaagtactatcagagatagggtagatgacaccagcatcaagcagtttcaaaatttcttttttcactacttctttcaaattgggatttaacctcctctgtggttcaatgctggaataggattcgttttcaagatggatcctatggttgcataaactaggtgaaattcccttaatgtcggataatgaataaccaatcgctctcctatactttctaagctcagataatagcaggttcacttcatcactatttaactcagcattaatgatcacagggtaagtagagtttggaccaaggaatgcgtaccttagaccttttggaagtggtttgagatcaaccttcggtgtcttaagttcagaccagtcatctgaagttggaatgatcggctccccagattcgttggtagacaaggtcgagtggctggtcgagtatgtcctcgagagtgcaggttgaactcgagttgacccttcttcgctcattaccattacctccgttgttggtccattcaattcctcaaagggttctgattcttccatcgctttatgggagtctaacagcttctggtatcccaatgtttccaaatgcagaaacccatcttcaccacttttggttaaagcactgttaagatgatcttcttctgccagctcttccagtaacttatcagctaactgatccatttcttcgatccaaaagagttgcccttctatggtaggcttcttcatcgcgtctttgacatcaaaggtcatcctaaaggctttgccaaggtttagatcaatcttccctttcttgacatcaatcatagctcctacagtgtctaagaaaggtctccctagaatcaaagggtccttgggctcttcatccatctccaggactacaaagtcagttggtatctccacagcaccgatcctgattggaaggttttcgagcaaaccatgagggatccttactgatctgtcagctaggatgagggatatattgcaggatttgtattgagtgaaccccaatcttttggcgacagagagcggcatgagactgactgatgctcctaaatcgcataggcatctattgaaagccaacggatctaaagagcatggtagagtgaatgaaccaggatcactaagcttcttaggaatgatcttcttctgtatgatagcactgcattcatgactcaataccaccatcccttgcacttcttgaattctctccacgatcaagtctttcagaaacttgtgagagtctgggattaacgctagagcgtcaacaagaggtatccgcaactcaacctccttaatattcttggcaaacatagctctatatttatctgtcaacgctttcttgtgacggccaggaaatggaagctgcggtttgtagggaggagggacaaagaccttttctttgtttttgacagcaactggttttggagcagttggtgatcctgctgggaagataggtcgagttgctggtcgagaaaacagtaaaaagtcacagaaatgactgatatactctatcgcagggtcaactgccagaagggaccctgtgatcgagtacaacaggatgacagagtgtgaaaatgcagaaatggacaagtttactgtatcacgcagtctcactgttagtagactggtgtgatcgagtagaatggttgaaaacaagaaaatactaaaattcaataggaagtgaatgaagcaggtaagtaaacagagaaatcaaatggatgagaaattccttaggatggggtaatcgaatagtgtggtctccctaatcaattcagttggttaacaaatctcaattaagctatccctaaacaacatgttcaacaacagattaattcactctcgtgatagaaatcctcaagcatagctagac

SEQ ID NO: 35549 - DNA, 1293 bp, Arabidopsis thaliana landsberg
ggagagagcgagaaacagagagagagatagagagagagagagagagagagagagaagagagagattcttgtaaccgaggaacaatctttgtgacttagtggattccggagagagcctccggcgagacgtagggttccgatttggagcctgaactcgtaaaagtcttgtgtcttctttctttcttgcaatcaaacgagagtcaagagtgaacagcgagttttagcgatatgcgattcaagtcgtaatcgtacaaacttttattgcagtaattacaacatgctttcatattttcatcaattttttcttttcgaaagtgtacctggaaaatggcagaagcattcagacgttactttcctgagcttgttcttcggttgcactttcttgagtactgatggctggtgttgagttatgaacatcttctatgggtgtaccgatgttagatcgaaatgaatcggaaaacatttttaaacaaaattaataaaactcaaaaatatgatgaaaaagaaatctctttaacgttggatgaagcaagaagaataatttttattttagaaatttttagcatatggaacaatgaaaacaatatttatagaaaaactggttagtatatttatggaaaaagtctttgaatttttttaagttaaacaaacattgatgacttggtcgtaaacggctatattccacaacttggtcaagctcaagtctttaacgatctaattctacagttttgccacgtatgatttgacttggtcataagttttaaagattgaaatgaactaacggattgccacaaaaaattttaaaggttgaaattttattttatttcaatccagctacattcaagtgctcgtgtgttttggcacataaattttattttattttatcttcatttgatgatatcacactagctctctcgttttctcttcctagtcaatcaattatcggttttgaaaaaactttactacttctttgggttatgagaattgaggaatttttaaaatcatttatcattgttaataatgcaaaactaatgaccatctttttattaataatgcaacttggtcaggtttcatattttgtggttaaccaacagttttgatacggttacggttaattaacggttacggttagtatatatttttaaccgtaattaatgtaattttacggttaacggttacggttattaaccgttttatacggttacagtccggttacagtttaaaaacggtccggttacggtccgaaatacggttacggaaaaaaaaacggttacagttagattttggtcatgcc

SEQ ID NO: 35550 - DNA, 2707 bp, Arabidopsis thaliana landsberg
tcacaaggcccattattttatttttaggaattttgggcctatatatacagaaactcttgggatattttctgtatgggtaaaaagaacaagcagtagtataatcgcccatcatgaagctagttggaatagatccctgtataaacaaaagtcaaatgaaagtgtaaaaaagctgtgaatgatttttgttataaagctataaagttagacaacgagatttcggatatctcctcgaagttgtgacttcattgtgattcgatctctctacttcaatttttttcctttaggtttgtggtgggtttctcggtacgaggttcatttaccctcccaactatacaatagacttttgtttttgtttttttgcttttcaccttaaatcttatctacctcatattctctaaatgtaatcagtggaggaacgatctaattaacaatatacctatctagaacacgacctagataatttacatcattagaaatattttgttggttaagcttttagatatatactatgctagctttaacaaaaaaacaaacagaaaaaactgtgttaagagaattttgtaagcttttagaaaaatactatgttagttgaaattctattgtcccaagtgttgtttggactgttttgtttctttgcatagttcatgtagtgggcttgtttgagtttttctttatcggagaaagattattcctaagtgaagtctctttgtatgttctctagtgaagcatgaaagacatcactgtaaattgaatcaaaacaatacttgttatagtggaattcttgtgaactatgatcatatagatgttaacttcacaaaatcttgaactttgaaaaagtttcacttgtaattatacgtttgttatttattttggaagctaagtggtttttgaggtcgagaaatcatttaggcggacctaacatgggctaaggaaatcgtaataaacacatgcttcacgaggctagtacttcttgaactgtgtatttggcggcctcgtgccatgcaaacagagcagtatatagaattttcatagaagcatagaagataccaataaaatatcttcggtgaactagcacaaagccacaaacttcaaatcagtacttcacatttctgacatgaaattttgttttaacatatatcgttaaaattgaaattgctcatgaaaaggggtatgatttaacttctcaaaaacatggtcttcacttatatatgaagtcaccaatccattatgctaatttcttacatattagcaattattttgggtctttatttattgaactcttatttatacccgttttaattattagaagagtctagatctttcacacgtatttaaaaataatatttaatttttattctatatcctttactaatcgatatggagctgaactaaattatagagttatatgattatatcttaaacctgaattcaaaactaaccccgtaccatacaaaagaaattttgttatacaagttggcatgtaccactcaattctggacgcatattgactcttttgctgatttatttgtattcggtgatctgctccccatgtacttttttacttacgctttgaattcacataaaaacctgtactactactatctaaatgttataaacgcaatctacaaaaaatcagtactcgtacaaacacaaacagtgtaatgtaggagacaagaaatataaaacacctcgatttaaggaaaaaagaggtaactaaaactaacacaaaggctccgaatggtgactgcgttttgcggtgcgggagaagtgcggtgcggttcaaatagtaacgaaaatacataaatatatatgtatatgtagagattttgatactgttacagcactgttgcagtgcggttttgggtgctgtgtatgtcaccattcatagccctaatctcattccaagttcaagaggttcaacaagtgattaaacaagtctgtaaacttcattaacaattttcatccgttatattcttgtaaagtagcagtaacgataaagctaaatcaacaacttaaatcaaagattgaaattcatctccgtcgacgtttcttcataaccatcagtggttgtgacagcggcggctgcaccgctgcaacaagatcagaggaagccattcccatgtgaatgatgtgcttaaaatcagagtgcatacgctcagccatggagaaaggaagattaatccaaatgttggaagattaaacagatctccataacaaccattctccttcatataacgattcaatcgactacacgtctttgaaaaggtttggcttcatctgcttatttctttaacatcgttaaaatttaattcaacttctacaaaagaaaaattgtagttctctaatcttaaccataaattttaatatttattttttaaatctaatggcctatatttaaaactacataactcaactattttgattttctaactgtttggtacagaacaactgatcgctcggcaagtttgagggtataaatatccaattttctttcaaaaagatggaaaagtgcctatactttaaaaagtatctatattgtacaaagttgtgtttaaagtgccttatagtgtaacaaacccttgaaaaaattgatccatgtgtcaatgtggatcggaggaaggacccagccaaatgattcattcttacatagaatcattaagttcttcctaatcaaatgtatctaaatacttcgtagttacttatgggt

SEQ ID NO: 35551 - DNA, 1343 bp, Arabidopsis thaliana landsberg
tacagcttcatggatatcctttgttccttagtgcaggtttagctcctcctcctcttggaatggttctggttaacttagccactctcttcccgttaactatggtggaactcggtgtattggcatacaacaacctcacttttctaactgatttcagtccaaccacggtcttgttgtttcctgatccgggcgatgatgaaccgaagttcttgttctcgatactcatttcttggtcgtcaagagacaggttcttgtgttttttaagtattgtcatctcatcgcaataccgctttgatgtctgagagttttggctagaagaatgtatcttcagaagacgaagctgctgcgatatactatccgatgaactgctttgatcctcgccgagtaactcgacaagaaccgctttcccttcttcgctagctccacttcccggttcaaccaaaaccgaaccataaactgagcctccagtactagtactcttaggaatccgtttggtagctgcggtttccgatgccttagtgacgcataaatctctcaaagcttggtttaacgttgttggtatcgcatttctcttgctaggcgatcgaggtcctgtgggattcgcgggactcttcaaagcattccgctgtaaaggagtgttgtttctactgctactagttgcaccaacttggtaagaaggaatcattcctgatgttcgaatgcttatagactcgaaaagctggcttatgtcatcttctagtgaacctctgtaacctaatttcagtaccggtcgctccagatccttgtcgttgacaatgcttgatctagaatgtggaataatggtcgatttcgctgagtaaccaatcgagttttgacggtcttctttttcttcaactatttcacactttccggcaaatgaacccataacattaaagctcagtcacacagcatcttagtaaccgcggaaatgcgagtaatctaaaccggtagatacatctttttatcccacacgcacctgaaattatattcacagtttaaaggaaggtatgtgaatttttcttgttaaagagtgcatcaaaactatgaaattctaattataaagagaacacagatttataagaacagaacaaaacagagcaaaacagagcagagcagaggaatatgggagaaaaaaaatcactaatgctttattaacaagatattttgatcagagactaaaaattaaggaacataccacacaacacaatacctatgaaacagtcagatatctcaaactgtaacaactgcagatggttcttttgatattaatgggttcatgtctttagttccacagagatcatgtcaaattcaaaagtgagaatttttca

SEQ ID NO: 35552 - DNA, 1794 bp, Arabidopsis thaliana landsberg
aaaattttaatttatataataaaatataatctgtacatctccaataatttattttttagtttaacgaaataaaaatctattttgaaatttggggaaatcaagtaaaacaattttgtgccatgtttgttgcatctcacaagtcacgaggtttatttagctctacgtgtgaaagtacaaacaacagctatcatggattttcatgacatcatcaattacgtgctattgagatttatactaccttttctttattatcatttctattttcttctaatgaattcaagatctttcctttaaagacatatgaagactttgacccaaaactgaaatatcgtagatgtggaaactttagaattgagaagttttcaaaaaatttaaaagatgtcaattacttaggataagtaatgtactattctctaaaatttatccttttaaaataatttttttaaagaaataatagtttataatttttgtacttactaatagtgtataagaaaaatatcacaaaattttgtttaaaaacatagcataaatgaaagaccatgtgacataaacgcattgtaccaaacttaacattcttagtgtttctttgagatttatcaaatttgaattcatttatacgaaaaaaacaatttatagaaaaaaattgaaaattttagttcagttagtttgatatataattagttacatagctagctaggtgcacataaaaaaaaaggttacagagttttgcattatatattaaattaatttaagctcacttaacgtgccaaactttctctggtcgacatctttgaaaaatctaaaaattgaaattaatgtactttaagttttaaacttattggttcattctatatattgtgcttcaagtttctaaactttttttttttcatgaacaaaattcgactctataaattatggttttggtgagttctgctactcatttatccattggttttgaataaaacacattacaatagtgctaaagaatttagttttcgagattgtagatgaactatagacattgcaaacaaagtataaatgtgtttcaatcgaacaaaatatatgacttatgtaaagatagaatctgtatataaacaatacaaaggtgtttaaaaagtttttcctagcaacctgtatagatatacaaaattttaatatcaaagctaaataatactaactttaatttaaatagacgtgtttacctagtaaatgtaaaaacaaaaagaagcatatcgaccatccagtcacttaacactagaaatatctttgttaaaacactcagcataaaaagattccttttaatataaaataaaaggattgttgtttctatcatttatgattctattccaaggtacaaaacctttcaagtgatttttgacacatacatttcaagtgatttgtgttaaaataacaaatcttatgttattcaatcatggttttttaaaagtctcatgaaatctaatgttattgaactagtggttttaaaatctatttaaaaatcccttgttattaaaaacattttaaggattagattgttaatgactttaaaacacttaagtgaattttagttgatttctcagataaaaataaaaaaaattcaaatcttatgattttagatagaatttcagaggaatttacaataaatcataacaacttccttaaattcaccataattcttcaaaatcacataaaaacttaaaataactcaaatcactccaaatataagattgaatacaccccatagttccatagttttgacttcaccaaacagaatgcacttaacctaatctttgg

SEQ ID NO: 35553 - DNA, 2519 bp, Arabidopsis thaliana landsberg
  unsure (1)..(2519): unsure at all n locations
atgatcaataaaagcaagtctgctatcacgttttcaacaagtgggcggtttgggaaaatatcttggattacctgaactgtttggccgaaagaagaaagacatgtttaacttgataatcgatcgcatcagacaaagagctaagagttggtcttctagatttctgtccacggcaggaaaagcaaccatgctaaaagcggttctagctgcgatgcccacttacacaatgtcatgctttaagctcccgagctctctctgcaaacgcatccaatcagccttaacacgcttctggtgggactcttcaatgggaaaacagaaaatgagttggattgcttggtcaaaactagctaaaacaaagagagatgggggcattggttttaaggatatacctagcttcaatgatgctctactagccaaggttagttggagattgcttactaaaccatcgggtctgttggcaaagatccttattggcaaatactgtcattcagcctctttcttagactgcaaagtctctaataacgcttcacatgggtggcgtggtatatgcattggaagagaccttctaaagactcaacttggaagagccattggcaccgggaaagacactaggatctggcaggatccatggatttccctctccaaaccagtcactccaatgggaccagcaacgcagacctctcaggagctaacagtggcagaccttatatgtccttcttctaactcctggattaaagagataattcaattgttgttacctgagtatgaagcagagattttggaaatcagaccaagcaagagaggagctcaagatagatacatttggttacttaccaagtccggagaatattctgcaaagacaggctatcttgttgcgaacttgcgggaggagaggccgcttctaaaccctccagttgttgagttcgactggctccgagagatctggaatatcaaaacctctcccaaaattaagttttttctatggaaagctatgaaacaggccctaccaacaggagaaattttgaaatttagaggcatcaatcctacaacagtatgtcctcactgtggagaagatgaaaccgacacgcacctgttttttcattgcagcttcgcaagctcaatttgggacaaatctcccttcaagacttcattctgctcttcccaaatcacgtcgctgaggaaaggtctagaaacttcgaagctcctgaccaatttgcctcctacaggactcggagacgtcccccttttgccatggatactatggacgatttggatctcccgaaataagcgcatctttgagaagagacaaattacagacttcgaagcggtggctcaggctgtttcccaagctcgggaatggtgtgcttctcaacttgtatcaccccaatctcctcaattacgactcccgtaccagatcgaagagattggattagatacaatccgagggttcacagacgccgcttggaaagctgagacaaaagaggcgggatttggttggcacttctctgatttcctctgtaacacagagcgccatggtagatcttctgcttccaacgttcgatctccgttaatggcagaggcgctggcgatgcttcacgcgatccatcaagccagagatcttggttacaaaaaactttcgcttgcttcagattcgcaacagctgatcaaagcactaaatttggagcttcaatcgaaggagctctacgggattctccacgacatcctctccctatctttaacttttgattttatcagattctgttttgtccctagagataaaaatcgaagagcagatgagattgcaaaagaagctttattttctgcattcaatgtaccagtggttataccgactctgatatcaatttaatggaaaaccagctgtttgaaaaaaaaaaaaaaaaaaaggtggcataatctaaggaaatttaatttttgaatttttaaaaaagggtaaatatcatcactaaatttttttcatgataaacaaatctcgtatccatttatttttcttttagtgtttactaaattatctctagttattgactagtttaggttatttgacataattatcattaattaatttttctaccaatgtacatatcccactatatataaattatgaattattgagaaggcaaataccatcactctttaaatcatcatgataaactcatctaaaggaaatctcatatccactatgtgctcaaaatttactatctctatagtggtgatatctttcatttgttcagaagctctagaacaagatagagaactgatttcaataacaggacctctcatgacagtctcgatcaaaaatgaaaatgactattattttggagttccattgtaaatttgcagataaagatttcggttttcgccttcttaaaaaaggtgaaatatatgaatgaaaatttcatattaatattacgaaaactacactatatntttgtggatttaatgacggacagatagataaaggtacttttgacatttacatagcgcttagagatgagggaaagatg

SEQ ID NO: 35554 - DNA, 4349 bp, Arabidopsis thaliana landsberg
tcagtagccaagaaacttggttttgataaatataaaacttgcaacatttcgctaattctggcgggcagatccatcaggatacctcatggcctgttggaagacttacctatcaagataggttctatagaagtacctaccgactttgtggtgctggatatggacgaagagccgaaagacccattgattttgggaagacgatttttagctacagcaggagccatcatcgatgtcaagaaaggaaagatcgacctcaacctcgggaaagatcttcggatgactgtcgacatcaccaacatgataaaaaagcccacaatagaggataaagttttctggatagaagagaaaaaattgctagctgacgagcttttagaagaactagcagaggaggaccacttacagagtgccctgaccaaagacagtagagaaaaagacttacatgtggaaactttgggataccagaagctgatggatatgagcagggaagtcgatgactcagaagactttgaggagttgagaccactcgatcgcacgaataacccactcgatcacgtcactcgatcccaaggcgagctacatcactcgatcgcttcactcgatcacgattccatctccgacgctgaatcaccacctgacgattggtccgagctcaaggcacccaaggttgacctgaaaccgcttccgaaagggctaaggtatgtttttcttggaatcaattccacctatcctgtgatagtgaatgatgaactagatactgaacaagtaaatttgcttgtaattgaattgaaaaagtataggaaagccataggttattcactagatgacatcaaggggatttcacccactttgtgcactcatagaatccatctagaaaatgaatcctattctagcattgaacctcagaggagattaaatccaaacttgaaagaagtagtaaagaaggagatacttaaactattagatgcgggtgtaatctatccaatatctgatagcacttgggtatctccagttcattgtgttcctaaaaagggaggtgtgacagttattaaaaattcaaaagatgaactgatacccactaggaccataacaggacataggatgtgtattgactataggaagcttaatgcagccactaggaaagatcatttccccttacctttcattgaccaaatgctagaaagattagccaatcacccctattactgttttctagatggctatagcggattttttcaaatccctatccacccaaatgatcaagaaaaaactacattcacgtgtccctatgggacttttgcttacaaacgaatgccttttgggctttgtaatgcacccgccacttttcagcgctgcatgacttctattttctccgatttgatagaggagatggtcgaggtattcatggatgatttttctgtgtatggctcttctttctcctcctgtttgctcaatttgtgcagggtactcaagagatgcgaagaaacaaacctagtgctgaactgggaaaaatgtcacttcatggtcagagaaggaatcgtcttggggcacaaaatatcagaaaaagggatagaagttgatggggcaaaagttgatgtcatggtacagttgcaaccaccaaaaactgtgaaagatattagaagttttctcggacatgctgggttctacaggagattcattaaggatttctctaagttggctaggccactcaccaggctgctgtgcaaagaggctgagttcacgtttgatgaagaatgtctggttgcattcagatcgatcaaagaagcactgatctctgccccaatagtccaagcacctaattgggatcacccttttgaaatcatgtgtgatgcttcggattacgctgtaggagcggttctaggacaaaagattgataagaagttgcacgtcatctactacgctagcagaacgatggatgatgcacaagtaaggtatgccactacggagaaagaactattggccgtggtctttgcattcgaaaagtttaggagctacctggaatgctctaaagtgacagtttacactgatcatgctgctctaaggcacatctatgtaaagaaagataccaagccaaggttgctgagatggattttgctgctccaagaattcgatatggagatagtggataaaaaggggattgaaaatggtgtagctgatcacttatcgcgaatgagaattgaagatgcagtccccattgacgacaccatgcctgaggaacagcttatggccatccgggaagtgaacaaaaaattcaaaagcagcccagttttgggatgagatgcttgcagtagaggagaaacttctgtggtacgctgattatgtcaactacttggctagtggtgaagagcctttgaatctgtcgagctacgagaagcaagaagttcttcaaggacattaaccatttgtattgggacgaaccttatctctatacactctgcaaagataagatctacaggagatgcgtctcagaagacgaaatcgaaggcatcctactgcattgccatgggtctgcctatggtggccactttgcaacgttcaagacagtgtcgaaaatcctgcaagctggtttttggtggccatcaatgtttaaggatgctcaagaatttatctcgaaatgtgattcatgtcagagaagagggaacatcagcagaaggaatgagatgcctcagaatccgatcttagaagttgagatctttgacgtttggggaattgattttatgggtccgtttccttcctcttacgggaacaagtacatactggtcgcagtagactatgtatcaaaatgggtggaagccatagccagccccaccaatgatgctagaattgtgctaaagttgttcaagacaattatcttccctaggtttggagtcccgagaattgtgatcagtgacggagggaaacattttatcaacaaggtttttgagaaccttttgaagaagcatggagtaaagcacaaggtagccactccttatcatccacagatgagcgggcaggtggaaatctccaacagggagataaaagcaattttagagaaaacagtgggaagtacaaggaaagattggtctgctaagctagatgacgcactatgggcttacagaacagccttcaagacccctattggaacgactcctttcaacctcctctatggaaaatcctgtcatttgcctgtggaactcgagtataaaaccatgtgggtagttaaactcctgaacttcgacattaaaaccgcccaagagaagcggttgatccaactgaacgatctcaacgagatttgcttagaagcttatgagagttccaaaatctataaggagcgaaccaagtctttccatgacaagaagatagtctcaagagattttaaggttggtgatcgagtgctgctgttcaactctcggctgaggctttttccaggcaagctcaagtctagatggtctggtcctttctctgttactacagtccgaccttagggtgctatcactctagctggaaagaatggagacttcacggttaatggccagcggctcaagaagtacatggtagatcagtttattccagaaggaacttctgtgcatttggaggagcctatacacgcctaatgagtatgaagagtcaagctagagacctaaaacaagctcacttgggaggatgtcccatgccctatctttgtacatatctttaattttccttgttgtttttgatgcatcttgttagtgttttcatgagataagtatgaagagctgagggaaatagattctggctttgagggaacaacaatacactcgaccacagagcaatcaaactcaacattgttctggcttcttcaccccaggaaatcactcgaccacaccctacagggaccgaatgacgatgtggtcgagtatagcgaacgatgcagtcacaacttctccatgtcagtaattcactcgaccgcggtgctggtcgcagcagaagaagagaggtcgagtatcatcagagcggtggtggccgcgacgaaggagcagaggtcgagtacctccagggggaagctgagacacaacagggagattcttcgatggcctgggagcaatcacaggcggctattgacgaccaaatccgctccttctaccactgaggtaagcacctcactctaccattgtaatataccatctcctgtttttattttgtttctctgatgtgttttgtcctgagtactctcttccaaatctggtcacacagtggactgtgtgatttaagtttgggggagggctcaggaagtgtgtgatgcattgtatataatcttgagtctgcattcatctaaggcatagaaaaaaccaaaaaaattgaaaaatttcagaaaa

SEQ ID NO: 35555 - DNA, 2262 bp, Arabidopsis thaliana landsberg
agttaacttgttgattcgtaatgcctgttaggttagctctcgtcaatggtgattgagtctgggactaggttaacttgagagtctctgttgcggtggcacttagatttggttaatgaacttgttgtctaaggttaatttattgagcatgtcaatcacctgtaaactgagaaaacgaaactactcgattagcccatcctcgggaattctttatctgattgaattctttgtttactctactgttgtttactgcatcttgtcatctgttgcttagttgctgcaattctttactgttactcgaccacccagttgtctggcaacagactgtgcagtcgagtatccctgttacattatctgtctgttactcgacctgtcactcgaccacacccagtgctctgcaacgagctgtgttggtcgagtgtttatttgtttctgcttgattttctgttttctgcatgttcacttaggactgctagaacgcaccaaaacctgttattgcttggcttgacttagtgacttctgatcacatcttgattgttagcatcacacctatttggattgacaacgtaaaatactacaacgacatgattgatgttttaggataattgactaaaaaacctattatcagtattggttgcagggagtgttttggctttaacttgttgatttgtaatgcctgttaggttagctctcgtcaatggtggttgagtctgggactaggttaacttgagggtctctgttgcggtgacacttagatttggttaatgaacttattgtctaaggataatttattgagcatctcaatcacctgtaaactgaggaaacgaaactactcaattatcccatccttaggaattctttatctgattgaatttattgtttactctactgttgtttactgcatcttgtcatctgttgcttagtttctgtaattctttcttgttactcgacctgatactcgaccacccagttgtctggcaacagactgtacagtcgagtatctttgtttcatttactgtcggttactcaaccagtcactcgacctcacccagtgctctgcaaagagctgtgttggtcgagtgtttcaatgtttctgtttgattttcttttttcttcatgttcatttaggactactagaacacaccaaaacctgttatgcttagcttgacttagtgacttctgatcacatcttgattgttagcatcacacccatttggattgacaacctaaaatactacaacgacatgattggtgttttaggataattgacttaaaagcctactatcaatttggcgccgatgccaattgggtgtttgtttgatacatttaagatttcaaacttgcttagatcaagttcttttttaatcttcttttcggttactaactgtgtgtttttcttattgtcttcttgatccaggtacacctctgctgtatgcgaactcgatcaacaggcaatcagaacctccttttcaacgacaacatcgaccgcatagctcgcgaactcagagaaaggagaaacacagtcaaccttgtacctcagcaaccactcgcaatggctgaagaacagaatcatctttatgggctgccaacattggtgctggagatgcaccacgagatcaccgttagaggaaagaaattgcacctcctgctatccagaacaacaacttcgagattaagagtggtctcatctcgatgattcaggggaacaaattccatggtttgccaatggaggatccactcgaccaccttgatgaattcgataggctctacaacctgacaaagatcaatggtgtcaatgaagacggattcaagctccggttgttttcattctccttgggcgacaaagcacacatctggggaaaaaatctgccgcatgactcaatcaccatctgggatgattgcaaaaaagcctttctagcaaaggttttctccaacgccagaactgcaagactcagaaatgagatctctggtttttcacaaaaggctggtgaaagcttatgtgaagcatgggagcgtttcaaaggttacattaaccaatgccctcatcatgacttcaagaaagcctctctgctcagcactctatacaaaggtgttctaccacggataagaatgcttctggataccgccatcaatggaaatttccagaataaagatgttgaagaatgctgactcgggccatagcggctgactgggatggcgggcacaagaaggagattaacgcgctgaatgtcaagctgcgcaagattcaatgtagccagcagaagc

SEQ ID NO: 35556 - DNA, 1219 bp, Arabidopsis thaliana landsberg
cgataaatacaaaaatacaaaaaattaaattattttatcattgagtgttaagttgattaaaatatcattttctactaacaacataaattcaactaaaacttttgaaataccatcagtttgtacaatatactatagataaattttataaaacaatgtcatcaagaatagtttactactctctctgatccatgaaaattgatgttgtaggtatttatttttcttttacaaagattgatgttttgtgtcaatattattattctttttgtttgtgaccaatagaaaaaagagagaagttttaaaattaatcttatttaacaaataaaataattcttaaaaaatttttattaaaaaaaatagaaaagttactcttttttagcgcttgtgtgaaaaatctacgacatcaaaattcgtagaacaattggattataaaatagacaatctatattttctctctagttgactttttgctaccacatttcttttccatatttagggttctctctaatttggtaaaatcatgttatctatttttagtttgtgtgaagtatatttaataagatttcaacaagtttttgcaagtaagatccctaaatttgtatcatatgttttaataatgagatatactactttatttatagttttctggtttctcatattcctccgggcgaaccttgttaaggggaatattttttatatatagatcgtaaataattttgaagtattatatgctttctttgaaggctaaaaaccttttctaataagtcttctcttttcatattataaacaggaggattgatacgagaatgtgactatactatggagggttatggaccatgtgggcctaacggacgtaacttatgtttagacacattttggaaaaatcctccttctcccggattagcaattagtttagaaggttgcacatgtgaacccagaggtgagacaccaaaattcaaggggctctctcatgtgtgttggtgttgttggagttataactcgactaatccggccggatgattgaagaattagtctcttgagactacatcattgtttgttttgttgttgactttgtgaataaggcgaagttgtacgaattgagccgcgttagattagttaactttgttatctttgctttttgtatttcaatttgttgtaagactaaataaaccaattttaattatcatctaatatataggataattatttcttagaaactaaa

SEQ ID NO: 35557 - DNA, 4606 bp, Arabidopsis thaliana landsberg
  unsure (1)..(4606): unsure at all n locations
cctatttggcgaaatctcaagtcttatcacatctatagacttgagattttcccaaataggctttgaagtgcattggttcgaaaacataaatggtggaaagagatagatggtttttgcacaaagttcgataaatatcaatcttgaaattcaaaaaccaaagatatcgtttccccttaagatcagatctcgaagtcttagataaggaatccataaaacttgttaaaagagtactactcctaaacaaacaactcatgccaaatttaggaaaacggcaataatgaatagacattttgcggccgaaagtttgtaacaaacttaaatccgaattgagttttcccgcgtaaatccgttggaaaacaaagccaaaactcttacgaaaataaacaacatggtaaactttagaaaacagattcaggaatctagaacaggcttgttgctagagatcgtagagaccactggattaagatgaaacttaacaaacatttgcaaacacaaagatgctgatataatctatcgaaaacacaaaccattaacaccatcaatcaaacaaactttaccattcactaatctcagaaaaatggttttaacataaatcaaagcaaaatcacttatctctttcttatacaacactacacaccaaaccaattgatagccaaaaagaagtccataatttttttataatttanggattataaaatcctaaaagttgagaacccatttgtcaaagcaaatttgattaatgacaganactctagaaaagataagacaaggactaggaaacaaaattcaaataaaagcaccgcaaggttcactatactttgtgtgtgatttagacgaagaattaaattttcttagcttcttctatcttcgttttgaattaacgtttaagtaaagataaaaacactctcaacacctttaagatgatgaacatgtagtaaagattagtaaacaaatacgactcttaaggtaaaaaatattaattttatattttccagttatgtttttaattcagtcaaagcactcatcagttcccaatttcatattatgtccatacacaaaatctcaaaacgaaggagaagagaatagaacaagaacgatacctaggtttctccccacaatcaaactgaagcatccaaatttcataagttcaaaaaccataaagtgatacgtatttgacaagaatttcgtacatgcatataaatgacattttatggtaaaaaatttcccctatttcagtgttccatttcaatactcaaaatctatagttggtatttgtagaaattaatcaaatatagttggttttttaatttttctttcaagaatttttttttatatctattaaaattatgtttatgtaatgtaagttatctaactcttttagggcaattatttttttaatgttacatttaaatacttgtgaacaccaattaaagattttgagtatggaattcaaaattgcttacatatatcttccaaagaccaaatgaaaattgcttacacaattacactatcttcaagtctttgagactcggtgatgaagcctcaagtaaaacttcctcgtcctataaaccacactcaaactcaaaaccatagccattagacacaacatggacatgagaccgcacgtgactgaataacacaccgagcccgtgcagacgagcgactcagtctctgtggtgggtccggcttgctttctggcgtagtagtcatagatgttactagcgatcacacctgagaacacaaacgacccaataggcaaagctgtaatctggaaattgtaaagagaaccgaagctcttcaggccaaaaatgtcagagactgaagcaggagcaatcgcccaatgagcgccataacccattcctatcacaatggtcactacgtagatcttccctggccaatctatggcatagtagatgagccccaaagacattatcgcctgaaccacagacattgccaatgttcttggaagtgagagtttccttttgaagaggcagaaagagatgaatctgtcagtaaaaaacacagatgcttcttaaaagcgaaagtgaaatggttaagggttttgtaccttatgattagctcagagaagtagccaccagcaacacggccgagaaaattggagatgctgatcagtgagacaaatattttggtgttgctgtacccgagggaataacaaatctgaccaagattgtctataaccgtgattcccgaacctacacctagaaccagagacataaatataagccagaagtcagcttgtcccaaagcttgtaacaaggtgaaatcttctcctatacaaggcgctcttttcttttccggcggtatgtcacttctctcaattaaagttctagcctcatgctgatccacattggaagttccttcttcaggcttcactgaggtgacattattacccgagatgaaaaccgatgaaaaagggacaagaactggaacaaccatgaaaatgacaaggatggctccagaggttgtgataatcgtttgagtcatatcaaaaacactctgaagtaccaacaatcctagtaaatataccgcaaggacaacacagaaaccgtaaatagccaggaatcttaaatcatcagatcgcaagttcgttctgcaacttctttccacgggtctaacaataaatagtagagcaagaaccacgactggtggtccaagagcaaccatgagaataaccgaagaatcatgagaagggttgaacatcaaataaacctgagtcaagattgctccactcaagccagaaaaccctttcaggattcccaccacaggacctcggctttctgggaagttatgaatgcatgacacaagcgacgctgtattgtagtatgtttccccatttgttcccacgaatatagcaacaaacaactacatgaacaaataaaccagaatcaagcaggatcacactcatatgtaagctttaacatcttttttttttttttttgaatatctggaagttcaagccaaaattagagaatcgtacaaaaaatcaaaagcaaagcacaattactaacgaaatcgcaaatgtgtaagcaattttgatttgtaaaattcatctcaccatccagagaggcaaattaggcaattggccagtgacgacgagccaaccaacaccgtagccgaaaaggttctgagttgcaccgacgagtagaaccacccaggaaggtgagacttcagataaagcaccggagacgaatccgatggcgtcaccgaggtttttagctacgccgagaagagcgatctgtttctgattgtagccaagggaagtcttgattgccggagacatagagccgccgaatagatagccaacgccggcgacggattggatccacatggcgcagacgaaaactagccatcggtcgttgactaggagctctagtttgtgacgccacaaagtcatcatagtcaaacgctctcaaaactttctatttctttttttttttcgttgattcatatgattacttattttgtaattttcagtttcaaagaaaagtttggacaacaccgtaaatacaaataaaatgtttacttatttatatacaattcatgtgtaaggttgaaaaacaaataaacaacaagattaaaaaaaacaacaaacacgaatcaatgaagaggtatacacttcacaagcttaggtttaaaaattggtttgcaaaagcattcacttttgtatctccccaaaatgaatctgttagtttgagttgcgcttaaggtacaccaaaactccaagtccagcagcaagagcagccccggctgcaaccgttttgtaagctgctgcccatgagtttgactggtcgtagtccatatcctctgaacttagacctctcctgtgccctctttcttctgtgtagtccaaatgcaattttaaaccctgcaccatttggaatccccaacccaaatacactcttctttacaccaaatccacattaaccaaaacgaaaccgaaccgcggatttaaggtattatttcatcctagttctttacactaattgacgataagtatggatgtacaagttattataccttccagcctattgattttgcatgttctacagcagctccaagatcattatctgaagctaaaacgactttgtcattgtcttcatctttttacttctacaacacaaaatatgtcaacaaaaggggcagagttttcctatcttctcatttaataagttttcgaataaatatgtaccattatctgaggcaagttatcaggctcaatgtcatcccccattctttgtaggattgctgttatcagagttgtcaaactctgtgtttctgttattgaaaagtaaaaacaaaaggttaatggactaagcagcattggcataataggtgtcctgtttctcaagagttatgatttaacgtaccacacataaatctatgcattcgtccctttttatcttggagtttaaaagcaaatgtgttgggatatgaaaatgattttgttacttctctctccgaagataatttcatcgactcttcttcactgaaaaatcatatgatccaagtttagaaaccaccttatggtcaaaactaaatggttcaaaggaacatgagtagaaacctcctcgtttcatcgccatct

SEQ ID NO: 35558 - DNA, 2284 bp, Arabidopsis thaliana landsberg
tgctctcagccatcattccatcaatgctctgccaactagagtttgttcaaactcttacaaacttctctacttgactaatataattatgcatttaaaagttcaccgtaccgttttccatttatatctctcctttttgatagtctcattcgcatatgatacacttgacttgaaacctcccaaaaaaaaagggtacaaagtgtagcttctatatgaccgatggtacataacagactttcgactaccatgcacttaactaggatccaaatccctctcccgtagcctatttcacaatatatcagtgaatgtttttttaaggtgttcaaaacaaagttgctatacttgataaatcgatcattgttttattttgtgtgttgccaggtcaacttcacgtaaacaaacaataaatatcgaaaacagataaaagttattaacttgtactataccatcaagaaatgaataaaaattataattgaaggtcactccatcgtaaattaaggaaaacgtaaaaatgaataaagagagtgcaatgtccacaccgaatgaaatgaaagaaattatatgttttaaaatttcgagaaatatactatgtatggttgatatatatataatcggtatcaaaaatatatatattttttaagtaaactctataaagagatgataagagtttcgatcagatatttccgattgcatagaatgaacaggctcggtttattctttgagcagggccaaaactaatgtaattaagtaagattcaacctaaacaaattaaagttgaaatcgtaacttagcagtttcatctcttttttcttgactaacaagtttcgagctttcaattcagaatttatctaattctgaaattagtatttgtgccgtacgtattacgtagcatagatcatgtttgttttgaagttattcggacaattagcaaccaacaatacatttcttcattcaaaatagtaagtcagacttattttgatctccaattcgaatatggaccgtaaaaaggaatatgaatttacaggaaacggttttaatgattgaacttgtgtgctttaggaattaggcatctatatattataacatcggtactaaaaggcctaaaaacatatcatgtgattcagtgagtgtctagtttttttaaaaaagtgtcaccttcatttataaatctcgaaagttagttatatgatcgcaaaacaatccacgaccccctcacctctatttctcacttcacgtggaacaaggtcccatgtcccattatttcttcttttctagttcataaagttcatcataatctatctgttccacacacacaaatatattgattgatttgtctactccaaattcgcaagaaaacgtgaataaatttgagaaatcacagaattatttgatattttgtaaattaactaattattgatatagaagaacaaattaatacaatggactaatgtcatagagcaattttttttttgctaaacttcaggatttaactcattcttcttcttgttcaagtggttgctgattctgaaatctcttcttcaataacttaggtcttggtttcataggcttcaagtacttagattgaaatctaaccatctctttcaaaacactaatcagcttcctctctatttcttcaccgtcaggttcaatagctcctaagcaccgtgccacagcctccgccgtagttacacatcctccgaatggttccttgcttagcacaagctctgaatcgtagaagggttcctccactcactgatgcgtctatttccgtatccaaacacactctaaccgctcctgcttctcttaacaccacctcgctagctttgaccatctccttcgcgtgtttccacgtcgcgtcgaatacgattagtctcagcggcgggggatttgagatctcacgatggtttaagaggtttagggatttgaattcggatatagtgacggcgggagaggaaggagaagaagggaagaggtagattgttggcggtgctgggagtgcggttcctccggcggtggagatgtgacggcggaggagacggcgggcggggattctggtgacgtttagtaaggatttggtaaggagaggagtggtgttgagcttgtgggcgtgactcgtgtggatggtggaggatgatgatttctgtattcgtcggaattagatccgctggtaagacgtggcagagacaaatcgcatttgggcgatcgcagttgtcgcagatctgccggcgatgatgcgcgtcttgctcgtcctccatcgtcactgctctgtcacgcgagcattccaaca

SEQ ID NO: 35559 - DNA, 3524 bp, Arabidopsis thaliana landsberg
  unsure (1)..(3524): unsure at all n locations
attcatgttaagacaaagaagattgacagaaagctgcagatcttggcggatctcctaatgcttccgagagcttcatccaaatgcaaagtccaggtcaagtttgtttgaacaaacaagtgtttgttgcctcaacatgagaactgttagagaaatggtgcaaataaagcacatgttagagaaattgccaagtcttgagcttttggaagttcagcttaagccaataataagagctgacacaaagnnnnnnnnnnnnnnnnnnnnnnnnnnnnnnnnnnnnnattcatctaaatgcaaccttcgtatcaagccctcttgaacaaaatcttaacatatcccatttattgacatgagagaattggtttgtttttgtatcacactcttaaatctttgcataagctcagaatctagtttgtgaagattgtgagagaagtaatcttaaaaagatcaaacttttgtttacataagcttggcgtttttcttatctctaactggatttttcgagtgtgtaagggagagctaagcccatcagctgaattaaggctattataaagcccacgagccaacttcccaactcagtcttgtgttttgtaatttaaaatcgtgtcaataaaatgatgtaatcgtcacgtcatcatttaagttttaaccaaagagagccgcatataaacaacaatctggtagactttcgttatagttaatggtcgttttataattacgcttatgaattgtgtgttagacgttgctttcgtgaggaaattttcaaattcagaaatatataatattcagttaattaacacttagcaatagtatttgatatattttctgaggaggcatcttggtggaatattccatccgtgaacagacggagaaacttccctcaacaaaacgtgcttcccttataaaattccagctggcggcgtcacagctggcgtcagtttcccccagttgcgttttaaaaaaaaacaaaataaaaagatttatgaccaaaagttaattatcttcctttattaaaatattgtaaaaataaagaaaaaggcttaggacagctcatcaccatcttctcctttaaaaggataagcttggtgttactttatcgccttctttcgtttggcctttgatcctatcataagctttttttcgtttatcaatcttctcgattcagccacaattcttgtttctcagataattcatttcctttctttgatccgtttccttctgctctgttcgcagttctagatctagatctaggtttttcttttctcatcggaaatttggcttataggcttgttttgatctagggtttggtttttgggaattttgaaaaaaaaacaaaattaggaatgaatctatgagctactcaatcctgtttcgtcggattcgaattctacactccttctccgtcgtttacctctactacacctacgttttctcatgaagtaatcgttctcgatctcagttttcgtttttgatctaacttattctttgatagatttagaaatcggggattttcagattgtgtctttgaggggtttttataggaaaatatctctagaagaagaagaagaagaatattatattgattttaattttggtgagaagaagtcaaaaagtcaacgagaaatggggtcgttgcaaatgcaaacaagtcctgaatccgataatgatccgaggtacgccacggtgacggatgagaggaagaggaagagaatgatctctaacagagaatctgctcgcaggtcaaggatgaggaaacagaagcaacttggtgatttgatcaacgaagtcactcttctcaagaatgataacgctaaaatcaccgaacaggttgatgaagcttcaaagaaatacattgaaatggagtctaagaacaatgttttgagagcacacgcttcggagttgacggataggttgagatcattgaactctgtgcttgagatggttgaagagattagtggtcaggctttggatattcctgagattcctgaatctatgcagaacccttggcagatgccttgtccaatgcaaccaatcagagcttctgctgatatgtttgattgctgaagatggatgattcatatctgaaggatcaaaaatgaagcattgagatcgagtctttggtctgttttacttactgtccttgttgtaacaattagtgtgtcattggtgaattgagtcttgtgttgtcaatggacaacgcaatctttatgcaatttcaatttgttcgtgtctttgtatggttttgtagcctcagtcctctagtcttgtgtctcatgtaattggtgtctaatgtgtttcttattgaattcaagctttcttattattcgctgtgcattacctgttatgaaattttggcttttgtattcgtttatggaactacaaattacaaatgtttttagagctaattcagattcaaagacatgatttatataacctgacattaccaaatggaccggaacaaagatttgtcatatacgtatgaatccggaacaggatcttgatcgcttcagttgtcgtaagtacggcactcgttggtctcaggattgtctttgcagtattcctccaaagggtccgaaccatcagctttcttcttgtctctagcatggctagctgcagcgctaagttcttcaacctcgtcccacgcagctacacactctccactcacaggatcgtccgcacaagtctcctgagcttccttaatgcttttctccactacatccgatatccctccttccggtgctgctctaatcggcttaagcttcatcatccggttggttgttcttgactcaagattccacgaattgttcaaatggaccggaccggcgagacaaactggccgattctcgctggtgacgaagacacgctgggttgcaatgttaagaccagtagctatagttgccatctttggatggagaaggtacacggcagcctgtgaatatagtttttgataaaagaagatagttcagataattgggagggaacaagatatatgaagtgtgcgtgaatttaattctgtgaaccccatttcttatcctctattaaccaacaattaagttccacgtatttgatatcgtttatgaagcagtacgatgttgaaaatttgcagccatccaagccgttttctaagatacaagtgcctgttgcgtattttatccaaaaaagatgagaaaaaataagctggtaagtataataaaatgatcacacactgtttaaggaaaagtcaagacagatgtctcaagtttcaaccactgtatctccggaaaacaatgtgttaacaaatatccaattttgatgtctgagtggttgtttatttctcaagcaaccaacttcttaggtaacttatctgagatctcaagaaaccataaaaacagaaaaatcgagccaacaacattgagagtgagagagaggcattcccattcactcttcagaggcgacaacaccgatctcacctctctcaagcaaatcatagaaagttctagttttcctctgctcaatccaatggtgcatcttccagaggccaccagcag

SEQ ID NO: 35560 - DNA, 2285 bp, Arabidopsis thaliana landsberg
attatatttgctattcgagaaaaataaaatacttaatcaaatcatgaaacaaatcatttgataatcctgtaaaacacgaaaataaagaattagaaagcatagcgtagtcaccttcttaatttgacttgtacgttagaacttagaaacacgcggattttaattaaaaaagtacttaggagaagaaacacaattaattaattttaaaagcaaatatatgtaatttaaaaaaattaaatatattgcaaaatagcttttaatgatcgaaaagagccagagagactttgctataaaaacccctcctctgcctctctcaatccctgccccacacctttctctctcttagcatactctgctcttcctctctctgttgttctctgttccaaggctttgaggtaaataaaaaaaactactatagtcttcttcttcaacgcctttccgtttccttgttctgtttatcaacattttttcggttctatgttttgcttacgaacttcatgccgttttggattcttgcgtcttagatttttttcttttggcccaccattttcaccgtgaacatcgtcgtcaattcactaattttacgtacatttatctaaatttgtttgtgatggtttttaattttatttttatagttaaacttgatttcgttaaaactaatttttttaaaagtcttgttaactccttaaaaatagattaccaagttgaaatatttctcatgccaaacattgaaccggatccataaccgatcagagctaaggttttttaaattaaataaaaattaagtcaaacgggtcaaataatggtcataactcggtaattaccggtttaattttgaatactccctcagtaatacaaccttctgtttttttgagagaccaattcatcattgtagtaacatagtacacaattaaatttttgttgtccatacacgtgttatatgcatacaagatacatacatacgtacgtatataatacgtatattattcatcttttgtctgtacatgcatgattgcatgtagtactaaaaattattaggagcctattagtggttgaaattcgctgaatctctcagttcacgtttaacaaaaatcttatccccactttttttgggacatagcaactttgtgtccattcattacacaaaactatttctgttttttttttacaaatctaatctgaaaaaaatccaaatcggtccttattatccatgcaaaatctctgtgaaatatcagaattaaaaccctaaaaagaaacacaaatatttaagattttcttccctgatcaaatcaattgtttcagaaaaaatggagttcgagaaccggtacggacttgcaacgtcgcagaagtacgactgtctcttgttcggtacgcacctaaccggaataaaccaattacttttgattaatgtacacgaatattttcttgaccggtttagtaaatttctctttagatttggacgatactctttatcctcttagctccggaatcgcaagagaatgtgggaacaacatcaaaggtcataatatttctttttttgtctttccgcaatcgattatcgactaacaattcattcttaaattagttttttgtcttttcggttaaatagattacatgaccgagaaactcggtataccgaaggacaaaatcgtcgaattgtctgatcttctatacaagaactatggaacaacaatggctggtcttagggtacgtgatcaatatcatctctaaacttccattatttattcttactaattatttttgtaacattttctcgttctctaggcgatcggatatgaatttgactacgatgagtaccacagcttcgtccacggtcgtttaccctatgacaacataaaacccgaccttgttcttcgcagcctcttgcttagccctgagagatcccctcataatttccccaaagcgtaaccatgtgtgaataaattttgagctagtagggttgcagccacgagtaagtcttcccttgttattgtgtagccagaatgccgcaaaacttccatgcctaagcgaactgttgagagtacgtttcgatctctgactgtgttagcctggaagtgcttgtcccaaccttgtttctgagcatgaacgcccgcaagccaacatgttagctgaagcatcagggcgattagcagcatgatatcaaaacgctctgagctgctcgttcggctatggcgcaagcctagtccgtaggcaggacttcttcagtctccgaaggtttcttcaatctgcattccctccgaatagatattaacaagttgttagggtgt

SEQ ID NO: 35561 - DNA, 6588 bp, Arabidopsis thaliana landsberg
  unsure (1)..(6588): unsure at all n locations
gaataagagaatatttagacggagtgttttaatatagagatcaatttccgaatacctaaataattattttgatagtatttagggttgattcgattggtatgatagagataaatacttaaacgcagtgttttaatatagagaacaattaccgaatactatttccttaatttcctttattcggaatccatggaaacctatccactagtgacaaatccattcctaaaaagtaaaattatggtttcaagtatacaaatccactagtggcaaatccatgaatattgaagtagtccataaatacaaatccacaaaatcatacataatacaaaccgtaggaaatgatggtctaacatttttttcgttattgattaagagcttgacacaaagcgaatttccaacaaactgaaaattaatctaacacaaagcacggatcttaaaaaaataagtgaggacaaagcactcggggcaaacatccaaactcccaaaatatagtaaatgacaatctaggatagagttcaaaatcctgtaccctcggtatagttgctgtcctgttggagccatgtcttgtatctgagtcatgacctgctcggcgcaattaacagcttcctggaaattactaaacatctccaaatactttttaagtattattctaccatcctctggattaacgcaaaaaacataaaaaataccaaaagcaaaataagaatgtaagtaatgaactgcagcttcgccaagcatattcagagcttgaacagaggggccaactagagcagctagtcgtaagccttcgatgtatttggccgtgttgttgccagactgtaaacacctaagcaaaaatggctagtagggcgacccttcgatgcataaagaggaaaccgtaataaactcatcaagaccaacctcctttaaaacttcatcagaaaatacaatagatacccattcaggtccaacaacgattaatggacctagattacggaaaccagatattccaattcgacgaactatgtctgaaaccaatggaaaaggaatgtaagaagacatgtcagaggacaaatggaaaattataattattttgagagtatttaggattattttgattggtatgatggagataaatacttagacgcaatgttttaatatagaggataagtaccgaatactaattccctaatttcccttattcggaatccactacaaaaaaagtcttcatcgttagcgcaaaccatctgctatcgtatgtaatacacagcgaattcacaaatgctatgtttgcggcagctatagtaggtgtcacccctatgacagcatcgttttgtacgctatggtatattttgctacgatagcaacgatataacgccattatagagttttgatataacactttaatttcttgttataaattactaatctttctaatttcgtgtcataataccctcacctaacaggacaactaattattgctctctaatataagttttgtagctttgtgttttatgctatcatatataattttttgacaatgacatcgaagaattgctatagtaaacagaattagtgcgtttaattatgctgtaatataatctactatagttgaaaacaacaaccaatttttgctataatatccaatctcaaagaactatcttttgtgattaattctaaacctgttttgcataacataaacatacaacataacataagtcttaatagttgttatattataaataagtctgattccaatccaagagacaccattcaaaagttaaacataatcatccaaaacaagtttaagcaaagccaaatacataacaacataagtctgattccaaatttcataacagaagtagattagtctagtcttaacctaataagaaaactagctaatctggaccatagattcttcactccctgcaataatcaacaatgtctcatatcagttcctgcataaaaccaaagcacaagcatcacaacaatttcaaaacttaccctagattctgcaaagtcagtaggtcacaaacttatcctttggccatgcaattgatgaaccaagtgaatctctcatatactcgatttcatctgatggcatccagactgctgaatcatctacattcactacatctacccaaactctagctgcattctctcccaaaggaacatggtgtaccttttgatctgggtcgattgaatgcactcgtcgtgcaccaaccacccgcttctttccacttatatccattaacttgcacttctgattagccttcaaaccttcagatgttttttggcgctgacatgttacattataaaccaggattaaacgcatgtagaaattttattagtcaatatgtcaaaccaaatacaaacttaccggagatctccgtagaggggtttgtgatgctagctgagttttcttcacaagagactttggaactactgttggttgcttctcaccaagagattttgcaattgttcctgcagattctgaacccttggctgcagatacctgaatagaagaattatgacctgactttccttttgttgctccattttgttgcttctcaccaagagatttctctgttgctccattttgttgacttgttgctgctgactttccttttgaggctgatgctgttggataagttgattgagaactctgaagaggagctttctgaattgctgaatctgtggtgttttcataggaaactttgtgggcaggccatgctacaaaagactgtaaacagtcctcaaggtatgtcacatccatcgttggcctccatatgaacgtctcaggttgaagtattacatccacaaatactttcactgcagcaggtccgagaggaagcccattaactaatgcagattggtcttttgtctgccaacgtnnnnnnnnnnnnnnnnnnnnnnnntaagacaaatccagtagtttgcacttgtttccataagtgggtcttggtccctgtcaaacacattaaaccaatgtcttagtatgactctgaatatattagtatgactctcaatatataacattttacctgtgcaatgtcgtctggattgagcttctcctctaggctaacacacatagcaacaggccaagctatcatctgaccaacaactttctccataatttccatgataactgcgggtctccaaaggtatgcttctggtacaatcgcagtgtcaatcaatactttaacatctgtaggacctaagcgacttccattgactatctcatccgaatcagaagatataatacaaccctcagcaacggttgcatcagtaccagcccaatccatcaagatacacttaggttgtgatctttggttcacactctgtataaggaatcaataggctattatcatctaattatgtatcaagaggtcaaaagtatcaaataaaagtgacttactcttgcagttgaggtttcaccaacttcagctgattgtctctgtaccaaaaaaaaaacaaagtcaaatatatgtactaaccgattgattagctttatgtataagtagacaagtttttacatggttctttatcttgtcaattacttcttgtaactcattgaccttctgctggagctggtcctgtttctgttgcatttcagccatacatttgctttttacttggaaacaagctagtttggtcttgttcatatttcttcccatcgcccttagtctaccaggattgtcaggccctaagagttggctaagtgaatcttgtgcttcattcgtcccatttgattgaggaccactgctaacaatctcaactgcctttttctgcaaaccatcacacacaatcacaaaccagtccacacaatcactggctaagttctggatttattgcctatcacattcatttcaaaaccatcacaaaccagtccaagttctgttccatcactaacctatccaatttaacaaaccatcactaacctaacaatcatcacaaaccaaactgtcacaacttccaaactataacatactcacaattttttcagccgcatttgtattcactggtgttccatctttcttggtccgtgacttaacccaaacctttaccctcgtcacttcagttgggtctgcactaccacttttctgaaaaacacaacatgccaatattagtagcaagctaagtgttttaaaatttcaaagcaataaaaaacataacctaacaggcacataagattaccatatcttctgcaattctaaccatccctctgcgactacaagtgtgaggaatctggttgcgccttctctccttatagctatcgcttataacctaacaatgattgttaattagtaactttctacatagtaaatatacttagttaaaacaactccctcaacataccttaaattcagggttagttttgctcttcacaaattttctccactcaaatggagaaacatttttaggtctcagattcatcctctgctggtttgtctttgcttctctaaagttagttacttgccttgatttccaggatctccacaaacatcccatttgcttaagcactgcaaccttttgatactcctcatctagttcaaaccttgccttcaatcaattacagaaaaagtgattattgctgtgataaggaaagatagtcaaatattacaaaaaaataaaaagtgaagtgttacctggacagatttccagagaagtgtcctgatttcttcacctatttttgtccagcgatcaattgtgatagggacgtgttcacggaccaatgcgcctgcatatgatgctaacttaactgagcctttaccaataggctctcccatcatggtgtactccactctcactctggcatttggatccttagcaatatctttcatcctagttggtccacgctgcctcttggtcttaggttgaacagcatcttcatctccagataattcaagctcgccttcaggttcttcagctgcttgcacttcagcttcgttttctgtctctccattaatgtcttcagcttcgttttctgtctctccattgatgtcttcatcagcttctttttctgtctctccattgatgtgttcagcttctttttctgtctctccatcgatgtcttcaacttctttttctgtctctccatcgatgtcttcaacttcctcaatgttttctgctggaacaacagtttgttctacagctgttggctcaattgtacccacatactccacctgatcattgcatttcttagcagcagcttttttaggttgtcttccacgcttttttttctgttgtcccattgtaaatcacctgagaaaaaaggataaaattaaatcagcactcaaagcagacacacaattaacactaaaaacagacagacaatcaacaaattaaacacaacagacagacaatcgacaaacacaacagacatacaatcaacaaacacaacagacagacaatcaacactcaaagttaaaacaaagttctacatttcaaacataaatcccttcacaatcacttctctcattctctgctacttccaagtcaacatcgatgtcaactgttgttggcaatggcccaatcgctgcaactgaatctacaaactctttctgactgaatcttcttgaagaacctctcaatgcaacataccaaggtgacgagccatcttctcttaggtaaaaaacctgttttgcttgagaggctagtatgtacggacccctcaaaaatgagacttgactatgattcaggtttacaagtgtaaaaccatcctcttgcttcactccattgccttttactgcccagttgcaccggaacaatggaacgtaaaagacattataatccagcaagataatatcagtaatacagccatagtatgaaaccaaatcgaccacttgagatgtgtcttttgctctagacctacagatagcagttgcctcatagtacacaccactgttcagagttttcttatccactgttcttgtatgaaatcgctgcccattcactatataaccagaatatgtccttgcacaactccgtggaccataagctaaccatttaagtgtttcttcatgtctgtttgaatcaagaggtatctaacaaatttaaaaagaaaatgtcagacacctatatgcttactgataaagtatagtgttccagtgtcaagtgtgagagataaacatgcctgttttttaagccatgaagcaaaattctgagtgtgcatactccataacagtgatgcatcacgtctgcatcttacatttgagtcttgtagatgttccaggtgctcactaatacaaggagaaataagaagtagttagagacagccatatggataagtaaaatatatatagctaagtaaaatgaacatgctgactggaacttactcaacataagattcaaagactgccatattctggatgacaaccatatgggctatttttgtctccatttcagtaagattaatataagagcctgctgagattggaggcccctcaagtataaagttgctctcatactaagtaattctatcaacactttcctgaacatttgttgtcttcttcaaaaattcactaaaaactgtatgcattcttcagctaaataacaaaatccttcagaaaattcataaatctttcaaacggatacatccagctaaaatga

SEQ ID NO: 35562 - DNA, 1889 bp, Arabidopsis thaliana landsberg
  unsure (1)..(1889): unsure at all n locations
ggtcttgtcatcgaagaaggattcatacatgactttgctagttcaacagctttccaaacagaaccagaattatgatctccaaggagatttggatcagtaatacttttgatgtctcctttcgtaagcattcctcccacccattctgctatatgtctcttttcgcggttttggtctatcacgggttggtttgtaataatcaccaataatacaactccaaaactatacacatcacttttctccgtcaaccaattcgttcggtaatatctataaaatagttcaaagtgcaagaatattacgtaatcattggagacaaaatatctacaaaatatatttttttattgaagaagtaatacttactcgggatcgaggtaaccaatagttccagcaacaactgtagatacatgagtttccccttctattgggaatgatctcgaaagcccaaaatcagcaagtttggtatcgaaatgttcattcaacaatatatttgtgggtttaacatctctatgaaccattaggggtgtgcatccattatgcaagtactctaatcctatgaaaatattattttcacaaagtttcagtcagtcaaagcaaaagaaacaaagaaagaatatgatttggttaggtatttgagaaatcaatacgaaccttgtgcagcctcgagagctatctttagccttgttccccaatttaatatagaaccacctcgttttcctatgtattgttaaaaaaaaaactaatgtgtgttagattcttacattcaatagacaaatattcaaaattatatccaaaaaaataactaatgagtgaattgtaaatgacaaaaaaatatattattctgagttattatttgtttctttttcttaaagagttaccatttggtatgttatagtttcaccatgatgtgttgttatgaaaaccaaatatgttgcctttctagtaaaaacaaatattatgtttacctgacatatgctcatctaagtctccattggccatgtattcgtagatgagagccaatttatctccttcttcgcaatacccaacaaggcctaccaaattcttgtgatgtactctaagaagaagttcaacctaacgtaccataatgatacaccaaattagctttgaaaaaaactctggaatgttaattcacacaaaatttcattatgagttgtggtatgaatacctcagctttaaattgcttatatccttgagctgatgaatgggaaagcattttaacagcaacctgctctgtaccgtttactgaaccataatatacaattccaaatcctccttttccaaggattttttggaaattgtttgtcatggttaaaacctccgcatacgtaaattttttattcttcgtcactattgtcggttcagatgatctactatccgcgggtacatacatgatgttggagctaaagttgtgatgaaaacattcaatgaaactatgtaagtttaatgtgtgtgtattcataagtatcttgatcgatgaatataatgtgaataccttcatcgtttgacgggttattctttcgaacaacacaaaatatcatcaatgcaactgtgaaggcaacaacagaaccaattgatgccacaattgggattgtcatgctctttttctgtcgtccaccctcttcatctttgtttacacatgactccactgtgcaattaagcttcggattgccttcaatgctttggattgcaagtcaagaaaaaattagtttatcataaaaaaacatgttagtatcaaacaaatacaatatacaaattcttacttcaatttcaacattttcttctctataaagctttgaggaactacaccactgagatngttcccacttaagtttcttgttagatagagacatagatcaagcacaaggatcaagggc

SEQ ID NO: 35563 - DNA, 2872 bp, Arabidopsis thaliana landsberg
attcttatgaattcatgtagatagccaatatgatagttgattcctaactattccttttaaatgtaaataaattgatctatctttgaagatagagaaagataattaattttaacaagtataaacaactaggtgacactaacaacaaatatttataattcaacacactgaaatttatgagcgatatatagactaaaataaaggtaaatgaaaataaaacttccaaatggcaatattataatgaaaaacaaattttcaaactttttaaaaatttttttaacactatagccatagtaacatcaaaattctctacaatcaatcgtttatagtaaaaatctttgagaatattacattatagggcacttttataaaacatattacacgtttaggaactttctaaaaagtaggcactttgtataaataaatttagctatttaccctttaactatttctctttccttataatctttgtctctctcctagtttctcttctctctctctttctctcccttttcgacaaacacaaaatcactctctcctcatttctcttctctctctctttctctctctttggcgacgaatacaaaatcaagcggaagataatggattcactaccatcacgacttgggttaatgatattttccatagattttttgctttgtatgtggttacttgcgtaatttaagatcatgggttttgcccaaacttcattcattattcaattttatgagtttcgtagctctgaaaccttaattgaagcttttatttttcttccaattctttacttgctagatcttagaattttagagacttaaaatacagagaacaaataaccatatgattcaaacaatgaccatatggattgcaccgcacggacaaacatctgtggataatattgtctttgtttactactaatatgttttatcactggataaaatattctatgtatagggtatggatccattttataatgatggttgtgtccatacacaagtgaatattggtcaaagaaaaatggacggtgtacttttaactgatgattatcgtgtgtattggtatgaaatgattatgtgagttactagatgaccacttggactagagtgcttggacacttatcaatggacaactatgtttcaaatgtgagttattagatgaccatttggacttgaatgcttggacactcatcaatggacaactatgcctcagatgaagttacatcgacaatggcctttttgctgctactcgcgttctcaacatcacgaaccgtttcaagcccagattgcttagaaggtaactgatcatgcatggttaacatcctcacttttcattataatcgatgacagagattccttaatcaaggagagaaataaatggaaccaaatcaaataattgttgagagacagggaagatgatgataaatcatatgaaattgggtttttagttttgatttggaatattgagattcccgtaaaaaattggttttgattttggaaagagagagaaataaagacgatggagaaaagagttgagagagaaaatgaggagaaagcgttgtggttcagagggcaatttgggaattttgatttggtaaagtgccttctcctttcaaagtgcctatttgtggctaaagtttcaaaatagtgcctctacgtgtaatattctcaaatttaaaatcgtctaattctcaattagatgttttaagtgatagacattggatcacagcccaataagtatctagagaattttttgaacactggcttataaagttattgattttcgatatgttaactaattcgaaataactagttccagccaaaaaaagttactggtttatggaaagggacattttaaaaattttgtgctcatagtaaaaaaatattatgtgcttctgttatatagttatgcgtaggtgcaaggcatatacttgctatttttcaggtatttataactcgtcttggcccgaacaagtaattgaaattgaagtttgatatttgacttgtttgagtaagtacttgctataacaaatacctgtccaaaattttgttacttgcaagtaagttaacctagtttgttatttggaagataacaaaactcggcttgttacttgcaaagtaccttagtagaaacaaatcaacaatctcatttatattacaaaacattcatagatattattttggatcaaaatctatacattatcaaatcaaaattcaaaagagaaataagtaagcattaagtaacattgtaacaacaaatcacaaatacaaataacgaataacggggcaaatatcaaaacgaagcaagtaacttggcaaatatcaacaaatattgtaatacttgatacttgacttgggcttagaaataataaaattaaccgacttgttatccgctttatctctagagggtacttaaattttcgagacagatacgagtctagtaacgagtaattgccgaacaatgcgtacttgtgcccataccttattttagtcatattgtatattatctatttagtctccgcctcgttattccaagtctttgattatataataatagagtaaagtctctgcctcgtgattctcaagtctccgactatatcaaacagagccaccaagaacaaactaagaagaagagtaacaatggagatcaataacgagaagaagaaactctcaagacaatcttcttccttgagactacgaagtccaagtctaaacgctcttcgtctccaccgactctttgacctattcgacataaacaacgatggattcataaccgtcgaagaactaagtcaagcactctcaagactcggtctcgacgctgatttcttcgatctcaagtcaacagttgattctttcatcaaaccggacaaaaccggactccg

SEQ ID NO: 35564 - DNA, 2306 bp, Arabidopsis thaliana landsberg
actaaatgttatacttttctattataattgtatatataattaggaacggagatattggtaatctaattactatattaatacatcacatgcattacaaaaagaagtattgtgggaaagagatagatccgtacagaaataatgagggaggtgtgggcatgtgtttcaccatgatgagtgaacgtgctgcggtggagttagaaacctttttgtcttctctgtctcttttcgactgtgttgtgtcgtccaaacaattatatacatgtcaaatgaatatgtttagtagacaatagtaatatttatgttaggaacatggatcggtgtgtgttatggatgacaagatcttgaccacgtactgataaaaatcgaccaaattatatttatgcaaagcagatttaatgttcatgaatcatgaggcaattgaaattaaacaaaaaaaagtatatttaatatgtttgcaaggtagtaagctaagctcaaagaatattgttgatgacttacaactttgtaatagtcaaaatagacactaatttcttactattattctagtctataaatttttggaacaacatgtagtggttaaagcacattctttctaacgaatacatgagattataactactaaacttcatgactacaatcacatcaaagccttttggctttcggtgctatagttcaacttatcttaagcaacacaagtttcaggaagggtctcccgcttatgtgtttttcggatatatgcattgtgttgtttgagataaaagatcttatgttgattcaagaaatcacacagtaaatttgttgaaaggggaaaaacaaattcacttaactctctttctattagattgatcaaggactcgataaaaagaaggaatatgattctgtagctgtaaagctttatggaaatcatcctgataaaaagaaggaagagataactagaattttatagctaaagcttaattattcgatttgattcattcatgattctccatttcgaagtttttttcatttgtatcacaaatatagaaaattttacaagcaagtccatgattgtccatatgcttgttataaatatgtcggtgtagttggacttctccatctcctacataatcaaggcatgcatgaatagagttgcataaattcataagcacaacgagattctaaatagaaactgagcagcaattgacacaactctttggtcctttgctatgtgtcacaatttatgtgggactcaactatatagttaagatggtttatgagatttttgggttacatgtaaagctagtcagacagtgaagactgtctacttgtcctcatttttattgttgttacattagaaccggctaaacgaatcatttcatcgccataaaagcttcttaaaaattcaaaaccaaggatattcaaattgacatcctttgttcctctcaagtttggaggctgggaaagtcaatggtttctcgagtggtccttcacttaatctgcaaaaagaagatagattgatattaaatagtttcctattgatcacgaagaagtattatggtaagttcttccgcttaatgtttacccgcattcggttactactctgtgtcaccacatcagtgcctccacattcttcaccgtgttcattctcatcaaacatattgccatcatcagtttcataaacatgtggaagagtgttaggcttaccaagttggttttgaggcaatgaacactccttcaagagacgtataccccatcctttgaatttgaatgtatgaatattccaattattaaacacgctcgtacttaaatgaatctgcatatccacgtgatcatagttgacttgagctataggagcattatctttgggtagaagtatacgacattcgaatatcaacagatgactatccttcgttactgtcgagaaatacgcttgatcaccaaaggagtcaatgctattcccaaatcttcctctgaactgacagtttacatggatctgtactccgttataatcttctgtagaactaactaccgcacaagccctaaatttgaagaattgttgagacatcgaggtgtgaagtagagggatattggtcaaagatatttcagtagttcggtgagtgaaatatgaaggaacttcttcacctgacagcaccatggacctgaagaattctgatcgttgctgaaggagagcttcttgatccaagttgaagcaattggtgaatctgaactcgacctgcggaaaattatacagaaataatctgatttcatcagggattgttggaaaattttccgaaaataatcggatagatcctgccattgccattgcg

SEQ ID NO: 35565 - DNA, 2033 bp, Arabidopsis thaliana landsberg
tctaaagctatcgtagagtcccctaacgtagcatggggaatgaattattacataatataataacaaattaatacgcatcaagacacaacatttccgtaatgctataatagaattgtttaacatagcatacatatctgacgctattttatatggggtacttacgataacaggggcatagaataccgtttatgaaatcgctattaatgacgtaacatagcgtttctctcgtgataagaatgtggatttttttttgtagtgtaccacaagcaactgaatcattcaaaatgatatgttatcaacttctacattaagtcttgtagaaagaatgcggcgacgtaaaaggcaacaaccatcacaaggtaataatgctgaacttgaaaaatatttatctactaattttgagtttagtgatgcagatgcatcatgtaataactttcaaatcattcattggtggaagagtcaccaatctcaatatccaattttagccatgatcgcaaaagacgttctttcttcacccgtttctacattttccgtcgagcgagcttttagcatgggaggttaaatactagatgaaactcgatcaagaatgagtccagattctcttgaagctcaagcatgtcttgacgattggaccagagccggatatagacaacaagaattcattcgagagaatgaagaagaattagaagatattgatagtgatgtattatcaacaatatcagaagatagtgattaaagtttttttttattacttgttttagttagcttaataaacattgttataattaataaatatgaattttttggttacttcatttttctaattacataattatttcactcaaatagtaccttaatcatttcgtagtttatttatttgttgtaaaaaatagtatatataattattctttataaaagttaaaaaaaatataatattttgtctcatatattaactatatcataattatcaaataactgtaaccgaatttaaccataaccgtatttaaccgtaaccgtatttaactgtaaccgtttcaaccaaagttaagattaaaaaaagattataaccgtaaccggtggttaataaaccgtaaccgtaataaccgtagatgtggtcatacataattaccaagtaaaagtagcaataaatctgtaatataaaatggatctagtaaaattccacaaacatctaaactacctgtaacagtcagatacttgtcttgtttcccattgtagacaaagagtttgagtacaaaattgatactaccatcgtatgtaagatgatctgtctcttcggacctcaagtaaagtgagatatgattacttccaccatcgttttgattaccattcacgtacaaaatcaatctcctgatttatttttattttaacatcaaaataaactcaaatatatatatcaaatgtaaaatatttagttctttaccatttgtaacttaaaagagcctcaaaaacagcggattcgtagggttcttctctccctttaatctcggagaaatttgttattgtcagtatcctatctgatggtggctcatctcttaacgttcttgtcactaaagtaaaaagtaaaaaaaaaaaaaattaaaatcaagaaaatggttttggtttttaaccaagaacctcattctatttaccaccttctggcccatgatttccgccacctgtctctgagccataaccacgaccgtcgcctccgcccccataaccaggaccatgacctcctccgccgccataacctggaccaggacctcctccgccgtaaaaaaaaccaggaccaggatcaggacctctgctgccgatgcacataaccaggaccatgaactcttgggcggccgccataaccaggaccaggacctcccccacggccgccaaaagcaggacctcctccaccgccaccgaaaccacaacttccgacgcctttaccagggaaatcaccccaacttcctcggtgaccaactatctccatagtttatgttgaaaatgttaatcgaatgttataaacagagacgaatattttt

SEQ ID NO: 35566 - DNA, 2251 bp, Arabidopsis thaliana landsberg
tagaacagtcaaaaggagtgatttgcacaacatttttcataaatgttggtttacctttctttaatctttatgttttaatctatttccttatgcattgttcttcgtatctcttttgtctcttggtgttgtacctttctcttttaatgtttgtctaatcaggacagaaaatctaaaccgagaatttaataagtcatgggttgatattaatagtacataacagttggatcacatttatgtttttgaaggtggctaatggtgattgtgacttgtgaacgaccaaaaatgaaatgtagacgactctctcaagtggcattctccactaccttaaaagtaaagagtactaaagagagttgacacgtgttcctgtacctttcttggtacggacatttgtgtgtgttaagcacgtgatacgatcagtccaaagaaactctacaagacgtgagcgagatggtgtaattattaagtccaagattgataggcactttacatagtgtggaatccttttagattaagagatctcgttgatgtttaaatataagcttgattagtttgtgtttcagagcaaacccttgtcttgaaaacacttgatacagtcatcaaacatctctgttaatgacttgaaggaggcaaagccaagttcatgtatccttgttgtgtctaagctatgaggcatatctttcccttcttcactgccacacatgttacagtttttttctgttacatcaaaaacatgtcttaaaaagtgttatgatatagagcagagcatatatagtaagtacttggtctcaaatgggtataatgggtatttgattcgtagcatctcaatgatctctgaccagtgagccactgaactcgaacataagattcttcctgatgctttaggttcttccattgctaagatttgtgcagcaactacatcgtctatgtgcacaaaccctcccctgaagttagggtacgttccacgagtccctagtcaagacaagatcagctaaatggacagaaaaagtgtatttggtgaaatagaaaatataagtatgaaagtatgaaagtgattagattcgctaacctttgataatggacagaaaaatgagaggggagcttgtaggttttggactaagtattggaccaatacaaaatgatgggattacgacaactaggtttagcttcttatcagctgcgatcctccaagcttctttctcccctaaagtctttttataagcataccaaatctacatacattttttcagacattcatcgatatataagacaatatgaatgttgtctaaaactgaaggaaggcaacaatgagttaaaaagttctgactttgaagtgtttgcagtattcaagatcggtccaatgcgattcattaagtggagagacttgtgtagcatcaaaacggtaccgtatcgcggttgaagaagatgtgagaacaatccttttcacagtgtttcttgactttgcacaagagttcatcacattcattgctccacttatattaggatcaaatttatcctaaggaaaacaaaaaaaagctttaataaacataagccagtttattttatcaaaaatgttatgacaaataatgtaaacatgagatatgttttgaccagattgttgttgtccagacgaacagaaactcgagatgcgatgtggaatactccatcaacaccattcactgcttcatcaaaacttccttctaccgttagatcagcttggagaatctttagcctctgttttgctccttgaaattcccataaaaatccaaccttttcttcatcacctttcaatacaaataccaaatccaaaatcaggagattaaaggtggaaactttgaatgattctagtgtgagagaattgagaaattacgtgggtttcggacagttgttcgaacggtgtgtccgagttcgagaagtgatttgatgatgtaagaagcaatgaaacctgttcctccagttaccaaatactcagacatctttgtctctgcaacgaatgtgatattgagattgtgatttggtttaataaaagtgagctttgtggatgtaaaagcagagtgggtgattcatcacattcgtgctctctcacgttggagaaatgataattattttattttatgtcaaagaagtgcaggtcattgggctttcgaattgatttttaaagcccattgtgttttaaagattataaatatttttaacgcattctagaattccataatgcatattcaacacacccatgtcttcgcatgtgtgtctg

SEQ ID NO: 35567 - DNA, 14121 bp, Arabidopsis thaliana landsberg
aagagtttaatctaagccaccggacaactctttgagatcgtcacagagcatcccacatagaatccctcacactcccaaatctaaatctgtgtttcattctgattataaaccgactaatgcacttttcaaattttcaggaaaagaagattacctagagtgggagaaaaacatggacaagtggttttcctacaaaaacttcttgagcgagatgagatttgtttgtgcacttagccacctcacgggagacgcttacaaatggtggttgcaacaagttgatgatcgcttatactataaggagccacctatcactttgtggagagatcttaagaaactgctaaggaataagtatgctccacaagcactagaatgcactccaaaaggcaatcccaaaatccaagggttagcagctcaagaaaaggaacaagtgttagccccatatttgaagtaaaacaccatagcagaacaacaattgaaggatgaaattctgaagattcttaatgttcacaacaaccccaagaaagctaagtcaacatctcaaccaaagattgttaccgaagaagttgtagttcagaagcaaagcctaaaaccatcacttgaaccaagcgttgagccaatgcactgtaagtcttctaatctttcaaaatccagaggagacacttgttataactgtcgtaagaaaggacatttagttgcaacttgccctgaaaaacttgagctaactaatacttcattagaatcgaaactgagctcaccaaactcaagtagtgaagtagttagtcaaggtttagaaaattctagttcttgtgtcatgcacttgttcttgtcaaaggatgttgattcaggtgatattatggagcatgagaatgacaaaattgaagaaagcacaaaagaggagaatcatcatttggtgtcaaccacttcacaagcttgtctagctgactatgtttcaaaaatcaccatcttgaacaagaaaggaccgccatatgtatctcaaccagttctaaaccgagagttacctaaagaagaaccacatgaattaggaggattcactcaagttgaggctgtcatggtccacaaacaatcacctagagctgaatgcaatatttttttcaaggataaaccactagatgctacaccaccatttaaaactcgaggtaattatctaaactcccaaaaacgaatgaaagctaatttacttactcttggtgaaggttgtacactttggaggccaatcaagaagactaatgatcgggagataagcactcatcatatgagtccatcaagagatcctcgtgaagattatcaaaatcaacttcggctaaagcacatggaagaatacataggcaagcaatcaattttttttgtgagggctagtaaggttaaaaatgatttgttatcaaaaaacccatgtttattgcttaagtatgaagaatctctcatgagcttgactaaccgtgcaccggtgctgccgagtgagatgatgtctcttttgcaggattatgaggacatgttctcactggataaacctataggactaccatccatacatgatgtatctcaaagtcacgtttggagaccaggagattatctagaacgttcaaatcttacaccacatgagattttagtcattttacttcacatgtttcctgaagagcctaaatttgatctttcgtcacttggggcatttcatgcttatcactggcgaccaggagagttttagatacctttagagagaatgagttggtcacaagcaatgccttatccaaaaagaacccccggatccaacaccacttccattagtcataatgataccaagcaccgaacacactgtgaacctttctcaggtaagtaactctttaactcgatttgtttctcatgtttcaagaactggtactatgagtttatcatatttaggaaacattgagaaagagttagatttatttaaagaatatttggaatcaaactcttgtcttaggataaaagtaaaacatgaacatttcaagaatgatgcattgattaaaattgagcaatgtttacttgtttatagtgatttcatgactatgataacgcacttgctttttgccaaaggtgttgacaacattgcaggtataaaagaggagccaccagacttagaatttctatcgtccaatctttttgagaggactggaattggagttgttttgatgccacagatcgattacccgttcaaccgaacaagaaaaaaaagcgacaatgcttctgaacttaagctgcaaggtaagtataatgtgagttccaatttcaatgattcttacttggttcttttcattgtagctaaattggatttgaggtcaaatccttttcaaatgggagaggatgatgtgatcatgaaaagcacaaaggacttggaatttgatcaagagcttgtagccgcggaagagcttgaagcagaggagcagcttgaacctgaggagcattttgaagcagaaaatgaacttataacggagaaaaagtatgggaaagatgttatcttaacctcattggttttgatacataatcatcaaatgggcatgtgtctcatttgtactctttttcccttgtcaagttttgtcccaatgggttttcttgacaaggtttttaatgaggcctaagtaacactttcaagcctccctttatcagcccaattcgtggtccaaggcccactcacaatgccttggcccattctctcttttttattcaaactttgcatttattgcttttgttatttccaaaactctttgcatgagcttgcatgagtgtggacttgtgcatgctcttgcatgtctttcttctctcacctcttccctttcttcctcctctcctatataaactcattgtatttctcatttgcaatcatcaaacattttaatcaaaaaaccttctcttttacttgtttgatccgaaaagtgtgtaatatcttttcaacttgttttcttcttagtgtgtaatatctaagttggatccaagctagtagtctaagagtctttcatcactcttggaagtacaattcgttcccctttcattccgctgcatccacccgatcttgtcttcatcccggtttatcgtctttccaccgctttgttccgaatccatctattattcaccatcaagtacataattttcaattcaaaaccaacaaagtgagtctttggagcatacatccacgtccaagaatgtatcatgtggtatcagagccactttgttatcaggttttgaagttccaaccctaaacttctgtttttcttctttcagatctccgttcaatcttgcgtgaattttataaaatatttggctcgttcaaaaattgtgaaaccaattgcatttgaaccgtttacgagtctagtatttttggagttgttttgataatttttcagatccgtttttatttgcctgtttttggactgttttacttgttaaatttttaatttttcaggtacaatggtgacaagtgaagaagatgaagcgtcatctgcctctagcttggaaaggaggattttgaaaacagtcacatcagctatggcaacattaatcgatgaaaagcttagtgctctaaacttacatcaagtcaacccggacgcaaatccacgtctaagacaagaagaaccaagggaagatgaagaggcaagaaattactatagtcacgcctcctctcacagtagccaacgtaggcatcgacgagagagaccaccacctagagatcccttgggaggcctaaaactcaaaattcccgcattccatggaaccaacaatccggatacttacttggaatgggagcagaaaattgagttagtctttctttgtcaagaatttcttgagtccaacaaggttaaaattgcggctactgagttctatgactatgccttaagttggtgggatcaacttgttactagccgaagacgtacccgagactatccgatcaaaacatggaaccagctgaaaaccgtcatgcgaaagagatttgtgccgagttactatcatcgtgaactacatcagcggttgagaaatttggttcaaggaagcaaaaccgttgaagaatactttaaggaaatggaaacccttatgtaagagctgatcttcaagaagatggagaagcgctcatgtcccgattcatgggaggtcttaaccgagaaatccaagaccgtctagaaactcaacactatgtggagcttgaggagatgcttcacaaagcggtcatgttcgaacagcaaatcaagagaaagaacgcccgatcaagtcacaccaagaccaactacagcccgggaaagccaagttatcaaaaggaagagaagtttggttatcaaaaggattacaagccgttcgtcaagccaaaatcggtcgatctagatccaaaaggaaaggttaaggaagtaatcacgagggctagagatatccgatgctttaagtgtcaaggacttgggcattatgcgagcgaatgttccaacataagaatcatggtccataaagacaatggcgaagtagaatccgaagatgagagtgcgggagaagactcaatggaagaagatgtggaatcccccgctagaggagagttgcttgttgcgagaagatcgttgagtgttctaacaaaggccgaggaacaagcgtaaagggaaaacttgtttcatacacgttgcttggtcaaagataaggtatgtagtttaattattgatggtggaagttgtactaacgttgcgagtaggaacatggtcgagaaccttggtttagaagtgcttaaacacccgagaccgtattcactccaatggcgtaatgaaacgggtgagatgtccgtcaaagaacaagtcaaggtaccactatcaattgggaagtatcatgatgagatcatgtgcgatattctacatatggacgctagtcacatccttctcggatgaccatggcaatcggatcgaaaagttcttcatgatggcttcaccaaccgacaaaccttcgaacacaatggccgaaagacagctctcatcccgatgactccgcacgaagtctatctagaccagctaagtatgaaacaacgggccatcaaaccaaccgaaccaatcgatacaaagggcaagaacaaggtaagtaaaaatagtttactctttgttttcaaagaaacacttacttgtttaactaatcccgtaccggtgctaccgagtaagatcgagttgattttgcaagagtataaggacgtgtttccagaagacaatcccataggtttaccacccatctgtgggatcgagcatcaaatcgacttcgttccgggagccgctctaccaaaccgaccagcttatcgcaccaacccgaccaaaacaaaggaactcgagagacaagtgaatgagcttatggacaaaggtcatattcgagaaatcatgagtccgtgtgccattccggtcttactagtaccaaagaaagatggaagatggcgcatgtgcgtggattgccgagccatcaacaatatcacggttaagtatcgccaccctatccctcgattagatgatatgcttgataaattgcatggttctagcatcttttcaaaaattgatcttaaaagtggttatcatcaaatccggatgaaggaaggtgatgaatggaaaacggctttcaaactaaacaaggattatatgaatggttagttatgccgtttgggttaacaaatgcacctagcactttcatgagattgatgaatcatgtccttagaaagcatattggagtatttgttgttgtttattttgatgacatcttagtttatagcaaaaacttggaagatcatgtcatgcatcttaaactcgttttggacttgcttcgaaaagaaaaactttatgcgaacttgaagaagtgcaccttttgcacggataatcttgtttttctaggctttgttgtaagtgcagatggaatcaaggttgatgaagaaaaggtcaaggcgattagagaatggccgagccctaagaatgtgagggaagtgaggagctttcacggtctagcgggattttaccgacgatttgtcaaagatttcagcaccattgccgccccgcttacggaagttatcaagaaggacattggattcaaatgggacgatgcacaagaaaacgccttccaagccttgaaagagaagctcactaattctcccgttctaattcttcctaattttatgaaaacttttgagattgtgtgtgacgcctccggattaggtattagagctgttttgatgcaggattacaagcccattgcttactttagtgagaagttaggaggagcgactcacaattatacgacctacgataaggagctttacgcattggtccgcgcactacaaacgtggcaacactatctatggccgaaaaagttcgtcattcataccaaccacgagtctctcaagcacttaaagggtcaacaaaagctcaacaaacgtcatgctcggtggatcgaattcatagaaacctttccatacgtgattaagtacaaaaaaggtaaagataatgttgtagccgacgcattatctcggaggtatgttttgcttacttctttggatgcaagattgttgggttttgagcaaataaaagacttgtatgctaatgattctgattttagcaaaatatttcaatcttgtgagaagtttgcatttggaaaatattatcgacatgatgggtatttgttctttgaaaatagactttgtgtgcctcactcttctttgcgagaattgtttttaagggaatctcatggaggtggcttaatgggacactttgaagttgctaagacgtacaaggtaatgcaagaacacttccattggccgcacatgaaaagagatgtcgagcgactatgtgaacgatgtgcgacttgtaagcaagctaaggctaaggttcaaccccacagtttgtatagccctttacctattcctttgcatccttggaatgatatatctatggattttgtggtaggattgcctaggactaggactggtaaggattccatctttgtggttgttgatcgcttttctaagatggcgcattttattccatgtcataaactgatgatgcatctcatgttgctagcttgttctttagagaagttgttcgtttgcatggcattcctaagaccatagtttctgatcgtgatactaagttccttagttatttttagaaaactttgtggtcaaagttaggaactaagttgcttttctctactacatgtcatccgcaaaccgatggtcaatctgaagttgtaaatcgaaccttgtctactttattgtgtgtgctcattaaaaagaaccttaagacttgggaagactgcttgccgcatgttgaatttgcttataatcattcgatgcattccgcgactaagttttctccttttgaaattgtttatgggttcaaacccacatctcctttggatctaatgcctttacctttgagtgaaagatcaagtcttgatggtaagaagaaagccgatttagtacaacaggttcacaaggaggctaaggaaaatcttgaggctcgaacgaagcaatacgagaagtatgcgaacaaaggtcgaaaagaagtcatcttcaacgaaggcgatcaagtgtgggttcatcttaggaaggaacgttttccggaagagcgatcatccaagctaatgccaagaatcgatggaccattcaaagtgctcaaacggatcaacaacaacgcctacaaactcgatctccaaggtaagtataatgtgaatggtagtttcaacgtttctgatcttcaacctttttttgcagataatttggatttgaggtcaaatccttttcaagtgggagaggatgatgaaaacatgaccaatgcaaccaaaccacttgaaccacaagaagacgagtagcagcttgaagccgaggagcagcttgtaccggaggaagcattaatcgttccggcgggtcctctaacaagatcaaaatccaagaagttcaaccaagctatcaatggactactcaagaagctaaagaagaatcaagaagacgtggctcaatcctccttcatagtgatcacggctcaagaggctcggtaaagggttaagtgctgcttatgcactctttttcccttgtcaagttttgtcccaatggattttcttgacaaggtttttaatgaggcctaagtaacacttacaagcctccctttatcagcccactcacaatgccttggctcattctctcttttttattcaaactttgcatttattgcttttgttatttccaaaactctttgcatgagcttgcatgagtgtggacttgtgcatgctcttgcatgtctttcttctctcacctcttccccttcttcctcctctcctatataaactcattatagttctcatttgcaatcatcaaacattttaatcaaaaaaccttctcttttacttgtttgatccgaaaagtgtgtaatatcttttcaacttgttttcttcttagtgtgtaatatctaagttggatccaagctagtagtctaagagtctttcatcactcttggaattacaatttgttcccctttcattccgctgcatccacccgatcttgtcttcatcccggtttatcgtctttccaccgctttgttccgaatccatccattattcaccatcaagtacatcattttgaattcaaaaccaacaaagtgagtccttggagcatacatccacgtccaggaatgtatcatcttatctccatgattcaaggtaataagtttcatggaataccaatggaggacccattggatcatcttgataactttgatagactctgtagtctaaccaagattaatggagttagtgaggacctcttcaagctcaggttattccctttctcttttggagataaagctcatctttgggaaaagactttgcctgttgaatctatagatacttgggatgattgcaagaaggctttcctagctaagttctcctctaactcaagaacagctagactgcggaacgaaatttcaggattcacacagaagaattcacaatcattctctaaagcatgggaacgcttcaagggctacactactcaatgccctcaccatggtttgaagaaaacctcacttcttagtactctctacagaggagcattgcccaagataagaattttattggatacagcttctaatggcaactttctcaacaaagatgtagctgaaggttgggaacttgttgaaaacctagctcaatctgatgggaattacaatgaagactatgatcgctcgaatgagaggaactggaggtcgtgaggacaaacaaagcaaggatatcaaggttttgaatgaaaagttcgacaagctgccgttggctcagtagaagcagatagactacattactgatgaaaagcacttctaaatgcaagaaagggggaatgatcaaactgaagagctgtgctacatccaaaaccaagaagggttcaacaaggggtacaacaactacaagcccaacccaaacctctcctacagaagcaccaatgtagctaacccccaagatcaagtgtatccaccacaacaaaatcagtggaagccttttgttcagtccaaccaaggttatgtcccaaaacaacagttcaatggaggataccaacagctgaatccaccagggttcactcaacaaccacaacaagccccaacagctcaagatcctgaaattaagcaacttattcaacaaatcattcaaggataagctactggcgctatggcttttgacaagaagataactgaattacacaacaagatcgattgttcttacaacgatctaaatgtcaagttcgaagctctgaattccaaaatctagtatgtggagagtcaatttgcatcaacatctacttcgaagcatcatcatcaacttccagggaaagcagtccagaatcctaaggactatgctactgcaaatgctatcatcatccaccaagaaggtgagtctccaccaagtcatcagactcccaatactgaggacaatatgcttcaagaaggggggggggggaattcaactcaaattgctgcacctgccacccaacaattgatctggactatagagcacacacctttgctgaatactcattattctaaaaaaaaaaaaaaattgaaaaactcaagaaaggttaaaatcaagagatgattagcagtgtcatcactcaagaaacatacaagaaaagcttgatgatcccggttcattcactctgccatgctctctaggaccattgacattcaataggtgcctttgtgatttgggagcattcgttagccttatgtctctctctacagctaaaaagctagggatcatggaatacaagttctgcaacttagctttactcttagctgatggttctgttgcacatcctaatggtctgatagaaaatttgcctgtcaagattggaaatgttgagatacctacagattttgtggtattagacgtagatgaagaagtcaaagatcccctgatcctaggtagaccattcttagcttcagctggagcagtcatagatgtcaggaatggaaaaattgatctaaaccttgaaaaaggtatcaagataagatttgacatcagcaaagcttcggggaaatcaacaacaagaggtcagaatttggggattcaggacatggatgctgatgaggaaacagaagttggaaccccaccaagagttaactatacttctcaacttagcaagctgaagagaacttttgaccacaagaagagagcaatagaagggttagctcagactgaatatcctacaaaagataactggtatgagatgagaaaaaaaattaaatggcaaagcagagttatagagggattatcttcaagggtgatgaagctgaaagatcaactatggatgtttgaaaaaagagttaataagttttcaatgagtattgatccagagaagatggaaactgcactagctatcaaagaggacgaagatttcacggcagaatagtttgtgataagtaggtttttacgcttacttatgtgctgaatgtgaggttcagttcaattccccttaaacactaacaagtcgatgcagctatagagggtgtcaatccagtccatcgttattgctagcaatcaagacgtgtacagaaacaactaagtcaagccaaattataatgatggtgggtttctagtaacaatcctaggtcaggattaaaacaagtaaaaatgagaacttaagagccctactcgatcattgggtcgagtagaaccaacatgtgacaaatttaagtaactaaaatgcaaacaacaggggatacaaataacaggtaaatgaaagtgcaatcaacagggtatacaaataaatctaatagaagttctaaggatggattctttgatatgggcaactctagggttcatcaggtggctaacaggtgaaaggtagatacccttgacgatagattcaaaaactggatcaatccaccgtcgtgacaaagatccccataactctaccacttcctaatctcaactgccgttgatgaaacatagaagagcagggtttaagtaacaatctaccaaagccaataagtagacaagccaatgtcatagtcgagtctacaaatctctggaattcgtagatcagacatccatttgaacgtcttttggacgctagacgtcaatgatcgaatctcaacattagccaccgaaaatcgcataggggccaagcgaatccagaagggttctaacctaatcttaaccacctgactaacctagagattaccataatctaatccatcctcaagaaccataatcactactcaagcaacattctcaagtacacaaacccagaaattactgaaatcataccaaaatgtagatctaaacaagctaaacatctttacttaaccaatcaaatgcaaaaacgaaataaattaagagtaattaaagtttcaggattcataaacacaaagaaaaactgaaagataaagcatggatcccttggacaaatcccaaagtgatatatttatactaaaatgttgaaaccctagattcactagaagacaagagacttgaggcggttttggcgaatactcgaccttggggatcgagtaaagagggtgctgcaaagtctgcgcctttgtgtctatgctccgagtgatcaattggtcgagtagatgcttcatcctctcctattcgtatgctcagatgtctggttgagtggggaatgaggaggatctgaagacgctttgatagctcgacaagtcttgtagagatggtcacacttggtcaagaaaatgggtcgagtagtggatcgagtaagaggggagagtagatcaatctgctgcttcatttgaggttgccttgatcgagtaagagggtcgagtaaactgatatgatacaatggggaaatgcaaggctaaatgatgataaacatacacctaaaatgagtaaaatacagtgttatcagagaaaatggatataactattgtctaaacactcctaatccatctctaactcttataaataatcaaatgcattggattgtgatacattttgaccatagaaacactaacaaagctatttactgtttctaagaaaatttttgttggttttagcctcttttaggagaaaatgggtataagtgttgtctaaaccctccttatccatctctaactcttataattagtcaaatgcattggattgtgacacattttgaccataaaaacactaacaaagttgtttaatgcttctactcaattttttgttggttttatccacttttaggagtaaatggatataagtgttgtctaagcactcctaatccatctttaactcttattattagtcaaatgcattagattgtgacacattttaggacaatgatctcatgtactctctactctcctaaaatgagtctaaatatttctccattgtagaatcatttataaaaagctagtttgaccaaaaaaaaaaaatctaacatactcctatacttttaatgaattttaaaaatccttgtttaccttacccaacaaacccgaaccggacggacgaaccaaaccaaccaattacggttaagtctctaaaccaataccatttaagtcacaaaatattaacctatcagaaattcccagaatttcttttcctccctcacaaaatctaaatcgacgactgcagccaacgtcgatttgttccgacgttgaatccaatcgaccaagctcgccgtcgttttgcttctgttattcaaagtgagctttaccattctcttcttatactttggacatcttaattcatcaagtcttgtgttgttgcgtttgaattttgtagatttcaattagatttgatagatttgaaattggtgttggaaattaatagacattatgttggtaactatatattctgggtctattaagacattttaatgtactgtaatggttgattcatagttaatcttaggcagattactgtttttggtccgaaaatctttgctagaacagaataatctaggtatacctaagaaacgtggtatagctgtgtgaagcactatttatggtataactggtatttctgaaaatgagcgtggtatagctgtttgaagtactatttatggtataactggtatttctgaaaatgagcgtggtatagctgtttgaatagtataactggtatttctgaaaatgagcgtggtatagctgttcgaagtacaatttgctagaacaggaaaatctaagtatagctaacgttttttttttgttttttcaggagaatgggcataatcatatattttgattatgatggatattattcaaaaaccggagaagcatatcaatggaatccaaaagtagttggtttgtatggtatattgtttagtacatcatcaatggaggagattacttattcgtggttagtggataagatatgcacaaagatgaagatagatgaatctacgatgaagctgaaattgagttacattccaacgggtgttaaacctcctacatatttatatattagggatgatgatgatgtatatgtttatctaaccacgttggatgaagagaaaagtagaagtgtcttgcatgtagaagtcggtaatgagttggaaatggttcacttaaacgagcaacaataaagagtacaaggagagagttcagttggtgtgaattatgaagaggagaattttgtggtctagataat

SEQ ID NO: 35568 - DNA, 3011 bp, Arabidopsis thaliana landsberg
  unsure (1)..(3011): unsure at all n locations
caatgtgcataggccagcatggtcacaggaacagtctaaatacaaagattgattaagtttatttcatttttatgtattatccttttcaaaagctgcattttcattgatggcaagaatcttaagttttaagcaagattgtagagttcacttgatccatattgagacattagttatttacctgcaaacaccgaacatatctctttgtgtatcccaaatcattcacaagtggtacttccagggcctttgccaattgtctagcagatgcaacaaacctgcagaccagttgcagcacatcagagatcaccaatcaaaagtcgaataacaggatttgttacatcaatttcacagcgaaagagaggaagtttacatattgcaattattttgtagctccggaagagcagaatctgttgttgcattttgagcagcttgttgatatttctgagctgccgatccaagctgactaacctgtatgtgaatacaaaaatagctaatttacctaagctgttttcactgatttagatgtgtaatattctactcctattgaaatttggaaaccacaaaagatgaaaggtaaagtgacgatttcgcaaagaaaagcagactagaataatattaagacagcatatccaattttgtgacaaaaggaaaggccgcatctccaaaataactatatgtcagagcaatatggtgaatctttctggaagttacctgcggtatcaaaagtcttcgtggaataagctcttcatgccgccgagcacaaaattcccaggagaatatctgagaaggaacttacaagaataaagggcttggagagaaagtaatagtataataatttgctgcgagagatagagtagcttgaagaaccttaagatctggcgagaagactattcgaagttggccatcacgaacaacccgaagatgctcaaagacactctcttgtgttgcttttgcatactccaggacaatttggccagatgaattctgggactcccttggcatatctacatataacagttcttctaacgtcccactgtcatacttaatcttaaacagccgcggaaggacttcggcggttgcctctaaacaatgaaagagacaaagcactaaggaaggaatatttgataagatgtacaggaaattgtctgcactgatcatctaaataacataccaaaaccacgtccaggctttcggttacatatctcacagtgccacacatcctgcaatgtttgtggaataaaaatactcatgtaaagaggtataacatgaaacaagtacgtaatttatccagaataactggctcaggtgcaaaagacaagctcctttacaattgtattacaaacaagataagttcattgagcagtaaaccaacctgagggaaaacgccagttgtttgcctgccactgccatacatagagacgcaccatctctttttggcattaggagcaaagtactcagctacaaattttctnnnnnnnnnnnnnnnnnnnnnnnnnnnnnnnnnnnnnnnnnnnnnnnnnnntatgaagaaaagccataggctgaaagaagttaaatttatagtaagaagctttacttcaggcctatgttgttgtctgtacatatactgtgtaagacgctgagcacccatgccaggttcatacactggtttcagaggtggccttagaggtaaattctgctgttggaactgctgtggtaattgaggacgctgttgaggcatagatttcaagagttgctgttgttgaagttgcataagtctctgctggtgaaatatgttcatttgagcctgcggagattgccccggcatttgaagaaattgttgttgttgttgttgctgttgttgcctctgctgttgttggagaaacaatgactgctcagaatgtaaaggttccattttcacttgggccaaatttctcatggcctgaatatgctgcggttccaacttaactgacccttggtttctcaacatcttactgttgctgctgttgtacttgaccatgctgctgatcattcgaaacctgaccaggcttcatcttaacaggtcccacacctgctaatccaccaccactcactgtcgaaaaccgctgctgcattgactgctgctgaccattgtgaaaactcttcttctccattttcttattccgatgttgctcatcnnnnnnnnnnnnnnnnnaaacattcgaaaactgctgaccctgaacttgacctgatgagcgcggagacaccatactcgacgcattaaaagacgacaaaccactaaacccgacgttagacatcgggtcagactcagcaccacttgtatccatagaaatcatagaaccagggataccatttacaaaagactgattattgagaagagaagatatatttggagcattcccaagcatactcatactcatattgttaccaaactgagtacgcggagagacaagtgaaggaaatgctggttgagaaggaagaggagctcctccttgtcctcctaatatcgaaggcggaacattttcaccacccccaacaggattaggcggctctgatggtaccatactcttactaattcacaactccacaatcaacaaagaaagcaagaaacaaaactgacgactttataaaactcagctctgtgtaggagcaaagacgtattctttctgagcaatgataagcttcagagtcgtaaacaccacggaaagagatgaatctgagtgatgagattccgtatcgaacattctagaaccaaacaacactgtctgttgattacttacagatctaaattaagcaaatctactccatttccaactctcaccaccttaacaaaacaaaagcataatgttaagaacaaacccagaaagaaaaaaacgaaactttgatcaaaccctaattgagaaaaaaacagagattactagtgagaatctatagaaacttacccagaggtgggattgaagaatagtctctgatagactcaaacacagagaatcgacaaaaggaagagacttcacaaccaaaatctgaaactttcg

SEQ ID NO: 35569 - DNA, 1448 bp, Arabidopsis thaliana landsberg
aacagagaggagccagtatcaacccaacagcagccagtcgcagagggatcatcaccatgagggaaagaagatagagactcatcagccaattgacggtaaagcacaagcctaggcgaagcagatctcagagtaagtgagaaatggaagagagaagccactggttgagctaacagagtcgaagcctgtttagatatcttaagaagacaatctctagctgatttacaatcggaatcatctccatcggaaccaagccaagcatcagtaaactcccagaacaactgcttcgattctttggaaatcaactcactatcacaacaacaaaaatcactcagcttcagcttaagatcagtaacaatggtgctcgacaaaaaagtaagaagaagcattacccagcctcaaggagaagaggagtaccctgccacttagccttaacagccacctgaacattcttaggtctccgattctgagcgttgacgccgacgacgacgatgaagagaagaatgagatacagccaagatctcagattggtggtggtccccatcttttccgcgacggagaagaagaaaaaaaccagtaacgaacgagccgggaatcgaaatatccttactaacactaaaaggacattttcgtaaataacgtacaatagccacgacatcgagtatgacgtgggcgccactgattcgttggaaaatgctagagtccttcgagtgttcggatgcatcgttgtctggtcagtcaccgtcgagagatcatgcgaagtaatgctcctcaggcggatgatactatcgctctcttcgtcgacgttcagaaactttacttccgggaacaacggcgacgctattccgatctctaccttcacgaacccttctttttcaatcgctcccggagattttctcgttcgcgaatggaaagactggtttaagtatctacatgtgaaacagagccaccaattaatcgatcgagtctttgacatccttcgagctccttctaacgatggagacgatagagctttttatctccacctctccaatctccgacttcgtctcactgagaaattcgtcctcgacgtgctttcacacactcgttacgatatcctctgttgtctcaaattcttcgattgggctgctcgtcagcctgggtttcatcacacgcgtgctacttttcatgctatcttcaagatccttcgtggtgcgaagcttgtgactcttatgattgactttttggatcgaagtgttggttttgaaagttgccgtcattctcttcgtctctgtgatgctcttgttgttggttatgctgtagctggtcgtactgatatagctcttcagcattttggttatatgagatttcgaggtttggatttggattcttttgggtatcgaagcaaatgaatgcacttgttgaggagaagtgttttgatagttttgatgtcatcttcgaccagatctccg

SEQ ID NO: 35570 - DNA, 3016 bp, Arabidopsis thaliana landsberg
gcaacaccaatgtgttaatccgcttatcaagtgattctccacagcaacaacaaggtcaaaccttttgttccctaaaactaaggtcaaaccttttgttccctaaaactaaggttttgttcccaagcagcaatttcaggggaactaccagcagcaaccaccacttgggtttgcacctcagcaacataaaggccctgctgctcctgacattaacatgaaacaaatgctacaacagctgctctaaggacaagcatccggctccatggagattgctaagaaaatatatgagttacacaataagctagactgtagctacaatgatctaaatgtcaaggtggagacactgaattctaaagttagattcttggaggaaaattccgcatctacttccgctcaaaactagataagccaacttccaggaaaagcaattcagaatccaaaagaatatgctcatgctatcaccatacgctgtggaaaagcacttccaaccagagaggaacctaagatagtcaccgaggacacagtagatctagatggggaaaattttagttttagtaaagatcaagctaacaaggaacttgagcagccactcgaccagtcactcgagcagccactcgacctcgtcactcgaccacctttcctaataacatcactaactgctctaaaactagttgctgtaaaaaacaaagaaaaggtctttgttcctcttccttacaaaccccaacttccatttcctggccgtcacaaaaaaatattggcagataagtatagagctatgtttgccaagaacatcaaggaggtttagttgcagatacctcaaattgacgctctagcactaatctcggattcccacaagtttctgaaagacttgatcgtggagagaattcaagaagtgcaacggatggtagaattgagtcacgaatgcagtgctattatacagaagaagatcattctaaagaagcttagtgatcctggttcattcactctaccatgctctttaggtccattggctttcaacagatgcctatgtgatttaagagcatcagtcagtctcatgccactctccgttgccaaaagattggggctcactcaatacaaatcttgcaacatatcccttatcctagctgacagatcagtaaggatccctcatggtttacttgaaaacataccaatcacgattggagctgtagagataccacagaatttgtagtcctagaaatggatgaagagcccaaagaccctttgattttgggaagatcattcttagcaactgcaggagctattattgatgtcaagaaagggaagatcgatctaaaccttggcaaagattttaggatgacctttgacgtcaaagatgcaatgaagaagcctactatagaagggcaactcttttggatcgaagagatggatcagttagctgataaaaggctaaaaaagttaaaaaaacaggatcatttcaagaggcttctaacaaaggatagcgaagaaggaaatttgcacttggagactttggggtaccagaagcttttggatgaacataaagcagcttagaatccaggagaatatgaagatttgggtgaaagggcaagggacaaatatatactcgaccacatcactcggccaacagcccattcagtctactcgaccacatcactcgatcacagccactcctctgaagccaacttagtatccaatgactggtctgaactcaaggcgcccaaagtcgatttaaaaccactaccaaaagggctaaggtacgtttttcttggactaaactctacttatcctgtcatagtgaatgatgagctaactcctgatcaaataaaactgataataactgagcttaaaaagtataggaaagctataggatactcaaagctataggagatcctaatttttttagaatgatcttatgccgaatgatcgcactgcattcgtcacttagcaccaccattccttagacttctttgatcctctctgtaatcatgtctttcacatatttgttagagtctcgtataagtgcaagacagtcgacgagaggcatggtgacttcaagattttttaattatttctccaggagagctttgtacttctgtatcatgaccttcttgaatcgactaggaaatgggagtgggggtttgtaaggtgggggaacgaagacgttgtctttggttttggcggcagctggtttttcaacaagacgagatgctgcaggagctagtggtcgagtaggttggtcgagtataggctcttctattgctttttcaacggaatctccattctgacagaaatcctccccatcttgatccacactgtcctcagtgttctggttcggactctctttttgtgggtaattctttaccgcttctaagtgtgatagcatgagcgtactcctttgaatttggcattgattttccggaaggtcctgtaaatttgggtgctgcggtcgacccagtttggccttctatgtatctgatcttagatgtcagtgcttcaaccttgatattgatatcattgtaactacagtcaaccttgttgtgaatttctgccatctttttgcacaaatccattgctcctgttgcttgcccttggagaatctgctgtaacatgttcttcaagtctgaatctggagttgttgaagctggctgctgttgctgctgcgtgaacccaggtggtggaagttgctgtggatagttaccttgatattgctgcttaggaacatacccctgaccctgattgtatagaacgaagggtttgggttgattctgctgttgtgaagtgtagacttggtcctgcgggtttgcaacatttgtacttcggtaagacagattgggatggttctacttgaagttgttgaaacctttgttgtaaccttcttggttttgcacatagttgacttcttctgactgcagagtctccccatcctggacttggaacgtctcatcatcacccaaaaaatgaacgtgcttctgttgcacaaggagtagcttggccagtttgtcatcatactttcatttcc

SEQ ID NO: 35571 - DNA, 1417 bp, Arabidopsis thaliana landsberg
gagcatagttgcggcttatagtttcgtggcttttttctctattgggcttggcccaataacttgggtctacagtggtgaggttttcccgttgaagcttagggcacaaggagcgagtctcggcgttgcggtgaacagagtaatgaacgccaccgtgtcgatgtcgtttttgtcgttgactagtgcgataaccaccggtggggctttctttatgttcgccggagttgcggcagtggcgtggaatttcttctttttcctcttgccggagacgaaaggaaaatcacttgaagaaatcgaagcgctttttcaaagagacggtgataaagtacgcggcgaaaacggtgcagcttagcatgatgaatataacgtttatcattaaatgaaacgacagcgtttggggtttctcactcattacacgacgtcgtttagttgtacttttgtgtggcttttatcaaattataaatcaacggtcaagattgacgcacgctttagtatttttttcattaacaatttaagatcaacggctaatacatcgccaattactagctaataatggcccagtagtgtgaactgtgaagagagtgaactgattttttttttaagttctctctcagatttaacaaaatcgagccgacactttcccaattgcactgaatctactgaaatcgattcacgagagctcagatttggtgttagcatcactcactaagcaagattgttgagtgtaatttgtatttgagatcgagatgaaggaggacgatgcattgccgacgacgacgacgactggtacggcgacgggaacagctatggcgaattcgaagaaggaaagctctgacacggtcttgtttggaagaggtcgatataagttctgggcgtttgctgcgattttgcttttggctttttggtcgatgtttactggcaccgtcactctccggttatctaccgggaatctgaaccggttatcggaagatctagggattccgaactacgataatctcgacgttctggttgtttactctctctgtttctatttcggttgatttggtgtgtaatttgattgtagtctggtttttgaggttttggaatttgtggtattttttaggaaatggaggagagggagaaagtggtgaagcacatgtgggatgtgtataacaatggccgtcgtatcagattacctaggttttggcaagaggccttcgaggctgcttacgaggagcttaccagtgatgtacctgatgtggttgaggctgccatttccgagatcgctaggatgtctattcgctccattgttatagatccgcctccgcttcattccacggtgagagtctaacttccttatgcctttaacactgcacattgctctctctgtgcggtttcattatgcattcagtgtgtttaggtcatagagtcgctgtattta

SEQ ID NO: 35572 - DNA, 2769 bp, Arabidopsis thaliana landsberg
  unsure (1)..(2769): unsure at all n locations
cttctctttactctgggtttgctcatcgttcttccctcacttcaagttctgttctcgcaggatctttgctggggagggggttggcgtaacttatatcaaaatatactttgtaacatttgtattgaatacaaagccacacattttgttaaaagagaacccaagcccattaaaagtccatgtggattaacaaaaacaagaaaaaaaaagggttctgttattaggttattcgtgaatacatatacgtgtgtataatgtcctcttcgtgaagccgcacgccgttgctaagttatctagaccattgtcctagtattgttgttgatgtggatcttgtggagaagaagtgagctctcacgtgggaaagcggaggaggtggtgatcttgtcaccggaaaatggacagaaagggggagactggagaaggtcaccggaacttcaccggagaaccaccgcagccacagtgagtcaccagatcttagccactgtcaccggagcagtcgtagccaatcttcgaggcggttaagggtaaggaaaccctagacttattctgtaacttgcgcaggaattttctgttttggttataggatatgttgcttgtgctgcaagtcatccaaatcctagatctaatctctgttttgcctttgattgttgaactattatacctaacaaccatgggcttgaaccaccgcagatctttactgtagagccgtccacttcgccgtttgagccgccaagcaaaccgccgagtgatcggtcatgatctgtactgttcttgtttattcctacgtaatcatttcttaagaactgaattatctgatccaaccagtggagataatgtcgacgaagagcagtagtattcatggaagaaatgaagtgaagatggaaggggaaaagcgtaaagacgttgagtcggaatcaactcatgttactctgaatgtgaagggtcaagtaagatttgattgttgaaactatacaatttctatattagcatgcatgacttaatataacatgcgtggatttatgtagaatgacgaaggggttaaagtcttccgggtgagaaggaaggctaagcttcttaaattgatggaattatacgccaaaatgagaggcgtagagtggaacacatttcgctttctatctgatgatggctcaagaattcgagagtatcatacagctgatgaggtatgtattatcattcaagcttaaagattcttataatatattaagataaatcattcataaatgatctttttttcactgtgttttctcagctggagctgaaagatggagatcaaatcgatgcattgttgcctcaacaaagtggtttttggtccttctacagtatttagagtttgagtgtttctggtgtgaatgtaatgttggaattggtcaaagttgaagtcgtttccgagtatttcgtatcacgtttagctgaataagttacatggccgagtattatgcttgtgctgatttgtacgagttattgttttcgatctgattcctgtaaacaagtctcctctatataaaggagttttgattttctctttaatctaataagaaaagctttgattgaataatctctgttttatccacttttaggatgtaataatacgcagatttagatttctaaaacggttcattgttacatgcaagaaaggaacacaaagatatgttgcttctgttacaagttttgaatagaatcaaatagttgcaaactttgaggaaagggaatcaacaaaaggaattttttttcctttaatacttaaatcgaatttatattcaatgatgaaacatcctatacaaatacagtaccattgataccattcttgcatcggcttcaatcatcaatacagagttcaacaactctctgagatttttagtaatatgtcggacgaaaccggtaacagtaataatccttctctgtttcaatatcaaaccatatcatagttctagtgttttgagggtcaaaccatatcatagttctggtgttttgagggatcatttctgttatctaaagctgttcttgatggttttttggtgaaacagaaaatgctgcaattgaggttaatcatggattgcttaaggagcttgaagatatgggattctctatggctcgagcagcatgggctctgcatcactctggtatgtatcaaccacttcaacatattccaagaatcatttcatggatcagtatcatccatattttgtctctctcttcatcttcaggtaactctagccttgaagcagctgtgaattggatcatagatcatgagaacgattcgcagtttgagaaaatgcctttgggatgttttattcatcttcatttctttttcatatatttcatagaaaacttttgatcaaaggtggtcttgcaggtggagtttaacattgagattgagtctccaaatccatctgatgatactgcagaaacttctcatgcaagaggaaaagaactattgtaagtaagtctccatttaaacatatatgcatattttttaaacttgactcttttttaggacaaatgacttcattgttaattctcagggaacaagctcgttaactaagagaagaacaagaaactatacgcgaaagagaaagagagaaggtagttaggaattacttgcatcatatactatcgtcacgaagaagactaaaagctctaacacnnnnnnnnnnnnnnnnnnnnncagggaaagagatgatggaaacaaagcgaattgcggaagaataccgaagaaaaccgtttgagaaagagagttttgaatctcatatt

SEQ ID NO: 35573 - DNA, 1147 bp, Arabidopsis thaliana landsberg
  unsure (1)..(1147): unsure at all n locations
gaaaataaaagggatttcaaagatttaaatgatatatataagtaaattttggagtggatgattattgactggtaaaattccagcaaaaaaattgttgattgataaaaaatcaagatattgtaagaaaagaaagccatattaaaattgtaaaattaaaaagttgtatctctaaattctaagaatagtatatctttttccttcacgaaatctttaactaaatacaatcaagacattagttcacacgaaatcctcaaaaggcttaacataatttaacagacgaaatcctcaactaaatacaatcaagacatcagttcacaccaactggtttcacaatcactacagtccattctttgaagaaagggtaaagttaaagatgataacaaagaagcaagcgaagaggaaattcctcagccatcaacgaataaaacgaaatgatatcaaacgtaacctctgtgaatcacgcttaatcctctaacatttctgtatgtaaatcaagtttcacacaaggagtcataatacactttcttggattataagaaacatcaatataatgtccttgagccgcaagaaatctgataaccttttctacccacaaatattttttttaaaaatcaattcgtgcagcttggatcgacggtcgaaccgatgagtctgaagatgtaaggctcgccggcgtaactgaactctgcagaggcgccagctggcaaagcctctcctttgatcagaagacacctgtttccctgtgggagcagtagccatggctcgacaggcttcacaggagcaaaccctccgcaagacagagtcacgtgcttctgcagacacttgcacgtgttggttaccgtcactttccactccggttgtccggagatttctttcccggtccttaccgtcccgatctggatgtcgccgaaagtgcagcggcacattcctgtgggttattaattgtttcatgctcttttttattagtaaacgaacagtacattttgtaatgggtttttaataaagaaagcgaaaaatgtattacatataagagattcattcagattatacgtttcataaataatcgaaaaatcaaactgaatttaatagaaaactgaaattaaatacactccagaaatgatgattgccaattgagnatttatataga

SEQ ID NO: 35574 - DNA, 1584 bp, Arabidopsis thaliana landsberg
accgaagacaccgattttaaagtactagtggccaagctttcaaagagtagatgtagcaatggaaaaggaatctcaccagtcaccagaaaaagaaacaaggagaaagaaataaaaaagaagaggtgaatcacgtggcggtaaaacgttcgttgcatccaaaacgctgtcgtttttaaagtgtttagtgttgccgtgtaggtgtggcgttggaaccaagcgtatacaacaaagtcttgaagcagagaaagaaaaaagaaagacgagaggcacacaaaaagagatacaaaaccaaaactttcaagcaaagcaattcaatttcaatcaaaaaccaaatcgaagatctttgaaagtttcctttttttccgaaatctgagcttgggtattgttggataagcttctcggagattgagattgaggattttgataggtgaggagattgaaagatttggatttttgggcggcaaaaatggtgatgcagacggaagctagggttggtgtgagctcaggacatggcgtagcttcgtcttctcatcgtttaacgcaggaccagagatcacatatcgaatcggcgtcgcagctcttagccggaggactcgctggtgcttttagcaagacttgtactgctcctctatctcgtctcaccattctcttccaggttcgtcatttcatcgagcgagaagaagaaaaattcaaccttttgtttcattacaacccaatttgttggtttattgaactaagaccaattcaaaatttcaagttcaatgtgtaatgggataatcaaacaatttggggatctgtggaaatgagaaagctgaattgagctctgcgtatagatagaaaatctattagtgtttgactataccaaatcttcttagctgcacttgtttctaactctgaatgcttaaaaagggaaattttgtgttaaagctgagttttttttggacagcttcttgattgtatacactatgttgtatttaggtgcaaggtatgcacacaaatgctgcagctttaagaaagccaagcatattacacgaggcttcacggatattgaatgaagaaggattgaaagctttttggaaagggaatctagttactattgctcatcggcttccatattcttctgttaatttctacgcatatgaacactacaagaaggtctgagaatctaaactaaattcttagtgtgacattactctccactgagcctatttctgattttggacttttttactcgattatttacagttcatgtatatggttgatgggatggaaaatcacaagaagagtataagttcaaaccttgttgtacattttgtagccggtggtttggtctgaaatcacaacggcatctgccacttatcctcttgatcttgttagatctcgtcatgctgatcaggttggagtttttgaacataagtatttgtctatttgatatgaactttgttacgcagccttgttttctaattttacttgttgaaatttcataactgaagcattgttgcattagctgtctgttaacattattgtttgaatcaatggtagacaaaagtaatctactactcgggtatctggcatactctgcgc

SEQ ID NO: 35575 - DNA, 8331 bp, Arabidopsis thaliana landsberg
gtctgccccgagcattcgagagttcctcctggatcttgtcatacttctgatactgatcctgcaactccccgttcgatttcatgagtttgaaggaaagattgtccaattgatcttccaatttttgcatgacttcagtggaagagcgtagatcggactcaagagaagaaaacttatctttccaggccataacatcctgttccctatcaagcaacaatctctcataatacttaatcatgtcattgagttcgatgtttgcctgaaccaagggttacaaaggtgaattagcgtataagcgaaagagtggagcttaaaggtcacaaataaagagagctaacccgagatgagtgatgggcgtgaagtaggaatcgctcgcgaattgcaggacgccacctgtcaaaggttggcaggattgtgtctttccgagtcttgaagcattggaagaagtttccctctgtttccatcgctgtcaaagtaataaagagattcgaacccgtgtatgagaagttaggccgatgaatcaaacgatgtagcaagtaaagaggataaatggtaatttctaacctgcaagtgatttggtttgaggaactagaacggccttagacttagggttggcatctcggggctcagcctcttcctgtcgaggatctgcactccgaccagtcttttcacccccagatctagaagaagaagatatgatgactggaggagggggacccattgatcgaggtgggggagatgattaaggagagcgatcaatccgagctttcaatttgcccctcctaggggaagagttgctgcgggctggcctctctctctttttcgcatcaagtctgcaatcggttcgctgctcaacctatcccgggaagagggtcgaggagagtcacggcgaggagaacgatctcttcgaggtgagcgactgctacgactttcacggtgaggtgtaggtttgaaagcaccggcagatctcgccccttcagcgctgtcgtcatccactagtaaagttctgctgtactctttcttgtcgacagcagacataagaaacgacttgttcgcctcacaggcttccaccatcggtttggacaatgtcttgcaccgggaagcaacagccctgactgaagttcgttgaggtagaggaggaggcggtggaagttggtgaaactgtctaggtggactcattctgagcttataattagcctctattaaacggtcgagagtgaataagttccaaagggtctccccttcgataacaatcttgaagaattcgccgaactcagtagtaggaagggtaggtgctataaaagctgcgaagtggaaaaatagaattggtcagataaggcaggaagtaaaatgaagctcatatgcatgagctaataactaccgggcttggtgatccacttcgtggagagcaagtctgggacgttcccgatcgaggcagggctctttttaactaggaaccacgggtgatgccagttctcgtctttattcggaagatgcgagatgagatttctataggcgttcggataagtcgagaaagtacccgactttcttcgaagaactcctcacactaagaagttcgttcagttcgggaaccctgacgacgtatccggcctccgccgcaatggtgataattcctagaatagtccggaggaggttgggggttagctggggtaaggcgattttgagggccgataagtaacgcacgagggcttcggggagaggaaaagtcaagccacaccctttgaagtaaatctcatacacgcaaaagaacccgggtcggtggtcttccggcgactctgtgggtttgggcatctgggagtccctcatactttcggccggaatccgacaaagctctcccaatcgattgagggattgaagagtacatgtggattgataatgtgggccggcgatatcattcggtcgggtgcaaaggtctttactagagccgcctttcattttcagaattcatcataaaaatgggtggtctgagggttcgccagagagagagtacagagaggaagaagaaaggagctttgttttaaaataaaaattaaaatgaagcgtgaaaagatataagtaaagtgaacttaccttacgcaagctagtgatgatgacggaaccgccttggaagtcgtggagaatgtggaagagtttttcccgcttaaatagtaaataattggtatgcggtcataactctgacagatgtcacgagagtaattatgggtgattccgtaataaaagcaataacgtgattttggtgggaaatcagagagtcacttaacgcaatctttgccccttagagcattaaagtcttccaaattggagtatcacttcgaaagacttggggggctaattgttggtgtcggatcccgcaccatgggctcgggaccggccaaggattactacacaggtaagaaaggcccaaaggaggaaaggcccatgagtttcctcgaagtaagagtataagcgaggtgttgattcgcgaggtggatacaacaccgaagttaaaattactcggattggagaagccagatgggccggaaggtgaagcccaggaagtccggagtgagttcaaattcgaacgtttgaataattaattcgaagactaaaacggacacatttaagacagagtaattgtgtgtaaatgaggattaaatgtattccttgagtataaattatgggtcaaagaccatgtaaaggacacacgcattcttgtgcaaactgactatacacatttccttacaaagctcatagttttctctataatcgtctatctattttctagtatatttgtcctcaagaataatccttctcactaaataaataaatacttgagtgtgtgagtccgacatccacaaatatgacttcatgtcatgtgtatgattgagtataagaactaaacccacacccggatcttaaaagcctaagtagtgtttccttgttagaagatacaaagccaaagactcatgtggactttgataataggtttttaagatcaattaatcctaaagcactatcatgtcgttgtagtactgaaggttgtcaatccaaatggatgtgatgaaaacagatgagatttgatcagaagtcactaagtcaagccaagcaataatggttttggggtttctaacagtcctaaacgaacatggaaaaaacagaaattttaacagaattactaaaatcactcgaccacaactggctgatgccagaaagcagaacgtggtcgagtaactggtcgattaacagacaggaaatgaaacagttatactcgactacacagtttgttgccagacactgggtgtggtcgagtatgctggttgagtaacacacaggaaatgagacaacggtactcgagtgcacagtctgttgccagacactaggtgtggtcgagtaagttggtcgagtgattacaaaaaataagaaacaggcaatgagaacgataaagcgataacgataaaacagagaaattagatagagaagaaattcctaaggatgggataatcgaatggagttgtatcctagcctttccggatggttaacaagagcaatcaagctatccctagacaacaggttcaacaacagatcaattcactcacgtgatagaaatcctcaagcaaagctagcctagactaattcccattaaccgaatctaactatgcaggcaataagaatagatagataaagtcaatacacgctttaaacgtccaatcccttgggatagagacgcatatctcaggaactagtggatcaagcattccatcaaacaccttctgggtaagggaatgctttggatcgaattctagttgatcagaaagaaataagaagtaaacacaactagtcccgccgtttaatcagttctaaaaacttaaccattctacataataaggattccacaaccattctatcccatccttcagaactctatgtcactactcagacaacatgctcaaagacataaacgcatgtaaatgataatattgcataagtaaagagataaagagtagagaaacaagatgaccgatgaaatcaaatgcggaatctaatattgcaagatgacttggaaaaacctcgaattataggttacagaagcaaaagcggcgcaaccagagtaaaacataaaataaaactgaaagcaaaaactcaatgtcgactagatgtcccaggacgatcccctcagacacttatttatacaaaacaatataaaatgatagtagatgagccgggaacctaatcgaccgtcccatagagtgataatgggccgagatgggcatcgtgatcggatgaagctccggaccgcttccaaacacttcttcttctcctcttctcttccttgtgctcagcttatctagttgagtgtggatttgagtagaatttgaagatgtggtcgagtgcctagtcgagtggtggtagagtgatgatactcgatctcgtggtcgagtagagtgaatgtccgagtggtggtcaggggtgtgacgaagtgttactcgacccagtggtcgagtggtgtcatcgagtagcatggagtgtggttactcgaccagggggtcgagtgattggtaagaacggcctcaatgttactagaccaaggggccgagtgtgctgctggagttactcgaccaaggggtcgagtatgtcttctggttccggctctcttcttccaatttgctcgtcaatagctccaaatcacttgaaaacaactcagaaatagaatatgtatgcaaagctatcctaatcatgcaactaatcatgcaaaatatgcaagaatgatgaggaatgatataaaatagtgatgaatgatatgaaactagactcaaaacgatgatgaatgaacatagaaaacttgcaaaatatagacatatcaactcccccaaacttagtctttgcttgccctcaagcaaataagaagacatagttgaaggagaggtttgaaggttgggactcagaaccaaagcatatgatagagcaaataaaatcaatgtccaagttggtagttctaagatgagatatgattgaattttactcaaaaacgttagccatgccttgttatcaatcaatccgtctcttatacttgacctacacatgctttcaaatctaccaatccctttaacattcattagttctggaacgtgaatcaagcaatgcatcatcaatgaactcatttggctaaggtgaaggtcaagagacaaagatggtcccttacagaataggcttaagtaacaggggatccctcaagaatgattgaggtttagtagaatgctaaaggtaagtcccaagttatgcatacagagataagatcccatctacccagagtataacaatgaagctctaatggtaatcccaactccagtcccaacttaactctaccctttgcactcatgaatctttcaaactcttttttcatatcattcttttcttttctcttaactctaggagaagctttctcaacactttgatacatctagcggatttggatttctttaacaactaaggttcctgtttttaagattttaaaaccgagggcttttgcccttctttaatagctaacaagaactctttctttctttacaaatcccaaaacctttactagactttttctgcttctttagcttacttcccctagagtcttttaccttttctcatcaatgaatcacccccctttttttttcttttagacacatcccaacccaaagtataagagcccacctaatcctatctagtccgaaaaatgcgaactagatctacatgagacactatctctatcgttacgaacctaacactttctaccaagcttaattggtataagacctcacaaacacgcacgagtgatatagggcttgaaagaatgtctaggtttgggtttgggttaactgctctaataaggagagtcagctacttggattaacaagagtgatcaaaatgaataagaaaatccaagcattttaaggtatccatgagttcaaatttgatgcagacatgataattaaaggtcaaattcaggttcaaattgatagggaatggtatcatatcatgatagtgtggtcgagtagagcaatctaggcatggttcagttttacttcaatttcattgactacgcaacagataactagcaactagggcactgagttaacgggtgaaccaaaatgcttacaagcctatctcatcataatccccagtgcatatgcaacaatcttatatgaaacactctagactcgatcctaaatgtgatgcaactatatgaacactctgtttttgtagaatcattttcaaaaaatttcaaaagtttttgtttttttctatatcttagatgaatgcagacccaagaatataaacaatgcaacacacacttcgtgagacctcccccaaacttaaatcacatagtccgctatgtaaataaacttggaagagagtactcaggacaaatccaatcaaagaaacaaaataaagaacaaatcacaagagatgatataatacaatggtgaagtgaggcgcttacctcagtcgaagaatgaacaaagttggtcgtcaatagctgcctgtgattgctcccaggcgatcgaagaatctccctgttgtgtctcagcttccccctgggggtactcgacctctgctccttcgtcgcggccagcaccgctctgatgatactcgacctctcttcttctgctgcggccagcaccgccgtcgcgtaagctacgggactggagaagtcgtgtactcctgctgctagaccgagcgagtgcagccttcttctttctcccgagctcccgaggctcgaatgatgaatgccttgcagggactggtgggactactcggtcactaggctcaggcctgtggtgacttggctcaggcctgtgatgacttggccctggcgcgtcatatctcctcgaaggcatgtcctgaggacgctctccctgcggaatagctgtggtagaagagaaacaacttatcttgtccgtcagaaacgtgatggctttgaagcacttgataagtagcctatcttgtttcttgcaccacctctgcaacttactgttgtttctgtgagcttcactcaagctcttgctctcccgcgctggaggtacgtgctcactgaaatgatacatgctcgtatcatactcctcctccctatcctcatccatctcagtaatatcatcctctgtagcttccgtcgtagggacattgtcatcagtcggtggagcgctctcaaagtagaggtaatcacgcgcaggtctgaagtcaatgtttttgacctgaagtatggttgtggcctcgatgcagggaagcaaaatgttggctgttcgggtcagggagtgctcgaatttgtagcgatagaaatcgccaaccatgtcgtactccagaaactcacaacgacgcaagtgatctaaatccatcatcctcggatcaaaccctggagacgtgagaggtacaccacatgcaatcagaatcggtgtcacaacgccacctacacaaagggttcctcgcaccttcttcttcccgttggtgtgcgcccacttcctatccgcacaggtggatcaacagaagcataaccggtggtgtatcattaaggtcgccctttaggaccttcttcccctttgttctccggagaatgcccttgagtgcagaatcaatcatctccatgtctgtgttagacacggtgcctgtagattccctggggtacagaacattcgctaccgagcgctgatagtagcggatcacagggcttcgaatctggttgctcttagaccttgcagagttgagtgccaaatcgttcccaatggttaaccacaaatccttcaactcttccctctcgaagttgggtttagttccctttccactgggaaaaccaaataatccttccaagctcttgatagatagctggtaacgctgctcgttaactgaaaaagtcaagaaccccaacacttcactctccagctcatctgcagtaagtccctgatacatctccacttgcagagtggagagaaactctattgtttccttcttgtaagcgatgtacgggtaagacatcagtgtctccagatggcacctctcgaataagtgctgtacgtcctccagtagccccagctggactaaagtctcataacaggggtacctcgttccccagaagtcgttcagctcgaaaagtctgatgtactccttcactataacttcatcaggcttgttcaacagcttcgtttctctgtgccgtgactcaggctcatactcgacgtcaatatcttggtcgatcaactcatatctgctggtcattgctctttttcctctagcaatctcagctctcctttcattgcgtcgagctactgagcgttgggtctcagctctgaa

SEQ ID NO: 35576 - DNA, 2365 bp, Arabidopsis thaliana landsberg
tcgcatattcctttatcccattttcacggtcaattcccaaacgtctatcctaactagtaagctagattgttacataccttggccaatatgcagatttgattccttagcccgtttgtagccttattctattcgttcaacgattcgtattcgatcttgcattgatgaaccaatccctatcgttacttagccatacaaccaaccaaccccactggtctaagtacaacgatagagattggggatcgtacgattcccttggttcacgatggccgaatcaagctcttggcttattggtccatccgttctccaaacgtactcccctccggctacatggtggacgattgagccctcggcttatcgaaccatccatgtttccgatccggtcgtttaacactacgaccgcccttgggttactaaccgtttacctgtccgatccatggtggtcgggaaagctttcggcttaatgatccatccatgcggtccgaacgatatccttatcacacccaagggtccgtggattcatccacggattattgtaggctagcccatgaaatccttcttccgtcggccttaggtttgctcgcgggtccaacatccgttttgtccatcggttccaactgtggactttcccgttggttatccgtcgagtcaccctttggtcttaccgatcttcgatcggtttcaccatggctgaggagatagatacatgaaggcagccgcgatattgatcctatatggtgaatcacgttccttacccattcttggtgctttctccctttaccggtaagattgcatccatgggcgacccttgggtgtgttcggatgcacttatccttgtgcttcctcaaacacttttcttgatccatcccatccgacgatcggtctgtccgactcgttccgtccgacgatcggcctgtcccatccgacccgtccaaagatcggtctgtctgatccgatccgtctagcggatgcgatccgtcagacgatcggtctagccgatccgatccgatgatcggtctaccagatccgattcgtctctaagacgaacggtctaccctctccatcctctacactccatcgaaccgttggaccgggaggtagcatgcgcatcagttcggtcgagttatactcgccgaggcgcaccccctttctgaccaacaacttcgggatgtgttgggactcttttaagaatgttttgtggtgtctggatgatgttgtgagatgccttgggcgtcctcccttatataggaggcgaatggatgcttcccgaagcatcacatccattccttgcacccttcctaaaggtcacatccgttccttgcatccttccgaaaggtcatatccgttccttgcatcctttggcgatgcaaccgttcattggtacccgctagactttacatcttttggccgagacaactcttcatccgtgagctaccatagtccaccagctcgagtgtcagctgaccggaccacccagctgggtcagtactcgatcagctcactgagctcagtcgagctgtcggtcagctcacctagctgagctagctagtctttcagctggtttagctcacttagcttagctagctagttcatccagcttgtccagctcacctagctagttcagcttgaactttctcgttctttcgactaagtatttttgtccgttcctcgaccatgatctagttttctcctaaaataaaccggcctctttctcgttacaagtctaccccccttaaactgaattcgtcctcgaattcggcgggtgtaagacctttgttattccctaacacgggacacgggcgttacaagtctaccccccttaaactgaattcgtcctagaattcagcgggtttaagatcttgtttactccttaacaatttcccatctttaatctctccgagacttcagatatcatatttgatcaaatctctattcccgagtttgatttagattgctgagctaagactttacgacactcgatcaaatttctgatcctggtcctttcccggactcaatcattattttcgatctttgtcctttcttggccttgatcaatatttcccgatctttgtcctttcttggacttgatcaacgttttccaatctttgccctttcctggacttgatcaacattttctgatctttgtctcttccgacattcgatcaaatttccgatcctggtcctttcccgaactcgatcattatttcccgatctttgtcctttcctggacttgatcaacgttttctgatctttgtctctttcgacattcgatcaaatttccgatcctggtcctttcctgaactagatcattattacccgatctttgtccttacctggacttgatcaacgttttccgatctgtgtccct

SEQ ID NO: 35577 - DNA, 1919 bp, Arabidopsis thaliana landsberg
tagcggaaatcttcggtcgattatttaaaaacggttaagaatttgacttatacgcagaagcgagatttgatcatgggtccgacaaaatgtatgtagaatagagatcttcagttgttgaaggctctgcagtttgtcctgatctctccagaatctcccgtaagaactcctatttcacccattttctgcatcgcttcggcaaaactctctttgaataatttattgttgtatgcaaaatctgacacaatcgacctggttgatccatcgcgaatcaagttgtcatcaattctaaggattgctcgttgctgtatcatctgtctatagatttcattgtctactctaaatggcgtattttggtccatgaacactgatgggtcgttcgggccacgacatgacttctttaacttagctctcagtttgctgtccattttaggatccttaatcctatcctgaaaaagactacaatgtgcaacaccgacagtgtggccaccaccaataagtgcaaccatggtgcttacattaaaacctatagatttaaatgctttgattgatgtagccacggaaactgttggtcctagcaatttaacattactagggtttgatcttaatccatcgcgtcttcctgttcgtactttgaactttggaccacccgctaatgcaatcgagtctctggtggctatagttacaatgtctgcgcaagagactgttttcgggcaaacaagctcgagttctttcttagcttcatctatgatctcgaaacctctcacccctgcatttcgcccgacgcttttctctgatggtctttcggttgttgggtcgatcaagagggaagcatcacaaccctacacaagaattcaaaatattagctagtttacgatataccatacatacatgatacatataaaaacacacaaggagaagctaggttactaactttgacaacacaatcatgaaactgcatacgaagcaatgctgcagtaaccgttcggttacggtcccaatggttgaaaacaactctacccacgatagattcagcgggagggcatgtaccgtcgtaaaacccatgccggagctgcgcaaaaacagagggaacaaggtaacagaaaatgaaaaaccaagctgcgattgccctcattttctaagttttctctcgtatgtgaaagcttaaaaatacttttggattgtgtttagttttaagttttggtgatgaaatggttaattagtgcccgtaaaatgcatatttatacgtaaatatggggacaagacattggcaaagaaattgtttcacttcgaagacgtgcagagaataaaggtttaaaaaattatatcttgtgatagtgtggttcatcaatgttgtataaaaaatatggggacaagacattgttacatttcgaaaacgtgccaaagggtaatggtataacactggcaagcgatgatttttaaagttatatcttgcaatagtgtggttcatcaatgttgtataaaaatatattataagatcgtcaatctacttgtcaaaagattgaggctttgaatggttatttatataatgcggactagataatacttaccaatattttagtatgcaaaatgtcgtactgtagtatgcagcagataataatatgttggtatgaagttgatgatggtatggagtttttgggaagtggagtgaaaaactgcagactagtagtgaatttgtgatggtatggagttgtatgctcatgtgcatggtagtgtggagatttttagtctgcattagtgcactttagtccgcaatagtgaatgatgaattaaatgccggctggtccgattttagtccggtctacatcatactacgcaaccattcaacacctgatgatatatatgcaaatatttttactataaagttctttggagttgtttcttctttcattatcaaatct

SEQ ID NO: 35578 - DNA, 3092 bp, Arabidopsis thaliana landsberg
tttaaaatttcgtcttgcaacgtttatatagttgtcactaagtagtcacatttggcaacatatttgtaacatatttgcgattgtctggctgcaagtgtcacaaaacggtcgctctttgcaacttatttgcgaccaaaataatatatagtcgcactttgcaactgattacctacgtattaacaactctcgtttttgtatttcaatatttttaagtttttgtctatatatatgttttcttaatgtgtagttactttaatgtgattgaaattagagagaaaaacataaccacgctcttcaattctgaattttacaaagtaaactttctaaactttctaatctatatgaagagttacatgttctttgattaacatgattgatattttaagaaagttccaaaataagttatgaaagcaataattttgaaacctaaacatctatatgtactttatatcacaaatatgggtgcttatcagtgatttatatcaaaagattgaatcaaaatatgttgatttttataatatcgtcttgtaacgtttctatagttgtcactaagtagtcacatttggcaacgtatctgtaacatatttgcgactgtctggctgcaagtgtcacaaaacggtcgctctttgcaacttatttgcgaccaaaataatatatagtcgcactttgcaactgattacctacatattaacaactctcgtttttgtagttcaatatttttaagtttttgtctatatatatgttttcttaatgtgtagttactttaatgtgattgaaattagagagaaaaacataaccacgctcttcaattctgaattttacaaagtaaactttctaaactttctaatctatatgaagagttacatgttctttgattaacatgattgatattttaaaaaagttccaaagtaagttatgaaagcaatgattttgaaacctaaacatctatatgtactttatatcacaaatatgggtgcttatcagtgatttatatcaaaagattgaatcaaaatatgttgatttttaaaattttgtcttgtaacgtttatatagttgtcactaagtagtcacatttggcaacgtatctataacatatttgcgactgtttggctgcaagtgtcacaaaacggttgctgtttgcaacttatttgcgaccaaaataatatatagtcgcactttgcaactgattacctacgtattaacaactctcgtttttgtatttcaatatttttaagtttttgtctatatatatgttttcttaatgtatagttactttaatgtgattgaaatttgagaggaaaacgtaaccaagctcttcaattctgaattttacaaagtaaactttctaaactttcttatttatatgaagagttacatgttctttgattaacatgattgatattttaaaaaagttccaaagtaagttatgaaagcaattattttgacacgtaaacatctatatgtactttatatcacaaatatgggtggttatcagcgatttatatcaaaagattgaatcaaaatatgttgatttttaatattttgtcttgtaacgtttatatagttgtcactaagtagtcacatttggcaacgtatctataacatatttgcgactgtttggctgcaagtgtcacaaaacggttgctgtttgcaacttatttgcgaccaaaataatatatagtcgcactttgcaactgattacctacatattaacaactctcgtttttgtatttcaatatttttaagtttttgtctatatatatgttttcttaatgtgtagttactttaatgtgattgaaatttgagagaaaaacataaccacgctcttcaattctgaattttacaaagtaaactttctaaactttctaatctatatgaagagttacatgttctttgattaacatgattgatattttaagaaagttccaaaataagttatgaaagcaataattttgaaacctaaacatctatatgtactttatatcacaaatatgggtgcttatcagtgatttatatcaaaagattgaatcaaaatatgttgatttttataatatcgtcttgtaacgtttctatagttgtcactaagtagtcacatttggcaacgtatctgtaacatatttgcgactgtctggctgcaagtgtcacaaaacggtcgctctttgcaacttatttgcgaccaaaataatatatagtcgcactttgcaactgattacctacatattaacaactctcgtttttgtagttcaatatttttaagtttttgtctatatatatgttttcttaatgtgtagttactttaatgtgattgaaattagagagaaaaacataaccacgctcttcaattctgaattttacaaagtaaactttctaaactttctaatctatatgaagagttacatgttctttgattaacatgattgatattttaaaaaagttccaaaataagttatgaaagcaatgattttgaaacctaaacatgtatatgtactttatatcacaaatatgggtgcttatcagtgatttatatcaaaagattggatcaaaatatgttgatttttataatttcgtcttgtgacgtttaaataattgtcactaagtagtcacatttggcaacgtatctgtaacatatttgcgactgtttgtttgcatcactatgtgtgactaatttccttttctattgtgactaatttctgcctgtttttgcaaccaatgcgcaacagttttaaaaatttattaaaattttatttatcttcgcgttattattttgcgaccattgagggactaaatagtgacgattgttttcttttaagtggaaataaacctctcgactttctcatttatcgattcatttctaaaatctaaggttttcatttctctcatctctctcgaatccaagccaaaatacttctagaatccttctctttctcttcgatttctctccattctcttctcaatttctcttcttctgttctcaatttctagatctagggtttctcttcttctcttctcaattcaacctggatttggctttatggctggtggtggtagaggcaaatcaacacgcagtcgaggtagaggtagggaatctccgc

SEQ ID NO: 35579 - DNA, 926 bp, Arabidopsis thaliana landsberg
  unsure (1)..(926): unsure at all n locations
actcgtggtgggattttttatagaaagtggctaatatgccctctcgtgcttagtttgatttttttcgcgcacatataatatgccgggaatataccaccaactctgttactcgttctcccatgtggcgcgtgcattatacacgtggtgcgaatcaacggctacgttttactgataggtggctcgtttagttttgcactgcctttgggtgcgcgtgaccaagtcatttggcaaatgtgttttaatatttgcgaactattattaataaaaaagtgagcgacgttgtattttgatgagggaacgaccgaacgcttggcgaccttctatgattgcgtagagacgattacacttattgggctatacctagtaccgttagcccacaatgtttttatttctttcccacctaaaactaaaagtactcacaagtcacaacttaaaccaagtacacaaggattttatcatgggattatcgtgtttgaagactaaaaagagcacaccatcacccccattagtgcaggtagagtaagacagtaacttttgggttcatattaccgagcaagaaccgttatttgtgattagacatgttataaaccactgctttagtgactatttaaaacaatatattacatgtcgtaatcatgcaacctaactatgttttcattaatcaaatacaaagtctacaagtatggacattaatctacaagtttacatcaatctgaacagcgacgaagagaattaccgaagattgtcgaaacagagtctacaagtatggacattacgatcggtcaatctaagcagcctcaatttttgaaatccatagacgaattagctgnnnnnnnnnnnnnnnnnnnnnnnttcaaacgccaattcgatgatatttagaagcacatcgagtcaatcgaaacgcattgattccaactcggagtacg

SEQ ID NO: 35580 - DNA, 1407 bp, Arabidopsis thaliana landsberg
atcttacggttgcatctccactgcgaccacatcgtctatacattagtttggtggaccacaagtgtgattcaagggaggtctgccacagcccccgcgagtctgtactgctatcattctcatcgccttctagtttcgaccaagatttgacgaccatgcaagggatgggaggactacatatggtgactcttcgtggcttgattttatacattgtttgcggaaaagcgtgtctctataatcccaccaccagacagagcgtaaccttacccgccatcaaattcaacatttttgtccaaggaaacgaacatagtctcctctacttcttggggcacgatcctgttcttgatcaatacaaagtagtttgcacttttgtgtcatcatcctcacaagatttggaaacgataatctcggagcattgggtcttcgtactggaagttggaggttcttggaaaagaattgagtttgatcaacctcatactcctacgagatctggactgtgcatcggtggagttatatattatcttgctttcactagtatgtttcaggatatcgttgtcacctttgacgttaggtctgaagaatttaacattatccaagcgcctcttgtgttgtctgcatatgttgactctctggattttatagagtacggtgggaaaccagctattttttatcatactagtcttaaagaaaacggtttggtagacttatgggtcttggaaaatgctggaaactggtcgaggaaagttttgagtttgcagccttgtcagctgcatttagttgataacgacattccattgacgttagtagacacaactcaaaacggcgaggttgtcttggtaccaagtgacttgtgttcccctttttacattctctattatgatatacagaagaatcatctgaggaaggttgaaatccaaggaatgccggaccataagaaggatgggatcaaaggaacaccggactttggtttcaaacttatggataagagtgagagcttcatctacttggaaacttgaccaagacggcaagacgtttgatttcctttttttttttttttttttttttctgtgggttgtttaagaatacaaccgagttaaatgatatttctagttacttgaataaatattatcttcatgctcttgattttattggtctcctgcttaaatgcttttttcaagcagtagcatattgaggatagaatcttttttgtagaagtttggattttggaattagcagattatttttaacgttatctccattctctttcattatcagcacgatgtgttcagtctgttgtttggtattgataatgatctccatacttcaaaactcattttgttaaaataatgaatgaagaatcttttttcatcatgcaaacacaaaagagaacagacgttgtttttggacttc

SEQ ID NO: 35581 - DNA, 1730 bp, Arabidopsis thaliana landsberg
  unsure (1)..(1730): unsure at all n locations
gacaaccgcctaagaaaccgggggctccactacccgccggatctacaccagctcttccgatccaatacactatggtccctggtccgtcgctagctgcggcaccagctccgggacctggaggcaagcatcaccacttctacggtgaggctcaagtcaaagatttcatccatacactgttacattacggcggttacaacgagatggcagatattctcgtgaatctgacgtcactcgcgacagagatgggacggttggtgtcagaaggctatgtgttaacggttttggctcctaacgatgaagcaatggcgaaattgaccacggatcagctgagtgagccaggagcaccggagcagatcgtatactaccatataatccctgagtatcaaacggaggagagtatgtacaattctgttaggagatttgggaaggtgaagttcgatacgttgcgttttcctcataaggttgcggctaaggaagctgatggttccgttaagtttggtgacagtgagaagtcggcgtatttgtttgatcctgatatctatacggacggtcggatttcggttcaggggattgacggtgttttgtttccacaagaggaggaggttgttgaatcggttaagaaaccggttaagaaaattgttcagccgagaagaggtacgcttttgtttttattgcatttgatcttttatgtgtgttcctcaaattgtgtgcttagtattgattttctgcgtgtggcaaagtttagataatgaagtagcaatagtttggtacattgatctagtgtttaggtatgatcaaatccaattggcttcctggtttaggtaaataaccgaggcacaatgagatcatgataatggtagtgttgtcagttgtgaatgtttgagtaagaacaagattagggttctgagaaagtaagatggattttagtaattcgaacaaaattagtgttccaagaatggaagatggatctagtaatccaatcgtatgccgtggaaaatatgagccaccttttctgtcaatggctaggtgcagaatatgtcaactgcgagcaagaggcagagattaatagtatgttaggagagtgaagatttgtatgaatattggatgctaataaacacaagcaagaatcaaagaaagtgttgcgttcttttgtgtgtgtttgcttgtttggtcatgcactagctggctgtgagcatcttgtcatgtttcctaccttcaagatgttttgttagttaaaatattagataatttattaataggtttttgaaaagtagaaatccaaaatattattataatcaaggtgacaataatggagagattagagagtgattgtgatggacgactttgacctaataaaggtgttgctgttgtgattgaaacaaacagggaaattgttggaagtagcctgtagtatgcttggtgnnnnnnnnnnnnnnnnnnnnnnnnnnnnnnnccggtgaattcgcaaacccgccaaagaattgatgtaaacacattcaaaaaggttagtatttttgcatatttttgtttcttctgcgttcaagcaatcaccgatggtaacagaaaatttcattacattctctttacacaacagctgattgaaggtttggcctttggtgaatagaaaaggaagagagaggacaacaacaacaacgttttaaaaaaccaatattccatggaattagaaggattggtttgttgagttctttttttctttaaatatatatttt

SEQ ID NO: 35582 - DNA, 2615 bp, Arabidopsis thaliana landsberg
aagagtctgcaaacgactccaaaacaagtgagtccgccaaaggtgatgatggtgttaaggtaactgattccaatggacctgaagggtcgaaaggagctgcaaagattgcctctaagcattctctgccgttgaatgatcatgcatctttcataaaaagaaatccctctgtcagcgcagtaaatgttgtagagaagaagcagatcaatacacaaaaacttgtgacgtctgataagtcgcaacccaagcttgaactgcagattgtggagccgactactgagatgaaaagagtgattgataagatagtagacttcattcaaaagaacgggaaagaactagaggctactcttgttgcacaggatgtgaaatacgggatgtttccattcttacgtccatctagcttataccatgcatattatcggaaggttctccaagaagccgaagaggtaattctgtttcaagttcttaaaatgttcctgctacaaatttggtgtgttttcacgtgctttttaaaccttgtgactgtaactttcactaaaatgtaaaacgttggttgatttcatatgcagttaaaatcaggtgacaaaggcgttattatcagaaaagaagacgtgaagcaagagaagatgggcaatgctgtaaaagatagcaaacacgggttgggagtgttttaccagatgattctgccaagaaagagaaactaaaaatggttagtgacaaaccaaaggtcgagttgcacaatgaaccattcaagcctgtccaaccgcagatgagggtcaatgtggatgcgaatactgctgctgctattcttcaagcggctagaagaggcataaggaatccccagttggggattctaacaggcaaacccatggatgagacttctcagacccttggaaatgatgtgagttacccttcatctaagtcccctgatttggccaaatctacaggtcaatcactctctggctcgactgctgctagtgaagctgattcttctgaagcaggcttgtctaaagagcagaagttgaaggcagaaagattgaaacgtgcaaaaatgtttgtggccaagttaaaacctgatgcgcagccagttcaacaagctgaaccgtcgcgaagcatatcagtcgaaccgttggactatgggatttctggattaggtgctaaggctgccaaagaaagagacagtagctcgattccatatgtagctgagtcaaaactagcggatgatggtaacagtgaaagacgatcaaagaggaattaccgttcgagatcacagagagatgaagatggtaagatggaacaaggagaagaggaagagagcagcatggacgaagttacagaagaaaccaagactgataagaagcattcatgtagtagaaaacggcataaacataagacacgatactcttccaaggacagacattctcgggacaagcacaagcatgagagctcctcagatgatgagtatcacagtcgttcgcgtcatagacacagacacagcaaatcttcagataggcatgagctttatgattcttctgataatgagggtgagcaccgacacagatccagtaagcatagcaaagacgttgattattctaaggacaagcgtagccatcatcacagatccaggaagcatgaaaagcaccgtgattcatctgatgatgaacatcatcaccaccgacacagatccagtagacacaagcacgaggactcttcagacgttgagcatggtcatcgtcacaagtctagtaaacgtataaagaaagatgagaaaacagtggacgaggagactgtttcaaagtcagatcagtctgatcttaaagcatctcctggagataacatcccgtatctgcaaaatgaaccatctcaagtttcggatgagctaagagccaaaatccgtgccatgttagctgataccttgtacgtttcttctaactgaacgactcttgaagactttctagttctatttaggtgtctactagtattaagttgacaatgtcaatgattgggtctgatcgattagcgggtttgttcggttttcaggggagatggtcggtgagcatctgaagcataaaggtcaccgatgttgcctacgagaagaagagttgtaatattaaattttaatgtattttgcaaactatttacgaaattactctgaaaaagaccttttaaagaaacctttttaatctgtgcatttgcaaactataaaccttttaaagaaaaatctgtgcttttgttaatcagttaatcatcagaccttatcatagaaatttatttagtagccaatttgcattacaatattaaacttgattcacactattgcgacgtatatgtagttgatgagacagcaaattgtttatactatgttccttggaaactcaaacaataggattctgaatttaatcaaatataatcaggatgttagcaaataagatgtatgctggaaaattgtagttagtatcacattatgagacgttttttgcatacatcattatcatccccacgttaggtgtacgacgtattttaacttctgaaatggtgccgctcatcgacgaaattgttcagcacaaatctggctattatgtaaaaaacgtcttttagatgctggaagtaagggtctt

SEQ ID NO: 35583 - DNA, 6338 bp, Arabidopsis thaliana landsberg
tgagcgtaaaggtgtagctaaagttatcaaggccaatcagaagtgtaagttaatggatattagtggaaggaggcaggtggttgcttaaggacgtgtgcattcagtcgacccagaccaaaaggtacaccatgttcgcttgcaagataatgcagctagagtttgggtggatatagtgaaaatagatgatgcagcagtttggagggcatcagatgaaatcgagtatatgagagattcacttcgttcatctattgtatggccaatggataagctggtcatctattgagtttaagaataaattggggtaagtttctagattacagtgatccttgtacttttgttttatatatgaaactgaaatgagacattgttgattattgcacggaatgaagaaactttggtccaggttattgtgataccggttttgatggaggtgattatagaggtgctgcggagaccggttttgatggaggtggtgagacaggtttttttatcagtaatattggggagactagtggtgaaaaagctgttggtgagagtggtcacgaggcattaaaaaaagatggtatgttgaagctagtagcggctgtcgaggagatagatgttggtgagaaggttgttgatgatgaaatggttggagatgatgttgttgagacaaagccgggttttgggaacactgttaatgagattttgaggacggatgatgtgctaggtgttgttgagaagggtgttgatgatgagttaaggagtggtgttaagaaaagtgttgatggtgagttaaggagtggggatgagccatcatgtcttgagaagagtgttattaataatgagccgactagtgagaatgagacatgtggagagaaacgttttcatgtcagttcgccttttacgaaagaaaaggcaaaaatagaaagaaaaaaaaaagaaggagaaggagaaggcgaaggagaatgagaaggagaaggaaaaggagaagaaagaagaggatgagaaggacccaaagaagaggctttagtggttgggtttttagatatacttgttgtaagtttttaggtacaattgttcggattggatgtgttttgaggtttgttttttagattcacttgttgtaagtttttaggtataattattcggatttgatgttttttagtttttaaggttatgtatgaatttactaattaggtacaattggaaacgagcaggtacaactatgtatctgggtgtttgtatgaatcaactatgtatgtatgaatctaagttttttttggtaaatttcaactatgtatgaatcaaagtttcttttggcaaatttcaactatgtatgaatcttagagtgttgatcgaaatctaagtcatatagttttgattttaaaacaaaaaaatcaaaaaatcaaaaatatatacaaatatctgatgaaaatctgatgtgacgccgttatttttaaaccttggtgaccatcatcgtctccctcatctttaccatcattagtaaaccactcacccaaaccacttggcctcttcgacctcttcttacctccttttccatgttctccaacggatggatacttttttcttgtcttcttccttgttttacgtcaaaatctcgtggatatgctaagagtttcattatctcttccggaacacaccattgagaattatgttgaactggaaaaatcgtccttgtctacgccaaaacccaaagctttatccaataatacttgagcacgctattgcgactacaagaaatttgttcattgatagaataacgttatagcacggattactcaagtgctattgaggattatttacaaattttgttttcgtataacaacgttttatcaacgctattaaatagatttactcatatagcaaggttctaacgctataatagaattcttctaacccgggaaactaaaatgactcaaaccgcgaaacacttaaaagatttttttcttttttctgcgaacagacatattttccctctgagctcgagaaaaccctaagacatagccacactctctcaaaccgacgactcgaatcctggagccaccgattaaaccatccctttcgccactgccgttgttgaagtttaccgccgttaaagccgtagccgcgacagcaatcccaatcttggccctaattctctgattaaaccatctttctgaatcccaaatcgaaggcatgtctctctgtatctgtagatttatttcatcccgtttgttaacctagttagttttcttttagctgtcgttaatccattgaactgtttggttcttaatcacaggatttatgggtttctctaattcgattcttcaaattttttagcttttgcatgtctgtgttctttgcaaaattagaactgtttgtttatgtggtttgatttaggcgtatctggataaatagaatgcacaattttgctttaagaaattttagatttttagatttttgcaaaacttctcgagatttacaagtgtttgttgacattctattacaactatttttgtattgacttgttcttcgaatctttggatcttttagtgcttgtaatgacatggtctctgaatctttagattatttccacaacttgtcaaacacattcttgcataaacaaacacatgaaactagatatactcattctagtttttgtttttgcaagtgctgctgtgtaactaatgggaatgtgaagctgatatttggctcttattacgcgacaggttagtatcctattgatcatcactgtttctttttgtcttgaacatcactgtggctttgtgtattgaacatgcctgtttctttttgtcttgaacatcactgtggctttgtgtattgaacatgactgtttctttttgtcttgaacatcactatggctttgtgtattgaacattactgtttctttttgtcgtgaaaataactatggctttgtgtattgaacattactgtttcttttgtcttgaacatcactgtggctttatgtattgaacattattgtttcttataatcttgaacatcactgtggctctttggcttgatcaccactgtttctttttgtcttgaacatcattgtggctttgtgtattgaacatgattgtttctttttgtcttgaacatcactatggctttgtgtattgaacatgattgtttctttttgtcttgaacatcactgtggctttgtgtattgaacatgactgttttgttttgtctagaacatcactgtggcttcgtgtattgaacattactatttttttttgtcgtgaaaataactgtggctttgtgtattgaacattactgtttcttttgtcttgaacatcattgtggctttgtgtattgaacattactgtttcttttttgtcttgaacatcactgaagttttttgtcttgaacatcactatttctttttgtcttgaacatcactgtggctttgtgtattgaacattactgtttctttttgtcgtgaaaataactatggctttgtgtattaaacatgtctgtttcttttgtcttgaacatcactgtggctttgtgtattgaacattactgtttcttttttgtcttgaacatcactgtggctttttgtcttgaacagtactgtttcttttgtcttgaacatcactgtggctttgtgtattgaacataagtgtttcttttttgtcttgaacatcactgtggctttttgtcttgaacatcacctgtttctttttgtcttgaaactcactgtggctttgtgtattgaacattgctgtttctttttgtcttgaacatcactgtggctttttgtcttgaaaatcactgtgaatatgagtttgcggctgaatataaattgatttagatatgtttcaagagtctttcatataatctgaaatcattggtatggtattaaaggttttaaaacacgttttcaatttataatggtggacaaggattgggtgcatctttgcaggtaagattttcagtaggaaaatctggagatcttacctctctttttattctccttttaactcttcactgaagagttgatcatataatgatttttttttattaccctttaactcttctctgaagagttgatcctgcttatgagagaggggctacaaagtttgtgcgagatgtggctgcagctctgggagacgtagatatgattatatgtccctgcattgattgtcgctgtttagatcgtcattcagcctctgttcttgttgatcatcttgtaacaaggggaatggatgaggcatataagaagcggtgtgactggtatcatcatggggaatcaaactctagggctgagaatgataccaaagtgagtcagtggaatgatgaggtacttgggttatatcaagctgctgaatttatggatgaagagtttgcttataaggttggctcttaagtgagattgtagagtgtgaagaccaacgagaagatgagttccttgcaaagatattggacgctgaaaccccactatacccaaactgttcaaaccacagcaagttatcggctattgtgactttgtttaggattaagacacataatggctggtcggacaagagcttcaacgagctgcttcatacattgccaagcatgttgccagatgataatgtccttcacacatcattgtatgatgtcaagaaatttttaaagagctttcatatgggatatgaaaagatccacgcatgtgttaatgattgctgcctctttagaaagaagtttaagaagcttgaaaaatgtcccaaatgtaatgcttcacggtggaagactaatcagcacattggtgaggtaaaaaaaggtgtcccacagaaagtattgagatattttccaattataccaaggctgaagagattgtttagatcagaggaaatggccaaggacttacggtggcatttcactaacaagagcacggatggaaaatttcgtcatccggttgattcagttacatgggataagatgaatgataagtatccttcatttgcagctgaagaaaggaacattaggctggggctgtctacagatggatttaacccatttaacatgaagaatagtaattatagttgctggcctgtgctattggtaaactacaatttgcctcctcacctttgtatgaagaaggagaatataatgttgacattattgattcctggtccacaacaaccaggtaataatatcgatgtctacttagaacctcttattgaggatttgaataatctgtggaagaatggagagttaacatatgatgcttttagtaaaagtacttttactctaaaggcaatgcttctatggactattagtgattttcctgcgtatggaaaccttgctggatgtaaagttaaggggaaaatgggctgtcctttgtgtgggaaaaatacagatagtatgtggttgaagtttagcaggaagcatgtctatatgtgtcatagaaaaggtttggctccaacacacagatatagggaaaagaagacttggtttgatggaaaagttgaacataggagaaagacaagaattttaactggtcatgaagtttatcaaaatctgaaaaacttcaagaatgattttggaaatgtgaaaaaatctgggatgaagagaaagagaactgtctataaagaaccagtctatgatagtgatgatgtatccagtgaatccgaggaagatgaggaagtagaagtagatgaggatgagttatctagatggaagaaaagatcaatcttctttactttgccttattgggaggtatgattacttgttttcagatttaaatagcttttatatgtttaagtatgatacatcgattacttctaaaatatatgtatgtctatattggaggatctcctggtaaggcataacttggatgtaatgcatgtagagaaaaatatggcttcaagcattgtctctacattgttacattgtagaaaatcaaaagacggtctaatgcccgtaaagacctccaaaatcttgggataaggaaggatttgcatcctacaacacaagaaaagagaacttaccttcccgcaacaccttggtctttgtcaaagaaggagaagaaaacattttgcaagcgcctacatgactttaaaggtccagacggttattgttctaatatagcaagaggcgtttccttagaggactgcaagataacaggactcgaatcacatgattatcatgtgttgatgcaacagcttcttccggtttcacttcaaggtttgttaccaaaagggccaaggacagcaatcttaagattatgtgcattgtttaaccatttgagcgagagagttattgacagagaagttataacagtgatgagaactgaaatagtggaaactctttgtatgtttgaaagatttttccctcctaccttc

SEQ ID NO: 35584 - DNA, 1635 bp, Arabidopsis thaliana landsberg
atagacattcataagtacaatgtacatatacagacattaactacaacgagattttatgaagaatttaatccaatgtaataaaagaacaccacagttttgataaacatggcggtttatgattattcaagtctatgactctataaaggaacaagaacacgaagaccacagtgtacaacacaaataatattgtgattctccttgtgaacacttattatatacgtatttttactatattgaatattatgtataacaactgttatgtaaactatttctgcaattaaattttactaatcatcaaaaaagaaaaaaaaaaaaatactaatcatcaacatttgaaaaactaataacaaaacactaaataaaagttaatgtatttagtcattaaacactgttttattttcttaggtaatcaaagtctctccaacttttaaaagacaaatcacttttttttaataatatacttcaaattaataaaatatctatgtagaattatgcaaaacaaacttttttacacacaaacccgacaatacatatatatccccatattgtcacatatatacaataattttgtatatataaaatataaaccatacgaaacccttttaccgactgttctctctctcctctcctactttacttatttcattcaaagcaagaaatcgaaaaaggaccccaaacttttttcttccttcatctttctctcctcccatcatcatcaccatgtcctcccataccaatctcccctctcccaaaccagttcctaaaccagatcaccgtatctccggtacatcccaaaccaagaaaccaccgtcttcctccgtagctcaagaccaacaaaacctaaaatgccctcgttgcgattcttccaacacaaagttctgctactacaacaactacagcctctctcaaccacggcacttttgcaaggcttgcaagaggtactggacgagaggtgggactctcaggaacgttcccgtagggggtagctaccggaagaacaaacgtgtaaagcggccatcaaccgcaaccacaaccactgcctccaccgtctcgacgactaattcttcatcccctaataaccctcatcagatctctcatttctcttccatgaatcatcatcctttgttctatggtttatcagatcatatgagcagttgtaataataatcttccattgatcccaagccgtttcagtgattcttcaaagacttgttcatcaagtggtttagagagtgagtttctctcatctggctttagcagtcttagtgctcttggattatggcttccgcatcagatgagtcatgaccacaccattaatggtagcttcatcaacaactccacaacaaacaaaccctttcttctatcgggcctattcggatcctcgatgtcttcttcttctactcttctccagcacccacataagcccatgaacaatggtggtgacatgttgggacaatcccatctccaaaccctagcatcacttcaagatttgcatgttggaggtaacaatgaagatatgaagtacaaagaaggaaagcttgatcagatctctgggaacatcaatgggttcatgtcatcatcatcatctttggatccttcaaactacaacaacatgtggaataatgcaagtgttgtc

SEQ ID NO: 35585 - DNA, 3899 bp, Arabidopsis thaliana landsberg
  unsure (1)..(3899): unsure at all n locations
gcatactacttgttgattcttgcaaaatccaaatgcctttttttcacgcgactttatcgtctcgtagagggtggagaaacacaaaagagatctcattgaagaaaactctcaacatttatctaaagagaacgtaagtaagagagacatacatcatcttccctaagcaaagattcagggacgaatctgtttcacaacgaaaacaaagaagaaatagttcatagtcatataatcaatcagctaaaccaaatggaaactaagtaatgaactcactcagtctttcccggagtatggtccttggtggagtcagacatatcacaacccaaaagccacctacaaggtttgaaagtcacagacaaaacaaaagtctgaaactttttttggagaaatattaaaggttgaaactttcacaaagccttaataagcagagagattgattcgaactcaaagcaatcgtttcctatatctaagttacaattatagtccaaattcacacacacacccatataaaaccaaaaggagagaagtggaagaagaagaaaccttcttttgagacgaatttgctcatcttgatccctaatctgtgaaagtatcgaaccaaaatcagtcttgaagaaaactgaattattatccattgccatcttcttcaaggaattggaatcgactctcctttgaattgatatcgattttggtctgtttagtttgtcttgttcacttgttctcgtaacttaaaccgggttcgaagaatttttattaaatttttgagtaaaccggcttattaggtcaatacaaaaaagcccaatggacttttaagtttatggcccaaaatataacaaacgtatccgttctacttctgaaactaacctaaaacgcagagtgtgttgaagacgacggagacggcgacggcgagaagcaatgacgactgaggaaaataaaacaagcagaaataggaagaggaagagacagagaaaccctaaaccttctaaagaagaacctatcgagacgacaccgaagaatcaaaacgagaaaaagaatcaaagagataccaaaaaccaacaacatggaggttcttcagctccatcgaaacgacctaaaccttccaatttcctcgatgcggttcgttcgttatctctctctttctatcgagtacatttgattgaagtttatggagattttgatctattcatacgaaaaatcgcagcttagagagagattatctggtgggcaatttaggatgctcaatgagaaactctacacttgctcgtaagttctaatttcattctttccgatgatcttccttcagttttcacagtgcttaattcaaaaatctctgctttctcagtggaaaagaagctttagactactttaaagaagatccacaaatgtttgatatggtaaacatacattaactcgagaacaagaacttatgttgttgattcttttagttgaattgtaaaattgattctgttttgttattagtatcatacagggtatcaacaacaaatgtcaaattggcctgagcttcctgttaactccattattaattggctattgtctaatagctcttctttagttgtggctgattttggctgtggtgagaatttcttatcctgtattgctatatcttactttttgcctgctgaaattgtatcactctatcgacactaatattgtctcnnnnnnnnnnnnnnnnnntaaaagtgtgaagaacaaagttttctcctttgatcttgtctcaaagaacccctctgttattgcctgcgatatgtcaaatgtacgttgaatctttactccattcatgttaatttcatgatttctttgttccctcagacttaactggtatatttggggtttactttgtagacttcacttgagtcttcatcagtggatgttgcagttttctgtctttcattaatgggaacaaactattctagttatatcaaagaagcacatcgagttcttcgtccaaggtacagctttgtttactttccaatctcttcttgttcatgggattttgtcatgattctgaataatacttcctatggttttattgtattccacagtggtatgcttcttatagcggaagtaaagagcaggtttgatccaaacaatggaggagcagacccaaaagactttgtgaaagccgtttgtgatcttggatttacttcggttttnnnnnnnnnnnnnnnnnnnnnnacactcttcttctttttttcatttccactataagaaagaaactcatttggttctttgaacaggacttctccaataagatgttcatcttattccatttcaagaaaaaggttagtgaaacatacttcctttcaggtttgttattagtctcgtagcttagatctacactttgtttagcaataatccttcttttaatcgtgtggttatataggagcagatgaattcaaatcagaagataataaagtggcctgagttaaaagcttgtttatacaaacgtcgatgatgagtttacaatggaagattactcagaatactatttttgttctccactgttgtatcatttaggcacattgattgtcctcaaaatctcataaatttgcaccctataaacttttgtaagagaaaagcaatcacagatttttcaagtgtttagatacagattttcagatttttgtcaacatagtgatgaggttcaggtaaagtgagatttaggccgtgaatcgtgaatggtgtggtgacgcattcccctaccctctgcaactgcattttttaagttttaactagtcattcaagtttctaccaaaatttaagttcaaagtgtaaagtaattataacaagtatagcctaattcgaattacaaagatcacaacacaccctcatttgtaaccatgaatcccttacggctttacctttcactattctaaaagatcgctcgtaatcatcttgttgttacacaatacaacattcagtctctcactttctattctggcctctgggaaaccaaaaccacattgattgaaaatctctaaacttttgcaaaacacttctttcatttatggagagatgcataagcaaaaaaatcccttacctctacaaagttagaccaaatgttaagttagaccaaatgtttttcttgttttgttacagatgatatgatctcacttcacttataaaagtacaaaaaggactgatcttgtagtaaaaaggttcacctttctcaccccaccgacattattaatttcttttgtttttgttttctggtccacgatctttaaattcatgcacatttttttgtccttttgtcaattaataaaaacagtgttgttcgttaaagattgataaaagattttgtttccttcttcctactatcgtcttgtttattaaaaaaaaaaagacaaatatttttgtttcactgctcctatcttcacattccaggagacttcctttcaaaattttcttaattataattattcacaagtttgactttttctgttcaaatttggtttaagtcggaattgtaaatcgatttacagttctataaattttgccgaccaaaaaaggcaaaacaaaacagagaaagagaaggataaagagacatgagatttcctgtcactttacttacgcggacatagcaaacatctttttgatcattcagagttttttttgtcctattaccacttcaaatccaaaaacaaaagtttataaatttatttccctcaaagtaccacttaatcatcgactttttgaccatttctccatctgggttttattatcttcagttctttgtgtcacaactccagtttctttttgtattttgttgtttttttcacaaattgagattgttgtttcctataaagtaaagttttattctatttatggaagtctcttgatttcgcttttataacctcaaaaagcatctttcttgatag

SEQ ID NO: 35586 - DNA, 1979 bp, Arabidopsis thaliana landsberg
ttgtcaatataaactatgttgtgtatgtatttataatagtaaaaaagattatggttttgaatatatatatatatatataaaacgccaattcccatgtagcgcgtatgttcacctagttaaaataaaacctagtttacgcctttacggtttaccaaacttatgacaaaaagtttaataatgatagtgaaaaataaatagtttatctatatatttcagtttaactttcaaataaataaaatattaaaagctgaatttttcttataacaatcagtgtttcggttgtaagaaattttaacatattttgtttttgttttgtttcatgaatgaattagtcaacgaaaccaaggaaaaggtacagagaggaacaaagacagagtagcaaaactgagtaaagagtaaaaaaaaatgcagagacaacccaaactaacatatttttcttagtttatagatagttggtaactatatacatttttaacctaaatagaatttaattaagtaggacctcttaaaacttaaaaaaaatgaagacttcttttgcacacaaccaacaacaaaaaaagaaaaagaaactgtagagttctataaaagaaatagatctcttcgttcaaagtggagagaaccaaaacaaaacaaagaaagggaaggagaaagattaatcgatggacaccatgaaggtagaaactattggtaaagagatcataaagccatctgcaacaactccaaatgatctccaaactctccaactctctatttatggatatactaatgcctccagtttacacagtagcctttctcttctacaccaaaaatgatttgatctctcaagaacacacttcccacaaactcaagacttctctgtctgaaaccctgaccaagttctaccctcttgccggaagaatcaccggagtaaccgtcgattgtaccgatgaaggagctatctttgtcgatgctcgtgtcaataactgtcctctcactgaatttctccagtgccctgatttcgacgccctccaacagttgcttcctctggacgttgtggacaacccatacttggctgctgccacgtggcctttgctgctcgtgaaggcaacttacttcccatgcggaggcatggccataggaatctgcatcactcacaaaatcgcggacgcagcctccatctcgactttcattcggtcctgggcagccacggctcgaggagagaacgatgccgcagcgatggaaagtcctgtatttgctggagcgaatttctacccaccagccaatgaggcttttaagcttcctgccgatgaacaagccggcaagagaagcagcgttacaaagagatttgtgttcgaagcttctaaggtggaagatctcaggaccaaagccgctagtgaagaaacagtagacaaacctacgcgggtggagagcgttactgcgcttctctggaaatgcttcgtcgcatcctcaaagacaactacttgtgatcacaaagtgctggtccagcttgctaacttgcggtccaagataccttcccttctgcaagaaagctctatcggaaatctcatgttctcttctgtggtcttgagtattggtcgaggaggggaagttaaaattgaagaggccgttagagacttacgaaaaaaaaaggaggagttaggaactgtgatcctagacgagggtgggtcatctgactcatcttctatgatcggttctaaactagcaaatcttatgctcaccaactattctcggttgagctatgagactcatgaaccctataccgtgagtagctggtgtaagctacctctttacgaggctagctttggatgggattctccggtttgggttgttgggaatgtgtctcccgtgttaggcaacttggccatgttgatagattccaaggacggacaaggaattgaagcgtacgtcaaactgcctgaagagaacatgtcgtccttcgagcagaacccagagttgctcgcctttgctaccatggaccc

SEQ ID NO: 35587 - DNA, 1393 bp, Arabidopsis thaliana landsberg
  unsure (1)..(1393): unsure at all n locations
ttttatagaaaaagacagaaaagtttccagagaatccattttctttttggacccaggttaaaaaagaaaagggtggggtagtaacttacatatctcctctctccctccaaaaaatctcaacgacccaaaaacgagcgtacgaaataaaacacatcagaaattaaacaaaaatccaaaaggcaaaaacaaacaaattctaattttatttcctttaacctaaaaaatcaaaactcttctctttctctttcaaatctcttggccgcgggacttaattttccgttaccccgacccgttaaaaaaccttcaaagaggctccgattttgatttgaaacactattaaacattatttacctaaaaacatgagttcactacaatgacccgtaccgaaccaaaccggagccggagctccaattccgattccgataagaattccggtaacgtcggcggaggtagaaccaccgggatgagggttattgttccgttacaaggtgtggtacaaggtcgtggtggtttattcttaggctctgtgattccttgtgctttcttctactttcttcagttttacctaaaacgaaatcgtaaaaacgacgaatcagataattccggtgaacaaaattcctcagcttcttcttcttcttctcctaattcgggtttaccggatcccacccggtcacaatccgctggtcatctcacggagcttactggtttacctcgttctctctctcgtattctcctctcgccgagaaattccggtggagctgtttcggtttcgggtcgggttaattgtgtactcaaaggtggagattcttcgccttactacgttggtcaaaaacgggtcgaggatgatccgtatgatgagttgggtaacccggacggagttatccaacttggtttagctcaaaacaacaaggttttgtatctaaatttcttcaaaaaaaattgaaactttttgtgtgattatttcctggatttgactgatctctttcttcttataatagttgagtttggatgattgggttttagagaatccaaaagaagcaatttcagatggattgagtattagtggcattgcttcttatgagccttctgatggacttttggaactgaaaatggtttgttatctcttactctaaagttctaaacttttgtttcattaatcttattcactggagtgtcttgtttggggatttgtatgtgttcttgagagaagttttctggattatgtgataggctgtggcaggatttatgactgaagctaccaaaaactcggtgacttttgatccatcacagttagtgttaacttctggtgcatcatctgctattgagattctttccttctgcttagctgattcnggaaacgccttccttgttccactccgtgttctccgggtaa

SEQ ID NO: 35588 - DNA, 1084 bp, Arabidopsis thaliana landsberg
  unsure (1)..(1084): unsure at all n locations
tattttcgggttgttacgggtggagatgggaatagagtgcttgagttagtgaattgggacacgaatcttgcggtaagtgagctcgagagactgtttatgattgacgaagataaggcgaaacgggtgtttaagtttccggtgaagcatgggaaggagttggagttggaagagaaggatacgaggaagctgaatttgttgaatacgtttcctcttgtttcgccgtattcggatggttggaagcttgatgtttggagtttggaagcggagaagtatcgcgttgggattgtgcacgagttcttgaacttgacgttggagaagagagcttcgattcatcatattgtggagtttaaagatgagtttagtttgactagacagacttatcagatgttgaagaagcagtccatgagtttttacttggctggtactgagatgaactggactgtgtttttgaaggatgcttacgacgagaatggtgttttggttagtaaagatccacaggttgtgtttaaagaaaagctctataagtatgcagatatgcagcagatggagcaagttggttaattctggctcaaataatggatatagattgagcagagagatattatatctcgatagtcttggatcactctattcgaaagagagctcaagtagttgtagtatcagttatgatctaagattgacacataatgaattgagctacaatgttgtaatctgaaagcattttacactttgctacaaactggtaagctagctatgaatcaaagcccctcattggtttaaggaacagttgtgtttattatacaagatggttaaaatatgaagtcactgtgaagctgaaacacttctgcttgatgagcttgattctgcaattgagacagtagccaaagacttggaagcccatgctctagcattcatggctccttcctgcacaatgctactcatgcaaggttctttaagatacatggtcacagtatcgtgcaaggggttccctagtctcatgtttgacaccagtcctcaagtgaatttcacgaacacaaccattgtggnggaaaataagtgtagtaatctcaacaagacgaacacc

SEQ ID NO: 35589 - DNA, 3209 bp, Arabidopsis thaliana landsberg
  unsure (1)..(3209): unsure at all n locations
gtaaaaataattgtaacgtactaatgtttcatttagcaaagtatctaacgcaataatatagcaaaaaagtcttaatcctcttttattgtgctgaatatacatacataaaaatacagatttataattttaaatcgataaatatttttcaacaaaggatttgtaaacttatcgcgatatcatagtttttagcacgttaaacaaatagttatatacttatcatcaatatattacgattatttttattcaatggcatttttgtaattaatttaaaagaaaaggatttttttggtttatatattatttctcctttatacttacctaaataactaatagttatgcatagattcttaatttcttcatcttctatgcatagatattaatatagcccttatttaaaagagatataattagagataacattactttgaatcttttttcttcccgctaattctttttgcttgtttaattggtatgtcagcggaggcacacgcgtaagtacttgaggaggaaacaatttagctcaatcgtcccctgatttccggcttttgagctgtggtcatatgtatgcacaataaaattgaacctcactatctcattctcagccttactcacaaaacaaattctagactattgatcaaatacagatgaatatgaaacaaacaaaatgtgaaagagtgaagaaagcaccaaaggttttacgagtatgactcgatcggtatgatcgaatccatacgtctaaaccagattaattcaacaatccactatacgaaaatatacacatgtaggcatgtagctcgtacaacaagaacagagctcgcaacaacaagcggaatcaataaatgaagttaaatggagaagatagcaaactgagtactgttaccctatcatactaaatgataaaccctctatgagatttgaagaacttctcctttgttttccttcaagtagacgttttgcggttagaatctttcttcagctttccccgttaacacatccagctcacagcctaatggaacctcgcgatctcatccttactcacaaatcaaactcaaaacaattcatcaaacacaaataaacatgaaacaccgtaatataaaagaaagaacaacactaaggattacacttgaatctagatttgggaaatctaaatatccaacatatgatagtgttacaacaagaaccgagctcaagattcaaaagatgaagttaatcggagaagatagcaaagcgtaattatactctatcacatactaaatagaaaaaactatgaaatatttagagacttctcatatgttttccgtttagcatagtctctttgattagagtctttctttaaccttataactcaaccgaaccaagaaacttaagtttccgctgcacgagtataataaacttaagttaaattgggttatatatttttttatttaatttttttgaatactcagaagatttgatcatgaactactgaaacaacgtttttggccaataaataagaatttctacatcaaatttgtccatatagatcttatgatcaatttcacaaacaaggtttcaatgcttttgggtacgttgaactttttccacggacgttgtactaccgtgtgaagtttattcatgtcctcttggtttttttccaacgaaatactaagttacgtctaaccatccaaagaggaacaatgtatgatctaaattaattgaaaattcgaagaatccaatcacctttttttaggatcttaaaaattagaaagaaaaaaaaacaagacagaaaaaactagtgaccgatggatgtgaatctctaagtcaagattagtaaacctaaacttaaccttctacgaaaaattctattataagttcccactaatcgtcccgccattttaaaaagatataaaaccgtggggagaagtagaaataaaaacaataaaacaattaacaaaacaagaaaaaacgaaaagcatgcaattgtttttcgttttttgttgaaacaaaaaacaaacttaacttcaccaaaaaaactacagaaaaaaaaaagattcagtttccttttctttgtctccacttcttatataagagttggcgtttttttattacaaacataacttttgaaattatggctaattataaaggaagaggaaatgttatgataaggagcatattattgtgtctctatggtatcataagcattgtgtgtgtcaatggtactttcataaactacaaagatgctttaaccaaatccctcatcttcttggaggctcaaagatcaggcaaactccctcctaataatagggttccatggagaggtgactctgctctcgacgatggcaaactcgtaaatgtaagtttaggttatattacaaataatgtttattcataaatcagattttaaggttacaaaagataatgagataattatgtatgtataggtggacttgtctggagggtactatgacgcaggagacaatgtgaagtatggtcttccaatggcgttcacgatcacaacgcttgcttggtccacaattacctacgagaaagaacttcgagccacgggagagctcgaaaacgctcgtgctgctatccgttggggtacggattatttcctcaaatgtgcttctcgcaagaaccgcctctatgttcaggtttcaaacgaataatcaaatttgtgtgtttgcaattacgttatgctagaaacatgaacgtaccgttttattacttaaaatggttgtgcctatgaatatgatcaaataggttggtgatccaaacgcggaccaccagtgttggcgaagacctgagaacatgaagacgccaaggccggtgttggagataagcgataaagttccagaaaccgannnnnnnnnnnnnnnnnnnnnnncattcgccgcttcttccatcgttttccgccatgtcgaccacaaatatgcacgccggcttctcaacaaagccaaattggtatgcttatcaatctatgcatctttttatacataaatactatattgtttaaaactcttttgttaatgtttaaaacaaagactattttgttgatttttggtagaaaatgtgatatattttttttagagttcctttaatcaataaaagaaataaagatctgatcaaaatctcaatttcagcttttcaagctagccaaaagccacaagggtacatacgatggagaatgccccttctattgttctaactccggttacaatgtaaccctc

SEQ ID NO: 35590 - DNA, 4225 bp, Arabidopsis thaliana landsberg
gggtacagttgatgggccatatttgtggcttgctcggttctcaagaaacgatctctttcttcttgtctgtttgttttaagtcactttacagctacttcttcttcttctgtgctaagcctttcctctcgacttgatacttttctccagtaaggtacgtttccgatccttaatcgagctctagtatcattgatttggctatgttaatgaagatgagggtttagggttcttatacagacaccaatgtatctcgtgctagatctgatttgaagttatgagagaaaaactctttgattgacatctgattttggtttatctccttctggatcagcttatttttattgtagcttctctgattttcgatgggtacttatattttttttttcaatttgggatttttcatgattctgtagggtttgcaaagatgaagcttgatactagtgggttcgagacttccatgcctatgattggatttggctcgagcagtgatatgcttgatgagctttcttctgtaccctcgtttgatctaccccgtactaaagaggtgacttttttgtttttgtttgtgattcgaagcagtgtgagtgaattttcaatgttgtttgattacgaaactggttttatttgttggtttcagtttgatggatttcagaaaaaagctaaagacatgttgaagcatgcaaaaggaacaaccactctcgcttttatcttcaaaggtggtgttatggtcgctgctgattctcgggctagcatgggaggatatatctgtatgttctcttttatcactttacttttagttttgtttgcagactttgacgatgtttagctgtgagctctcttaagaattcctccaaaaatatgcatcctttcgatatagttgactttggtagaaacactagtacaatgaagattaagttagcttgttgttggttttggttttgtgctggagtgtcaaacaaatttctagttttcattctgttggccattaattgtgaaccagtagaggaaagaaaacgttgtgtgatttttgttaatgttttaaatctgtttaccacattcagcctcacaatctgtgaagaagattattgaaatcaatccttatatgctcggtacaatggctggaggagctgctgattgccaattctggcacagaaatcttggaattaaggtacctaactagaaatctttttggccgtgtctgaactgataacttggatctttgattaatctttctctctgtggttatcgggaatcttgctgccttgttatatagtgatttttttctatatttctaaaagcagcagattcatttaccttatcaaatgctttaagttttagttctgtctatattaaagaatgacaaagattttgcttgtttgatgttgaccctaagatcatacaagcctctttgaatgctaagcatgcaatttcagttgagcatgtggtggctttagatcccctttttttctaatcaaacattctgtagcaagaaagttcagctttttttcctctgtacttagatagcaaataaataaagaacttagtttgttgaatgcgatgtgaaattttggcatgttaataccattgtagacttcttcattttatcaccaacatcttgtttgttgattttatggctgatctcttaatttatttgtctatccaagtgccgtctacatgagctgcaaacaagagggaatctctgtttccggagcttcgaaacttcttgccaacatgctctattcataccgtggaatgggactttctgttggtacaatgattgctggatgggacgaaactgtcagtaaaaccaacttcatatcttcaacactgttattttcttcccacgcaaaaggaaattttgaaatgctaaatccttttacttcttgtataatagggtcccggactatactatgtcgacaacgaaggaggacggctcaagggagacaggttttcagtcggttctggttcaccatatgcttacggtgtgctggacagcgggtaagtcatttcccaaacaacatcttcatcgcttttgtcccaatctcaaaggctaaaaaccaaaatctaatgatgttagttaagcaaccgtttcatatttatgattttacttgcatcatcaggtacaaatatgatatgtcagttgaagaagcttccgagttagcgaggagatcaatctaccatgcgacattccgtgatggagccagtggtggagttgctagcggttagtaatctgaatgcatctgtggttcaaatgtaatatttaactttcaagattctgatttagctcataagtttgttctcttctcatatgaccagtgtaccacgttggtcccgaaggatggacgaaactatcaggagatgatgttggggagctacactaccattactaccccgtggcaccagctaccgcagaacaagtcatggaggaagcaacagccgaataaaaatcctgtttagttttctaatcgttcactccctttcttgttgttgcattttgtggtagtatatactgagttgtctctagctgaagctttggtattctattttactgatctgaaatgttgctcgcggattattctctataagattctctttttctgcaatcacattcttctcttactcggtgttttaaattccaatatagggaattgtgattgttttgcaccattttgttagttaaccagtctctccctatccaactctatcggcaatcctcacagatttgctcgtgatagctggtggctggcgttgtagagactagagagcaaagcttagtttggaccacatgaattgcttcggctctgtcccatcttttttatcaacctaaattcccaatgatgataacatccaccaactagaagagaagagttcatggttttgctttcgtctctcgtttcatcaatcttttttaaacacccctcaggaaacttgcacatcagtcaacatggaagtgtctcagtggtcgacaagggcatagttctgtcttaaatgatgcgatttttaccaaacggcgttcctattagcaacataaaaagccatgaggtccataactcgtcttcgttcaatgatccaatcaatcaatcaatgatttttgaaccacacgacatgattatgttttttttttgtcgcattcatgacttgaaaatttaacgtatcgatcacatcatcaaccccttataaacaagactctttgagattctaagctcatctatccaagaaacagaaaccaaggaaaccaaaaacagaggaaggcaaaaatggcgatcttgttctgtttcttcttggtttcgcttgttactctcgtatcatcaatcttttttaaacagatcaaaaacacaaaatttaatcttcctccgagccctcctagtcttccgataattggaaacttacaccatcttacaggattgcctcacagatgttatcataagctctccatcaaatacggtcccgtgatacttcttcatctcggctttgttccagttgttgtgatctcatcgagcgaagcagctgaagcagtactcaaaacacatgatttggaatgttgcagccgaccaaagacggtggggaccggaaaactctcttacggttttaaagacatcagttttgtgccatacagtgagtattggcgggaaatgcgaaaactcgcggttaccgaactttttagccttaaaaaggttcaatcttataggtatataagagggtaagagatcgaatttatggtgaagaaattgtcagaatcagctttgaagcaatctcctgtggatctaccttcttctccctcaccgcaagcataatttttagagtagccttagggcggaatttccacgagagcggctccattatcgatcaggaggggattgaagaacttgttaccgcggctacaacagctataggaagttttactttctcggacttcttcccaagtggacttggaagattcttagattgcttgtttcgtacgcaaacaagtataaacaaagtctcggagaagcttgatgctttttaccagcatgtgattgatgatcacttgaagccatcaactttggattcctccggagatattgttgccttgatgttagatatgataaagaaaaaaggacataaagatgatttcaagctcaatgtggataacatcaaagcagtcctcatggtaaagttcaaattttggttcatataactttttatttttcaaaccattgaataaacacttagtttaactactagctta

SEQ ID NO: 35591 - DNA, 2049 bp, Arabidopsis thaliana landsberg
cgacgcaaccttactcaatgtcgcttagagagagctatgggaaatgaagactggctttacatcttatcccacaaaatgtggagtacctacaatagaggggtttctatcatagaccccttctagcatccattcataataaatctcatcgtccttataaatactttatctttgataaacgttggatagatacactaggattcaaagattttgttaaagaaggatgggctttaccctctcgtggagagggcgttccaatattccaaaagattaggaattgtagacaaactatttctatttggaaaaaatccaatagaacaatttcgagaagctcattcttgaactacattcttagcttgaactaccatacgaagatgagattttttctattgaagacttacttgccctaaaatggaagctctgtcaggcttacatagacgaggaggttttttggaagcataaaagtagggagatatggctcctacttggggacaaaaacacaaaatattttcatgcttctacgaaacaaaaacgagcaaggaataagattattggtttactgaaccaagatggcctatgggtagacaaagaggtgggaattgaaagtctagcggtcgagtactttaaagacttgtttacaacatcagacccacaagattttcattccgcgcctcaggatccggcagtggtgagaacctgagatatgaatcagagactcactaaagagatttcaccagaggaagtcaaacaggcccttttttcgcttaacccagataaagccccgggcccggatggtatgacagcgcttttctaccagcggttttgggatttgaccggaccagatctagttaaagtagttcaaaactttcattcatctgcctcgtttgatgagcgcttgaatgagacgaatatttgtttgatcccaaaaatagatcgaccaaggagaatggcgtaattcagaccaatcagcctgtgtaatgttagttacaaagttatttcaaaagtacttagctctcgtctaaagaagattcttccggatttaatatctgagacccaatctgcctttgtggctgggagacttattacagacaacattcttgtagcccaggagaattttcatgccctccggacaaatccggcttgtaggaaaaaattcatggctataaagactgacatgagtaaagcctatgatcgtgtggaatggtcttttctgcgagctctcatgttgaagatgggattcgcccagaaatgggtagacttgattatgttttgcgtctcttcagtctcatataaagttctcctaaatggggcaccaagaggttttattaaaccaacaaggggaattagacaaggcgaccctatttcaccattcctctttattctgtgtacggaagcgttggtggcgaatctgaaagatgcagaatggaatggccgaatccaaggtcttcaaatctcacgtgcaagcccttctacttcgcatctcttatttgcagacgacagtttatttttttgtaaagccgatccatcccaaggtcaagaaatcatcaatattctccgcatttatggcgaggcatcgggacaacagctgaatgccgctaagtcatctgtaatgtttggtcatgatgtggacaatacgacccggaataccataaaatcaacttagggtatccaccgggatgggggcatgggatcttacttgggtttacttgagaaaattcatggctctaaaacccaagttttctcctttgtgagggatagactccaaaagagacttaatacctggtcagccaaattcttgtccaaaggaggcaaagaggttcttataaagtcagtagcacaagcccttccgacatatgttatatcgtgttttttactctctaaggctattcgctcaaagttgagtagtgctattgcaaatttctggtgaaaaactaatgagaatagtaatggtatccactggattgcatcggataagctttgcgacccacactctaaagaaagactaggttttagatcactggaagagtttaatctagctcttttagctaaccc

SEQ ID NO: 35592 - DNA, 2422 bp, Arabidopsis thaliana landsberg
agagcccattctactggagtttggtcggtttcggttgctgctggttagtgttggtttatatctggttcactaattgcattatattccaaacgtcatcatcgattccatacacagaaacattcttccattgtttgtataaattacgcagttttagaaacataaaaataacgcccccaaaaatgacatcaaaaaaattagaaaagagaagaatttatgtgatggttagtggagaatctgaacttctctcttgacatgttcagatttctctgcaaaaatgagttaccaaaaacagttacagggaaccttttgagggggcaattggtcaattaaaatgcagggggtcaaggggcggatacattgccctgcaaccacgtgggacctgcttctgcctctgcgttcgttagctatgacactgatcaacgcaccacctgtgtctagtactgagttggcacccattagctttaatccaagagtattcatcagacacgatagtttgctctcattactattttcgtccaattctttgatcttgttagcttgctcccgggaaagaatagtgtaaagctgaagacgattggttggatcttcttcaaagttgtcaaaacaaactctgactaatccaaacgatttcggattgtcggttaatgggttgaagacaaatgacaacttccctattgctatgtcgggtcttttgaacatatcttcaagaacgtttatgttaactccactatatctttgaacaggtttctttagattactgcgaagataattcgcaacatgtagaatctttgaggcttctcttaaaccacttaagtaggcaccgtgcattgtggctggatgttgccttgtcgtggcctcaccagcgaagaatagacggttactaacactttcagcaagaatgtcatagtccacaccagatgaaccaacccttacatgagaatatgacccatatgacaaaggatcacttccccatctagtgcaaaccgtctgtattgggtcaggcacaacaacacctttaggaccatatatgcctacaattatgtcaaaaacattgttatggcgagaacttggaagcagcaaaaggttcatgacgttatcaaatattacctctgagtttttttaaaacacggtgaagtaaaacagatggttctgtgcactcaaatcgttgagcagcttctccagcaactaaggcaaccaaggcagggccaccagagactgtatggtaggcatagaatagaaagaactctcctcggttgatgctactctcgttgaggcatccaaacgtgtctaactcatcaccccaaaagacagatgggaaaagcatggcaactttgttcagaaggccaaaccccaacctgtcaattgctgcttgttttcttctaggtaactccggctcaaacttgatagatctcttcttcaagaccccaagcggcacagtgcaaagaatcatgtcagcttgaaatatctggctaccagaaatgacttcaactcctccgtctccatacttgatagtgtcaacgcttttcccatagattatgggtagcccttcagctaatgcatttatcagtctccagtttccaccagcaagaaaacaatgatccccacccatttcgtaaggatcatcctgatcccagtaagcagctgaaagattcgaaagacacccagcgttagcatattccaagttagcaaggtgccagtcaaaaagttttctttcctctgaatctttagctacaccatacagtaccctaagagtcttcaagacttctcccaaagaaatcttcttagctgccccttccatcatctcccttacttctgtgaccttgtcaagcagtttgttgaaaccaaactcaacattggagtcagctactttatcgacaagtactccctctgaattatacaaaggacagttgtctctaaccttgtgaagaggaatagaaagctgtctcgcaagaactccaagtgggttcgcatgtaaacccgtgattacactaccaccgagttcaacagctgcaaatctatccttacctcccatcttctgagtgtacactcgtccaccaggacgactcctaccttctaaaacaagaaccttgaacccaaatgacaaaagctgtctagcagcagccaaaccagcaagtccagcaccaacaacaatgactgatccctcagtaccctcttcaggaatataaggagcaaacaatggagaaaccccaaaattgatgtatccattaaacaagagaaaatcataagcagctgaaatcaaatgctcaaagtcactactaacagtttctctaatctgatctttgagtagccaaattccaacattacccctccacctagctactatatgattccgaacaacaatgtaatcgttctgctctttcccgcctaattctcttacaactccagctcgaatctcttcctc

SEQ ID NO: 35593 - DNA, 2653 bp, Arabidopsis thaliana landsberg
gacgtcgtgttaggtcgagtgacaaggagacgacgatgagacggtgaagcttccggcgatgtaatgggcggagtggtcgagtgaacgacgagtggtgagaaggaagagaacggtgaggtcgagtaagcggcgaatggagaagagggcgttgcaatcgagtgaatgggaggcggtgagagagatgacgagtgaggtttggtcgagtaagagggtgacaaagcagcgagggatggtgaagccggaggggagagatcgagtgaatggtgaggtcgagtgtgatggtgcggtcaagtgtttggagaggaagagagatggtgaggtttggtcaagtgagaaacgtgaggtagagtgaattttcttggtcgagtgtttggagagggagagagatgatgtcggtgggagaggataaggtgagatcgagtggtggggaaggaaggaagagattttgttatctcttaaaacgcgtgggggaacaaaggtgagaggtggtgggccacgttctgtctatttgtcctgaagcactgttttcagttgactagaaccttctgtaatcatctgtaaacttgttaaactccctgtaagtctctgtagcttctgttggtcgagcatagatatgatttcaaaattttggtttttagaatcatcactaatactcgaccagtttactcgacctcatggcttctgagtgcaacagaggttttttcaaattcttgaatttctggaatactcgatccgctgttgctctgtagagtaaaatttttaaatttttactctacctccatgttgtttctctgttcctgagaatcacaaacacaaccaaaaacaaatcaaaaataacgagaaaataaaagttttatttacagaaacagtcttgagaattcctcccaagtgagcttgtttaaagtctctagcttgactcctcacactcattaagaagaaaatgggtgatagagagggtctgcatagtcctctctgatctcatcatcatattcagcatcctctcttgagagatgaggagccgaatactcaattcttctttcctcgaaataggcctcttactcttctggtggatgatctatctcctcagaccatcttgaagtaatcttttttctcgggatagtgttattctcgcatttggattgagctatctcttgcatctgatccagtttactcttaagttcctcaactgtctgagctagcttctctatggtctcttcttgctcatcagatttctttttgagatctcgcaagtcgggtgtagaggctgtgcttggtctggtgattgaattcgaaggctgaggttgagcctttatcctttcttctacagctgacctttgcgaagtttcattgatgtcaaactgcagcttgatgtgcttcccaaggttgagacttattctcccatctctgacatctatcatcgctcccactgaggctaagaaaggtcttcccaggattagaggatccttaggttctgcttccatatcaagcacaacgaaatccgtgggcacttccactccattaatcattactggcagatcttgtagaaggccgaagggttttcttgaagacctatcagcaaggattaaagtcaggtcgcaaggcttgtactgagtaaattccagcttccttgccactgagagtggcattaagcttactgaagctcccaaatcacaaagacaattgctgaaaaccaattggccgatggaacatggtagagtgaaagttcctggatcttccagtttttcttgagcactcctcttaatagtggtcctagacggattaacatcacattcgtcttctgaatcttgataaatcttgatcctttccagaattgactttctcacatctttgtgaggatccgggatctggttgagaacttctattagacgcatcaccgcttccatctcattaagctgcttctctgcaagagagttgtatctttctatccatgctttcctgaatttcgatggaagagcacgtgaaggtaatggtgctggcttgaatcgccccaccaaaatctcaatgatggctgctttctcgtctaggttggactgagtttgaaaacgggatccagttgaaaggtcgagtccaacaactgaaatttcaatctgagtagaagcctccccgtcctgaacatcactgtcctcggtgattgatgtggagacatgtcgagtaggcagctctcgatcatgacggatggtgatagcgtgagcagtggcgtattccttcgggttctgtatagactttcctggaagtcctgttacttttggagcagaagttgacgctgtttgtccttccatgtatctgaccttagaggtaagtgcctcaagtttgatattcagatcgttgaaagtgcaatcaaccttgttgtggatttctgccatctttttggcgagatccattgcacctacagcttgtccctgaagaatctgttgtaacatgttcttcaagtctgaatctggagttgttaaagctggtcgttgttgctgctgtgtgaacccaggtggtggaagttgctgctgatagttgccctgatagtgctgcttaggaacataaccctgaccttggttgtatggaataaagggcttgggttgattctgctgctgtgaagggtagacttggtcttgcgtgtttgcaacatttgtacaactgt

SEQ ID NO: 35594 - DNA, 2702 bp, Arabidopsis thaliana landsberg
  unsure (1)..(2702): unsure at all n locations
gatgtggttaaaatcccaataataaatgaagctgatcaaataagtacttgttgtctgatctgacgtggctagatagcttctccaacgctttatctcggaaactccgtgacaaaagatagtactttcatgtctgttttggtttcatccaaaagtatcaaaatttgtgtgatgttctccagaagaaacttgaggaactttaagctaaacctctgtagttttcagattgattcgttggtggaaagcgtctaaattttgcgtaannnnnnnnnnnnnnnnnnnnnngattctgccggggatcatcttttccggtctctggtcatggatataggatgctatcgacggttgaaaatgtatctgaaagtggtaaatcgatgaatctatactctgctattaatcaagctcttcacatcgctttagagaccgatcctcggtgagctgttctcgcatttttcaatcctaaagtctaaggtacatttgaattggtttttataatgtatttggagtcacttgagtgaaggtcttatgtttttggggaagatgttggatttggtggtgtcttccgatgtacatcaggattagctgaacgttttgggaaatctcgagttttcaacactcctctctgcgagcaaggcattgttggctttggcattggtttagctgcaatggtcacttcttctcttcttttgtttcttctgtttacctctcattgctatcacatcatcttactggttacttattcgcttgcagggaaatcgagttattgcggaaattcagtttgcggattatattttcccggcttttgatcaggtaaaaatgctacctttacctttaaaccaagttatgatgacacatgagttctctttatggagttttgtgatttcgtagattgttaatgaggctgcaaagttcagataccgaagtggaaaccagtttaactgtggaggtaaactcatatcttcttgtgccttcttggttatgagacaccaagtttttactcattggggtttatgtgacaattgtaggactcactattagggcaccgtacggagcagttggtcacggtggacattaccactcgcagtcccctgaagctttcttttgtcatgtccctggtatcaaagtacatcttcttactaaagcttcttctttctctatttgcttcatattcttaggtgtatatgaaaattgcatgttttgggtaggttgttattcctcgaagtccacgggaagctaagggattattattgtcatccatccgtgatccgaatcccgttgtctttttcgaaccaaaggtactacttcttgagttattttcaacttcaagaacctgtaaaagagtctttgatcctttgttcttcttcttcagtggctatatcgtcaagcggtagaggatgtccctgaagatgactatatgatacctttatctgaggcagaggtatataggttccatttctagtgtctcttcttttagtacacttctaagactaataaatgaaaactttttgtcacaggttatgcgagaaggttccgacataactcttgttggatggggagcacagctcactatcatggaacaagcatgtcttgacgcagaaaacgttagtttttatgttttgcacttaattagtctttggcgatacagatgatgaaacaaaatgtttttgcaggaaggaatatcatgtgaactgatagatctcaagactctgatcccttgggacaaagaaaccgttgaggcttcagttaaaaagactggcagacttcttgtaagatttaagcaatcttgattgacaacttcggattttgatttgtctggttgatcttatagattgcttttgcttgtgcttggggttgcagataagccatgaagctcctgtaacaggaggttttggagcagagatctctgcaacaattctggaacgttgctttttgaaggttagtaaaaagaaagctcaaatcatcaccgttacaagtgactactctttattggttttccgtttcttagctgtcatttaaaatgcagttagaagctccagtaagcagagtttgtggtctggatactccatttcctcttgtgtttgaaccattctacatgcccaccaagaacaaggcaagttcctcttctcttatcattcctctattccgacccaaaacgcagtttctaacatatcatgtgttcttgcttgatgcagatattggatgcaatcaaatcgactgtgaattactagccgtactatctgtagtttactgtttacactaggactaatgtaatcgcatgtctttgttatcaattcgtctaatgtaacactaccgattaactttaatgaatttcaagataacgaaaacatgttataataggactatctcacttaatgtgtacgaagattattatctactgaaagatgaaagcttatgatccaaacatttgacaaaccaaagcggcaaattgcttgaaagagtatattaaagggcaaacagacttggagtcttattacagaacagttagcaaagaactaagtaactctttaatgattgggtattgttcactgaaacaaacagaacatgaaacaagattacttggaagacatttttagaacaaaaaagaaaagagatttattggcatctccattctctatttaaaatttaaagttttgaatctgaataatttcaagttcttgtccaaggaagataaccccaccaagcgc

SEQ ID NO: 35595 - DNA, 527 bp, Arabidopsis thaliana landsberg
gtccatgatcttttccaataaatatagttctgagatttctcggtctcgattttgtctctgtcgtgtttcctatattggcttctgatatatcctgactgattctgatattgtcatgtctgcaggatgaaaatattgaactgtgccgtttctctaaagacggaacaaaaccttttttgttttgtgctgctcaaagaggtatataatatatccgactctcgagtaacatcactagtatttcaaattaaaaacatcatatgaaagcttaaactattggaatcaggtgatacgcctatggtcaatgtttatgacattagtacatggaagaagcttgggttcaagaagctgtcaaggaagactgcatcgacaatggcagtgagcttggacgggaaatatattgctttgtgagtctttcttcatcccgggctgcttatcactatcaggcttgtgtgattgtacataaaacctcatactttgcacctatttttgtaggggtgggaaagatggagatgtatctgttgctgaagtta

SEQ ID NO: 35596 - DNA, 1849 bp, Arabidopsis thaliana landsberg
acaaataaaaaaattgatcaataatatttttccacatgtaaagtgggtttcttagtccagtaaagcaaagccctctcgttagggactcatttctctttatcctcttctctctcttacttttttaattaatttcttttttctttttaaaaggactcattaaagcccaccgttggggatgctcttaatatcttacgtttcacttgatcattgatgatgaactcttttagtttttcatttaaattttatcattttggcactactattctataaaattgtaagaaatatatatttgtagtaatccccttactgtaatatatttttggaattaaaaataaattgaagtgcaattttttttgaatattatataaaaccagaaatatgaacattcatagcacatgacgatagcacaatttcgtaactactattaaaaataaaattcggatttcagttactatattatagcattttaaaaatactaaaccaaaaattaactaagcgggaagctaaaattttcttggggaccctatgaccgccaatatttagtaaaaaaattcacatatagcgctaatactgaaatcacttaattaaaaagaaggggacccctaaaagattacaagtaaattccttatactgtatatgtttggaatttgtttatgtctccctctataataacacttcactagtttttttgctaaattgtaaatattttatagatatgaaaatagtttaggttgcaatcgaaagattgaaaacctatacatatggttccaagacacacaagataaaacaaggaagcataagatggtatttaaaccaagttttccgtccatctacccaagcaagcaatgaagctttgggagcaagatgaagtgatgacattcttgttatccttcccgggtgagatgcaaaaggagaagcgcaaaagcagattcaaaaacaccttgatgcgattgaccaacagctatagaaacctttcgcaaaaggtcctttactgagccgtcaactcttagcaaaccatgagctttcccttgaaaggaacctcacacgccaaaaaaaaacaaaaggtgcaagctctctctaccaagttcgttcctcgaagtcagcagcgcagagcaagaaaagtccattcagcaccacacgagagccattagccctactagctcctctaatgcaaaaccaagccgcaaggaataagcgagtacgcaaggcaaagcaatcttcaaacaagagcacttacaacaggaagccacaacagagaacatgccttgaactaaaccaaagaattgatatacttgcagagttctcaaaaggagaggagagatagctaccaccgataactgaaacctcaacttatcaaacaccacagtagctacacaaaagagcaacagattcgacgagggaacttgaccagccacgagaaacacgctcaacaataaggtcagcagaattttaagctcaataaactattgaaccttgtctttgagtacaatgataaggtcagcagaatttttttttttttttttcacctaaataataatgattttttttttttggacaaaagaaataataatgattaaattacaattttactatgagaccactcaaactttatgatatactatgagttcgtttataaatttttaaaagataaaagattcgttactttggttaaggttttggtgtttgagattaagacttcgtcatgattacttttaacgtaaggaaacggatcggatagatcttttaccaaaagagaaaattaaaacgaaaaaaactaatacaaaactacagtcttatagatccagaattgaagtgatatgaatttttaaagaaaatttgatttcattag

SEQ ID NO: 35597 - DNA, 2870 bp, Arabidopsis thaliana landsberg
  unsure (1)..(2870): unsure at all n locations
gactcccccaccaccaccaccaccatcatcccgaggtgggaactctgtttttaccgtcatcaagctttggggatttagcgttttcgtgatatttaagttaaggctaaaaaaataaattctgaagatacaaacaagaatagaccagtccgtttctgttaaagcacattctcaagaataagaaccatagcaagccacaatttgagttcaaaataactgtttcatattagctagaatcgtatggttttttaagcccctcttgtttgttagaaacgcaaaatagttgttcaacatagagaaggggatgaaacaatttaccatgagtaggagcttgtgtgattgttggtgattgccgtgtaacggtctgtgtttgtccttgactgcattttgaattctgcagaaaacaaatcagaataagtaaacagctagcgtttcagagacacttaggaagagaataccggaaaataaactattatcggccataagagcaaaaggatcttgttcataaaacaagcaaaatggcttatgatgtgtaattaagttatgtgagcaaaatggtgtgtgatgaagttatcccaacagctaaagatttaaaacacttaaacttaaaggctgcaaagtcatgaatggaacctaccagcgcagagttacatgcaaagactggtcttttattcttagagacgacaactggttgcactgcatcctggagagaagggaatttactttggctccaaggctggcgttgcatagaaacgcttgtaggataacgcctttgagagtttcctattacagacagcaagtagaagaagagctttagaattccattgttcattcaataaaagcaagctcgaacgatgggactaaagcaagaatcaatgctacaacaacactcactaaagctctgagatatcaataacaacaacaagtctagtttcttcaatttgtcaagagcaatccaaactcaatttcaaagaattttccaaagaagcaattgtaaacttaagagccaacaagtgttgagatttagaagagacataccattactcgtaaaagatttctcacgaggagcgaggtacaccgatgtttgtgtaccaatacacaatgatggattcattaccggcataactacaaacagcaacaaaacaataatctttaacctatttcacaagggagaaaaataaaaaaaaaaatcaatttctcataaatcgaatagagaaaaaaattatggattcatcaattttgaaattcgattaatgataaaaacccatagagatttggatcaaagcaggtagattttttgtcgaggaaaaatttgggattttggttgctcctcgaagcttctcgatcatagaggacgaaacgcaaataaatagtttataagaagaacaaaaaagatgaggaacgtgaatcgcacctgaagactaaaacgcaaaaagacggaaaaaacaaagatctttcttagggtttatgtaaaattctcgcacaaatcaattttaaagcgttggcttctattgcaagaatctaaatagcccagaaaatataataaaaggacgaaatatttctcctttgtttgtcggttttttattttccaacaaaatgatatttgttttatttattaccactaaggctgatcggaaaaaattaaaatccctaatttgagcagatctttccaattgaaagcgaaccgtgaattttgagtctctttaccggcggcgaaaaaatgcttggtggattatacggagatcttcctccaccgaccgatgatgagaaacccagtggaaactcctcttccgtctggtcaagcagtaccaaaatggctccacctacacttcgcaaaccaccagcttttgctcccccgcaaacaatcttaagacctctcaacaaacctaaacctatcgtttcggctccgtacaagcctcctcctccttcgaattcatcgcaatcggtgcttattccggcgaacgaatcagcaccttcgcatcagcctgcattggttggtgtgacttcatcggtgattgaagagtacgatccagcgagacctaacgattacgaggagtataagagggagaagaagaggaaagctacggaagctgagatgaaacgagagatggataagagaaggcaagaggatgaggaaagagataagagagaaagagaagagagggagaaggagagagagagagataacagtgatccgtctcggttgaatatctccggtgaggaagcgtggaagagacgcgctgctatgagtggtggtggaagtggtgggaagggaagatcttcgtctccgccggggaatgttgatgggtttagtattgggaaatcggagacgagtgggttaggagtaggagcaggtggacagatgacagctgctcagaggatgatggcgaagatgggatggaaacaaggacaagggcttgggannnnnnnnnnnnnnnnnnnnnnnnnnnnnnnggctaagaagactgatcgtagagctggtgtcattgtcaatgctagtgagaataaatcttcttcggcggagaagaaggttgttaagagtgttaatatcaatggtgaaccaaccagggttttgcttcttagaaacatggtatgcgtttcaataacatctcttatcagcttatggattcttcagttcttgagtttggatgccacagtcttagttgaatcagtattagtaggccaaagtcaatttagaacttattcaaatcaaacgtgttgttatactaggacacactttgctacaatgatttagaacggtctgttagaatgatattaatgtattccaacatttgatgtggtcttagttaagaaattgttactgctaattgttggcagcatgtgagggcgtagtattaattcggaaacaaaat

SEQ ID NO: 35598 - DNA, 944 bp, Arabidopsis thaliana landsberg
  unsure (1)..(944): unsure at all n locations
agaaggagagactgctattgtaaaactctagaatggctgttatgtttcaccttatgcactccacggcttcccagttgcactccaactctttgcctgcgaaactatcccgtctattgctagcctcgtaccttctgaacaagataccaacgtctctacggtgaggcccatnnnnnnnnnnnnnnnnnnnnnnnnaatcaagacatcaaccatattggcgtgcgatgctgaaaaggttcgtacagctgttgctgcacgttcattggtatcaaaacgagtaagtacatacactctgaaataaacaatgatcatctatgtaggtggatgacacatatattgtggatcgagtagacagtgattgcccaaaatctttggtatggaggaaagaaaaacaggacccaagagttgataacattttaaggatgttgaatctggccacgagtgggatgagaaaatgtgggttggaggcgatgatgaacctaagaagcaagtccggccctcaataacaggagagagagataatcatttctctttatcgtataacttatatcagaattaggttcctccaagagtagtaatgcatgattaaaccattttatatagttattttgaagaggaaaagacgggtgccagatcctattgataaaaaaaaaggaaaattaccaactctgatgatggagaaggtggacacagtggtggtgatggttctagagacgaagagtttgataagtatgtggtcaaattccggcgtttcttcaagaggcaaaaagaacttttggataataaatttgaagatttataagaatttgtatgtgtagagatacgtgatgctctacattcccaggaccaaaacgaagaaggaacacgagcatcccagaaatctgattcaccatctgagaaggttgagatggtgaacaaaaaggttgagaaggggaacgaaaaggttc

SEQ ID NO: 35599 - DNA, 2379 bp, Arabidopsis thaliana landsberg
atattctccgactccaacgttcgcttcacaagtttcataaccagttcggtttaccacaatcaaattaaatctctgataatcgtatttgaattctgcaatgtatcaccatgaatataccaatataaatttattgtcttagcagattaaagttacgccaatattaaagtatgatggatatggtttatcaatcacactaccgtaccaagaaattttttaagatcattgatacataccgagaatatcaccagcataaaaggttttgcctcgtgcccaagtgtccatcggaacaaccggatcccaaccgtcgtcgtctcccacaatgtaggtggtcggtctccgggcataggtcacggccttggctagaaacaagcacaacactgtcatgacaatagctattggaaccgtaaccgccacataagaaacgtgtccagatgattgagccatttgtgttaataggtcaaaggttttagttttgtgaattgttcaacacctaattattaatatatatatatatatatatatatatatatatatatatatagactattcttgaatttgaaaaagatcaatacatttccagcaatgtatacctggttatggaagagctttttggtcaatgggtgcatggttttaatttggtgaactagtaataagtctttatatatacgtatgactatttttatcagttgccagaaatagaaacaaattcaataaattcgtagatttccttttgaattgacttgattgagtcatgctagcttgcggttatggaagaaatgtaaatattgaaaatgattgtgttgtcatatgaatgaatatcatattatgtatttacttgcaacggttttagggttttatatacgatagtacaaaaccactacattttgttttcaaataccctgtatatttttgaaaaaataattctagatagagataatacgaattggtttgcagttagacgtcacgtaaaaggaacatttacgaagtactactaacgcaaacggagaaggcatcgagtcgtacatttaaaccaaatggatcggaggatttaatagaggagctttggtccaaggagctagtcgaaacagaagatgtagttctttggagaggtaaagatgtttgatttcaggccagattcaacaccaaagacacatgggaagcaacacgggagcaaataccaaataaggaatggtatgaagttatctggttctcgtacgccacaccaaaatattcatttaatttctaacttggctagcaactcataaccgtttaagtactacaagagatagaatgcttacttggaatacaaggattaacacctcgtgtgtgttttgtcaagagcctctggaaagtagaaaccacttgttcttcgcatgccaatactcaaaggaagtttggtcgagtttcacttaaaaactcctagctgcagatttctctaccgattagaacatggtactaaggctactcacgggcaacatttttggaaaggttattcctagtaagatattctttccaacttgtaatttattcaatttggagagaaagaacaatagaagacatggcgaaaatcataacacccatcacccaattaatgaaatgactagacaaaaacattagaaatcggatatctttcataaaagagcaaggagatgaaagatatgagaagcataggacagtttggtgtgcaacaagataaggagggtagttactactaaatatttttcagtgtatgtatttttaaaaacgttaaactttccaatgcacttgatgtaaacacgttttttcgaataaattttacattctattcaaaaaaaaaatttcaatttctgatcatgggctgaccattggacaatggtctttaatagtcttggacaagttttcagaccatgtccattaaggaccaacaattaaaacccatgaaaaataatggtccaagtggacatgaccgttgggttttagacagtccaattgacacttctacagatatgtatgtatctaaatggggttccaactcgaaactcattatcaataagtggattggtttatgtctcttatatactgttcaagtctcttcttttcttcccagcattccaatgtgagatatttctccacatctactaaaatggatacataacataacaataattcaaaatattccttctatacttgagagtaaagaatcttggtcttccatgatacttccacgcttcttctttattttgttatggttttaaatttatatgctaaaacaagtgttcaaaaaaacgctaggcgctaatcgggcagtgacccaatgcctagcgtctagaaagcttaattgaagcctagatgattttaggcggttaaagcgtttatagcctaaaacattatatatatata

SEQ ID NO: 35600 - DNA, 1355 bp, Arabidopsis thaliana landsberg
  unsure (1)..(1355): unsure at all n locations
ctcttttatattgggaatttacgaaaaaactaaacacacttttattcttgttaaataacatgataagtttagttggttttttttgtgtgattgattttttttaagtggtttacgtagctttgtaaaaaaagttaagtttgaagggatcttgtaaatattgcttgctcattgtaacacaatctcgaaatcgtaaaagttttgtaatcaatcactccataccgaattcagtggaaacatttaagtgtccatcaaatatggtaaaaaatgaaaaataaaataaataaaaatccaatgaaacgtccagtcaattttacgtggtaatgaccaaaataataataatgagatatgcatatgctttgtcagaccaaaatagaagaagactgagatggagcttggagagcgaaagatcaaatgtgagagttgtgggcattgtgtccaaactaataacaaatcaaggtgaaaatcgtaaaagtaagaataaattaagggtcttttcgtaatatttggtaaagttgctattgtccatacgcatgattcgtctccttgaaaatgggctaaactttgagggcccaacttacaaagtcgaggggccttgcaccttcattcattccttacagtccaatatagtagttgggctcttataatcgcaacacctgggccattggccagatggcttcttctttttttttttctaggccatatgtctacgattgaccaaaagtaaaataaagtaaatgttgtttacggattagattggtgtgaaggagctgtgagcctatggcatatgtaccacgttaagatttaagaaaatctggaataaaaaatgcaactagatattatgttatacaaatctaggccagagtcggttgttttcggaccgttctgccgtgaaactgtgttccttaacattttgatttaacgtttccatatttctgacattccaataaattattgataactagtaattaattaaaacggtttactctgaactctgaagtgtgtgaggtcatcaaatnnnnnnnnnnnnnnnnnnnnnnnnnnnnnnnnnnnctgcgtgttgacatattaagcagacaaaattataattacgttagatcattagcaattagatacagtcacgaatgcattgaatgtaagttgattataaaactttaaagcggactaattgtatttaaaaagagagctatagttagattggaacttggaaccatcgatatgattttatccgttaaataatttgaggaaatgtttaatgctgacaaataattgaacaatttgtcaacatattgcaagtttgcaacaacgaaaaacgataaattaacacctaataagtcagttgtacaaatatcctcggg

SEQ ID NO: 35601 - DNA, 2928 bp, Arabidopsis thaliana landsberg
  unsure (1)..(2928): unsure at all n locations
cgcaataacaaacagaccccagaaactttgtacaccgtgctgtttcgggattaaaaaataaaaacgatctgaagctgaacaactctcttctttcttccggaaccatgcatgctcaagctccttcgcctttggtgactcttctacttttaagatggcccttgaaatatcagccaccagaggtgacccgattggaaaaacctgcgaaaaagggacttatgatcaccatataatgcaactttagaagaagttttgatatggaaacttacaaagccgaatccatcaaccttgaagggtacttcaacaatcttataagtgttgcaataattactaagaaagattctcaagtaagggatttctaagaaagctgcagagacaccgcctttttttgatcctttgctcagaagctcgtcgcattcttctgcagtatcaaaaggcacaaggctagattgcgggaaccctgtatctttaagattcccaagaatgaatgatgttctctgataacccactgtttctcctctatgaagcaagctactcatgctggttatggttggatttagttgttgtgatgtcaaaagcgatgccaaactggctgtgtaactctgagttaacacgagaaggacgaagtaccatgtgacaacaagggcccttgccccgaagctaagcactctttctcctgctggcagcaactcaagagtaagaatcaaacaaagtaataaatagaaacatatataagatgacatgtaaaaggtggagatagaatgtacttggagcaaaaaccatggtagagaaggcaaaccagaagatggtactagcttgataatctagccggtccacggaagtccggattgaccctatgttcaagagtccatacactaattccaactaggaagaaaaagataaaggaagtcaaccataattcgattgacaaaggtttcatgaagctgaatttgtctcttttcactgggtctgtcatttcaacgatcaatccgacacctgatttaataaatgggaatgtgaagtccacataagaagacctgttcaccaatatggttgtatctcccacaaccgcatcatatctctgcggtagagacaaagaaaaccatatttaattaatactctctgagatgatcttcttaatggtatagtgtgttactcaccccgacgtacacttggtatactagagcgttgtaatccccagctggtttaccatcggtattttcaaaaggaatgaaatcgtaggagatgttataaggcattgctcgaatcacaacctcaaagaaatctatgcagaaacctgtaactactggtgaattggtgatagtatcccttgtgactttcacaagatcggggaaaccttttctctttggaactctaatgcgcaacctcatcccgttcattgggatctcccatcctttgggaacagagttagcctctccaggccatattatctgtttaagatgatcttgccagcacatatgtttcgttgttcttggtcaagtttcttcacaagaccattttcctccgtccagaatcctactgaccttactccggtaccgatcacattaacaatctcaaacaccgatggttgcagttgcccattgacaaaacagaaatctcctgcaagtcctctgaactgaattgttgagagcgtctggagaagctttggaccaaactgagataaaccaagagcttcaagttcagatacatttttcccaggatctgcattactgaaagtcatgttatctattccagcttcttcaatagccattgccagcgcggtgattgcatcataagcccacaatccgtagacattgagctccatccgtggaaatatcttcctccatcgagatctaaacttgtctagatcttcggattttcgaatataagttttgatacccaataccccgtccatagcctcaatacccgtctcatctatagaacttaagtcatcggtaactgcattggtaaggatccaaacatatcctggtttcatcaatcccatctncttagctttaataaaaaatcttgaggcaaaagaagaatacatgtggactatgaacactcttgtgggtctggtcatcaatttgagaaggtccacagagatttcatcatccgttgcattgggagaaatcaccgtcctataaggtatacggatgttaatcgcttgtaatgcatcagtaagaccaggcattataccttctccaaacgcattgttctcatacacaggtacgacctctctccaaccaaacacctttatgatctcacttatggcttgcacttgtgatgagtcgtcgtaagtagagcgaaagaagtatggactacggccagagtcaaggaaagggctcgttgcagaaaatgaaataattggcacctgagatttttggcctacctcgatcacgaaagaagcttgcatcgtcgttcttggccccagaattgctttcacttccttgttctttataagatcaagagctgcggaaacaaacataagacatgtggtgttatatgagaaacttgaaaacagaagaccaaatggaaggtagtgatgactatatctttgtggagctgaaaactatcaagttctatatagtttagagccgaaataaattcattgccatgaaaatgcagtactgaaggatgcattgtccacaatataccacaattacatttaaacttatgtaaacaataccacaagaaaatatatatgaatccctttatatatatgtacgcatgccaagacgtcatttcacgtaaaaacgatattcaaccgttttaacagaaaacgtacttttgcggtttttgacaacaaaaatgtgactaatcggttttaaagggaaaaaatgtgattgtgcggttgttgatgaaaaacagggattatgctttttggagagaaaacatgattctaaaatatctaatttttcatactgaata

SEQ ID NO: 35602 - DNA, 1982 bp, Arabidopsis thaliana landsberg
  unsure (1)..(1982): unsure at all n locations
tttgttacaatgtaacatataaacggacggtatcaaccaagcttctcgggaagaggagagtggacggatcctttggcttgtataggcctaaataaagaactaccaaatttcaagtgaacttatttaaaagaaccaaataattattctaaaagagaagaaaaaaatgaaattatttacttatatggcttgtataggcctaaatggcatacagttaataaaatctgttagttctttattaattaacaccaagcctcttttttttttgttgaaaaagaaaaaggagcttatcaaaaagtatattcacgaaaagccctagagaagttataatgaaaaggaaagaagaatctgatgtccaatagtaccccaaagtaaagtacaccaattgttgagatcagaagagttctttttttttctcaggatgttatgaagaagagtaacagtcgcataaagtcgaatcgtaattgtttaatagagcgcatagggcttgaatatgtttttatgaatagtcaccttcttcgttagttgggctctcgacgctaccgtctattgccaggtagtctaccagttttgtatgtccccttttactttccattaagattcttatatctagatctgtccttactgttcaaatcctgattgtcggaattgtacttgtgaaaaaacaccgagcaacttagctttttgttcgaattagctaaaaaattaggaatggaacaattttcctttgtgttcgtcggttttgtactaaatacaattgacaattttttgggtccagagaggtttcattgtttatccttaatcttatgcttctaactcaaagttgttcttagttctgatttggattgtctgcaaggcttgtatatgatacttggtcaattgagacatatagttgattaattgcgagttatatactgtgaatgaatgaagttagatactactaccaatagtgtttactctcatactaactgcctctgctaatgattgaagcattgagattcctttttagtctattgatatcgtgtgtgattttgtaggttatctgcttaacggatttagaagctgattacttgaacccttttgaaacaagtacccgtatcaaccgattagtaatacctgagtttatcctccaagggtcactctgccttctcttcctcctcacatggcattgggtcttctttctggtcgccgtccctgtaacagtctatcacgcaatgttgtaagtatctatatccatccatattgcttatgattcttgattgacatgcgtggaaactaaatacgcgcctcccattgttcttcagatacaaagagcgacgttatctcatcgatgtcactgaagtgttccgtggtatcagctatgaaaagaagctccggtataccaagctncggttctacgtctttctcttcatcatggttgtctttaggtaaaaaaaactacagctttagctttcctattaagatcgggacttactttggttcttctactatgaacttacttaccgagtccataaaacatttttgcaggctcactctctctgcggtctatagcttcacggaagatgatgatctacttcatttgttttgatttatgcgcttgcgctctgcgttatcaaccactctctctttattttctgagtgtgttttagaaaattgtgacaggtttttattacgtccctgcttagaattagccattcagggattcatcatgtagctttatataacgtatgattaccgaaaactcatcacaaatcgtttgacatggagggtttcatcagttttgttttgcgcaatataatgttcagtctcatcattgaagtcataaaaatcatgtatcaagaatgaagctacattgtattacatagactggctgtggaaaaacgcaccgatatctagtttatcggagatgcaattgaacccgctgtggaccttaaattcttgtccatccaagaggaggaggagaaagtgacccaaacagaaactct

SEQ ID NO: 35603 - DNA, 2542 bp, Arabidopsis thaliana landsberg
ttaatcgacaaaaatatttgttgataaatcctgcgattttttttttctattacataggatactcaattactttctttacttcaatttgattgttcgtgattttgagcatgttgttaatttgaaggcgattacattactcatgtgtttaagttaattcaaaagtgagcaatcaaccatactttagcaaatcccaccatattccttttttatcaattaattattgtagtgtttgttggagctagatttctttccaggaatccacgtacgaaaataccaggccaacctaataaacccagtgaacccatcaagtaaaggacctgcgcaactccagagcccacgtacgaactagatatttgggccttatgagctcaatcatttggcaaagagagatatgcgaataacaacctaggaactgaccaggagatattcgcggagcggacctgatatctcggaactaacctgccgaatatccaggagaatatccccgcggatctcggatggagctacccacgtgcgtagatctatataaggaagcaaggacgacttggaagacatatacattcagcttaacacttacacttatacttaacacttgtaatctcattctacattgtaaaagctctactatcatcaatacaaaagtttattcgttttcagcaatataaatctcaaagtttttgtgaagatctacccctcctttctgataaatctaatttacaaatctctagtatggatttcagaacccacaaaggtcaatctcaaaatattggtctttatatgtctttaccattcgtgatgatatttggcaagatttagctatggattttgtgttgggattgccacgtacacaacggggtgtggattctgtgtttgtcgtggctgatagattttccaagaggacacatttcattgcatgcaagaagaccgttgatgcatccaacatagccaaactatttttcaaggaggtagtgcgccttcacgggggtcctgagtcaatcacttcggatagggatacaaagtttctaagtcatttctggtttactctatggaggatgtttagaacagctcttaaccaaagttctatagctcatccgcaaaccgacgggcaaaccgaagtaacaaacagaaccttgggaaatatggttcgaagtatatgcggggataaaccaaagcaatgggatttagctttgcctcaaatagaatttgcttacaatagtgttgaacattctatgatagggaaatcacctttcttctagtgtatacttctgttcctaagcatgtggttgatttggttaaattaccaaaggctcatggggtaagtgcatcagctgaaactatggctgaagagattttagctgttaaggaagttgtcaagactaagttagagactacaaggaaaaagaacaaggtcgctgctgataaacgtcggagattcaaagttttcaaatacggtgatgatgtgatggtgttcctccgtaaagagagatttccagttggtattacaacaagctgaagcctcgcaagtatggcatgtttaagttgtcgcggaagatcaatgataatgcttatattgtggctctctcggaatcgatgaacatttccaatatcttcaatgaagctgacattcatgagtatcgtgcagacggggacaagttctttagagaggagagatttagcagttttacatttcttttgataatttcttatttcaagctttctattttgcttaaagttttttattttatgttttggtttcttctctatatagagaccctaagttatttgttagacacgtttttttatcattctaattaataaaagtagagagtttttctaatgtagtggatttccagagttttaacccttcaagttcgacgcttactattcttagagattctgattgcgtcattaggactgcggactttgatgctagttctgatatccttcatgcaaaggtacccaccatctacgagtccttcatctttacttgtttgaattcatacattagtgtttgcagccttgcttcttcaactcgatcaactccgagatttctagatttgattgagtccaaatccctttagaagaaacttgttcacctatttgtaagattagaatcttcgagatggattggaacaacaaagaaattgcgatatcgttttgtggagtctgttgaaccgcgttcaactatgccccacaacttattgacccacagtaagaccttcatcctcatggcacaaactatatagtttgacaaggttagcatagggcattagatggctgtctggacaagtttctactgttgtggtggttagtcgatgtcgtccatggctcgattacgtctctgatgtgttcttcaagaattccatacttgactccttcaagttgatcaaaaccgctctgataccaaacaaagaagattcgaacaaacttatataaagaattactcttgtttttgatctttagaaacacatctcacaactaaacaagctctatcacttctcttatggttacaactcagccaatagctgtaaatatagtagac

SEQ ID NO: 35604 - DNA, 4495 bp, Arabidopsis thaliana landsberg
gcctgaaggaatcggcaaatacttgcaccgattcccgtgaaagagagcccagcacagacagacatctaaggtcgcaaacctaacaagaagagggttgaagaagaagagaccaaccggctgaaccagagcggcataacaagccagcaatatcgaaatcgctgaaccatcatcattcaccctaatcggactagttatcaatctaaccggtttaatccgaaccagcaaactagatgtcctcatgcgggtttgggtaggccaaaatataggccaacttgggccagtcttattttccaaaatacacaagttttgggtttaattatttctctttcttcatcgggccatagagaaagcccaatacatatcgggaagtcgaagaacaatacattttatcaaaccaaccaaaggatcttcttgcgatgaatttaaatgcactttatcaaatacataactaaataacactgtatatcaaaaaagaaaaattatgtatatcgccttacctttaaaatacattcaagaatacagtactgatgtagaaagtgcataactgtatatgtaaatgaaatgatttacatgcagttatgcatataggcagcatgaatattgttttatcatctcatttcttggcttttattttttaaaatttttgtcctttttttctaaaacgagaaagtttcagtgctttaaaattaatgatgaacacctgctagctttaacatccaaatcacatgatttatgcacatcagctctcatgatcaacattcccctctctctttttggtttttaatacaattcgcctctactttagtaactaactatttctaaacgtctatatgtataaaaagtcagacacattttctaccaaatcattttgtgaaatttgagtctctcaatggcatttaagaacaataacaataccaaactaaccaaaattatcagtcacatctctcaaaacctatcattatctaccttatggaaatccttaacagtttccggtgctctacttttcttgttacacacatttgcattcaacaatcctcataaaatgatgacccataacctttttgcgcctcttgaccttagtttctcctcctcttcatcttcctcctcctcgtcagtatcattgtccttgcaaataacaagagagcctccaacaaatatcagccatctattttttgtcaatgatggtagcccaaacacggggagagataagagaggctacatagagccttggtggagaccaaacattacaaaaggatatgtcttcctcgaaagaccacctggccctgatctcttgccttggcctcaacaatctcctcccttctctgtcaacaaagagtcattcatcacaaacaaattcaagactcagatccgccttttttattcgcttcaagagtcttttaagaaggcgtccaaagagacaagatggtttgtgataggagatgatgatactctcttcttcttggacaatttggtgaaagctctcgaccgatataaccacaagaagcactattacgtcggaatgaactccgaaaacgtttggtccaacgcgattttcgcttttgacatgggatatggaggcggcggatacgcattgagctatccaaccgtagtaacacttctcagcaacatggaagaatgtatcaaaagataccttggagtttacagcgatcttctctcatttcgttgcttggccgacttgggaattgatcttactttagagaaaggcatgcaccaggtagggttgttcagtccaaatttatcagttgtttagtgtgaaaagagtgactaaaatagtaaccaaagattcttgtgtctcactctgtcttccttgtggtgtatattacataccagaatgatctacacggtgacatatcaggtctgttatcagctcatcctcagtctcctcttatcagcctccaccatttcgatgtaatagacccgatattcccaggcatgaaccgccagcaatccgtgaaccacctcatggaaaccgcgaaaaccgaccagtcccgtgtcttgcaacaaacaatatgttaccaaagaggatataactggtcagtctctgtctcttggggctactcagtccacatttaccaatctatatacccaagaagccacctgaaacgccctctcgaaacattccgaccatggaaggatgttagaataccggcgtatggatttaacactagacgggtgacgaatgatccttgcgaaatgcctcgtcagtttttctttgattcagttgtggaagacaagaaccaaagcttggtaactaccatctacaagatgaaaatggaaaggcgtttgcctccttgtttgctaaatggcaaccattcttctcgtaacattacacaagtccgagtcattgctactactatgcacaagatggtaaccactagaccctctatactcttttaatcaaatcattaatcaatttctatattatctgaagtcaacttcaaatattaaacaggttgagggaatcgaatgttgcgatgtgcaaaatgttaacagtacggagattttggaagtgaagataagagattgtcatatagatcaagctcttgcttagactaagtcttatgatacatgtaatcatcaactatgattgatctgaaaatctttttcatttgtataacagcagcatctgtcatttattgatatgctgtacaagttccaacctgttgagaaaatcagatcccaaatggggggaatcaagcggtttcaaaccccaaatgcataaagtctttacgtggtttgtgaaaatagccttagtttgcattgaaaaatcgactaatttcctagaaagaggaccaacatagaacaacgaaacggccccaaaatcagaaacaatcgtatgaagacaaaagtagtgtgcgtatacataagtcgaaagaccatgtcagaatcgggcacatccggttcttattccgcttcatcagtgagatttctggataccaatgaggcgggcataatccacccatctgtgacaccgacaaaaagaaacatgtgaattaaaactgctgaaaacagtgagtgagaacaagctaaggtttgggttttaaaacaacttacaataaggaacccaagaatgtgttgcctgttctaactgcaaagcacaacgcactgagtgcaagtttgtgttggtgtagcattggctccaggagacgttgttcaatcacaccagccactatttggtacctgttcatttcaaaccacatctctttacattatccaatctaaatgctactacaatgagctattaaacttttttatccttctcgacttctttagtaaagtttagtagaaaaaaactcagtaccttaggttgctagaaactgccatgtagacaccatatgcaacacttgtggagactatcggaacagtttcgacttcaccttcagaattctggtccacagcttttcgtgcttttatgaatgcatttgtaatagcagtaccaacctaaccaattttacagatttcgttaagtcaaaagaatgtagaaacgaaatgtcaaggaacttatggaaactatccatttttttgactcaccagcgatgatgtggtgccaacggcaaacagcttagctccattgcgctgcataacatatacagacaatatatattatccagaaataggcagctttaaaaaatcaactaaagcgtggtacactattaagatcacataggaagaagttgaaagaaaccacacaccgttatagcacctagcctttgcaagagagtatatgaggtttcggagagagcaacctgcagcaaacacatagaataatttgacgagaacgagcttttgtaaacttatcatgcatgtgcaaaacaattcttttacaaagaattatacctggaaggcattgtctgggcagttgtggaaaaacttggatatacctccagcagtaagtgcgagaggtggtcgaagagaaacggtaggagcaggaagataaaccaacatgaaatcagcaataatagccatcgcctaataaagaaaagaaagaagtaaaacagtgcattcagcttaagtccaatatcattcagcagagaaacatagcagtgacaaaactactgtgtatgtatttgccagatagttcaaggaactttgacttacaaagtgacaaagcagtaaagggtgaccttttacttttatgtttctccaaatttgctattgaacagttcaaatattggctcttacctcagagacaaatcaaatctcaactactttcatagtcacgcaaaaacatatggtgaaaatttgcagaccccataacaaccacaaactacccttaacctttcgtctacccgacatggtcacctataagatttttgttctcaaatttctcatccatccctaccatctcataatttctcatagtaagttcatgcgatctgacaaggacacttaaacagaaagtcacagagggaaaagtgagcaagaagaatgattaccgcatcggcgaagacaacttcaaggtcattgaagaagt

SEQ ID NO: 35605 - DNA, 631 bp, Arabidopsis thaliana landsberg
aaaccaaaagataacatgatcgaaaaagaaaatctatcaaaaccctagcttaatcagacaaatcgacgaacagattctaagattcaatggctcgagaaaattatttatataagccgccgaagacaaaaccctacacttctgtttggtaacagatatatcctttgagacgcaaactacctgccgttttctaaaaacaactacgcaccgttttgtctaaaacaaagtcgttttttagaccaccgagaatagtctctcatctttgtcgtgtaacctgaacctccacgtaacgaaagaatgctctgaaccacaaaaaccagaaacgtgtcaaactgcttctgtaaatttagtcataaagcaaataattaaccatgacgcgtctctgatttttcaaacaaaaaaagccaaaaattcgatttgagtttatcatatcttcttctataaataaattgaaatatttttatacacatacgttgtcaaatgctaaccacacgtttgcgtttagtaaccgaaagaaccaaactgataaatactacttctcctatgagaatagtttttggtaaaactaacataataaaatggtttttggtaaaatcgctgtagagactcctaaatacacggtgactaaatccgg

SEQ ID NO: 35606 - DNA, 2538 bp, Arabidopsis thaliana landsberg
agatgcatcacacatgaacatttggtatgacaccaaaaagataaccaatattgccaaaaaaaaaagaaggagagagacggcgggaaagtttgttgaggaaaaaaataaaattgggtaatatccaaacatgaaagtgaaataaaccgtaaaaaatcaatgcaatttggcatatcattgtccagggaccaggccactctgtctttcggtcatattcataactctttctggctctgaaattacacaatgaatgccgtgtcctatagaatcatatagacgtggatgcttacgtaaatgcatcaacttttctaaaatgcggtgcttgtatttttattaactaatatcatgagacttatcttgattaataaatggtgattgatttggcagatgaaagttacttgacgaaggagtacttagaagacacggttatagattttataccaaccatgaagaatctgaaactaaaggatattcctagcttcatacgtaccactaatcctgatgatgttatgattagtttcgccctccgcgagaccgagcgagccaaacgtgcttctgctatcattctaaacacatttgatgaccttgagcatgatgttgttcaggctatgcaatctatcttacctccggtttattcagttggaccgcttcatctcttagcaaaccgggagattgaagaaggtagtgagattggaatgatgagttcgaatttatggaaagaggagatgaaatgtttggattggcttgatactaagactcaaaatagtgtcatttatattaactttgggagcataacggttttaagtgcgaagcagcttgtggagtttgcttggggtttggcgggaagtgggaaagagtttttatgggtgatccggccagatttagtagcgggagaggaggctgtggttccgcgggagtttttgacggagaccaaagaccgtagtatgttagcgagttggtgtcctcatgagaaagtactttctcatcctgctattggagggtttttgacgcattgcgggtggaactcgatattggaaagtctttcgtgtggagttccgatggtgtgttggccattttttgctgaccagcaaatgaattgtaaattttgttgtgacgaatgggatgttgggattgagataggtggagatgtgaagagagaggaagttgaggcggtggttagagagctcatggatggagagaagggaaagaaaatgagagagaaggcggtagagtggcagcgcttagccgagaaagcgacggaacataaacttggttcttccgttgtgaactttgagacggttgttagcaagtttcttttgggacaaaaatcataggattaactaaaatataagcacgaaatgtattattatttgggaattggacatgtttaggcacttctacaaacttttattccttttgaggcacttctcacgtacaaggcacttttccttgtttttgaaaaataaatggacaattatatccccactcatctaaaccaaaaatttacttaaccggttagaaatgtttggttcccttctaataaatcctctaataaatccacagaaaaaagaagttaccttcgccgagtgaaattatctcaatgtcgatggttgttaattctcattgtgataattgattgtaacactgatagctaaaggctatatcgaaaatcagatctgacggagccgcgcatgacccgacggcggagatggatttaagatgcgatgaaacgattctcctccacataatggtctcgattcttcggggaaaattaggaaaattagcatcaagagaagaaatcgcagataaatcttgaaaatgagattacttacaggaaaattagatccggttgcagagagtgataaagagtgtgacagagagaaagagagatttgttggagaggcctatttgcgtcgattaggaatctacccctgaattagtatcggcctgcaatagccatttttttacagactttcaaaatcttaatatgatggaagttgtagttatctgaaaggtttagaataactagagtggagggtaccaacagcgatactgatatccacgtagtctctgtaaatgatatcatctccatcgataactgcatttactacaggtgttccattatactgattgtgttctatatatccacaatattatgtccacaatataatgtccaataaatccaaaaaaaaaatgtaaaattgatgagtgtttcatacttgtgtattgttgagtgtccaatatgatcaatcaattagttaaccggttatcttgcttaggtttgtagcggtatctaaaaaaaacgtctccagtcagtgcataaagagacggttgagatcttcacacaaagaaaggagttacttgacgattacagacggttgtaatgcagtcattatttcgatgtcgacaaaggtacaatgaaaaaatatccttaaaagtcgtaacacgtttacgatactcaattacgctattaggtaattaacgtgaatgctctgttttgttttggttagggattgatggatgagttttgtatggtaattt

SEQ ID NO: 35607 - DNA, 7181 bp, Arabidopsis thaliana landsberg
gctatcgccgccgagaggaatatcgatggcggagaggagtcttgagtgacggtggacgtcgtgagctctgagagctccaagatcttttactctttttccggcgaacttgcttcgaacttcaaataccaaattctccgaagccgtcgccgccgtcgagaattgcgggtcaatcagcaacgccgccgacagcaaaatagccgacaagaaccactgtctccgcctgagatccatgaccggagatatccctaactaagttagttgagaaatccaaacgaaaaaaatgaagagaagaaaaaaagcaaaagaaagaaaagtatagtttggcggtggagtacgatttaggacaaagaagaagaagaagaaaaattggtactttccaaataaaaaagtattttaatcattaactaaacaacattttgaaattaatttaagactggctagaaaattatgtactatataataagattccatgactacaaaaaaaaaaactaattaaatttcaagattgtaataattatttaaaaagaaaactgaaataactgctagaatacacttttggcagctgtaaattattttcacttgtataattcattttttcacatgaatatgcattgtcacactattaggctcatttttaacatttttttaccgtctaatgtagattttaacaaacaaacaaaaatcgactctagatgataatgagtaatgataaaatcatcagttgtcataaattgtaggattcaaaactgtttttgatcacaaatatgagagttttccttagatacaaaactagtaatcactgaactatcatgcatgttgttggtattttgtattttagtctaaaatagttaaatttatgtaaaataaaagaattcatgtttgtctcatcattttgagggaccgaaccgtaatttcgcagtaagaaacataaatatcaatcttaattcctcaagaattctacacctcccgttccatctatcacgaaaacaaataattacagtaagtacccccgaatatccttgttcatccgaagcaattcgaggataataccgtctttttctctttaaaatccaattaacataaaataaatatttgctcagtccgttgagacctcacacacactctctctctgatcattcaacttttcgaaattttgcttcatcgtcttcgtcatcggctctctgatgaattcctcaaacaatgcctctttctctccgtctttctccttcgccgacggctttatctccgaccaccggaggatttggtccatcgaggaaacagtgccggattccttactccggcgtcccgacgacgaagattggtttctgttctttggattctaggaaaagaggagattcctctgttgttaggtgtagcttagaaaccgttaatgtcagtgttggtcaggtgacggaggtcgataaggacacgttctggcccatcgttaaagccgccggtgaaaagcttgtcgtacttgacatgtacactcaatggtacctactatctcttctatgcctctctctgctttgaaatttttaccattcgacatctctgattgtatatagcggaatcgatgaaatcaatggcgttgcgatgtcgaatgcttagattaccaattgatttgaattttgatactaatcaaagtttccgtggctttcaactaagattgaaaaatcttctcagttagattcttctgcagatgtggttcatttagattccatagtgaatgttttggttttgatgttggtagtctttaaagagagtttcaattcaagatgttctattcttggataccttatgcaggtgtggtccatgtaaagtgattgcccctaaatacaaagctttatcagagaagtacgacgacgttgtgtttctaaagcttgactgcaatccagataaccgggtctgagttctgctcttttatctctcttcttttggtaactcggttttcctaaaccatatatcaattgaaccatagctagtagcagctaaggataatcaatacctgtttttgttgttgctactactacctgtctttgttgttgctgctaagccattgaaactcttcattggtgcagccattggcaaaagagctaggaataagagtggttccaactttcaagattttgaaggataacaaggttgtcaaggaagtgaccggtgcaaaatacgatgatctggttgcagcgattgaaacagcgaggtctgctgcttccggatgaaccagtctctcatgtctttaccataattgtttgtatgtaatgtgaaatctggtgttatccctatatataggtgatgaggaaacgtcagcaaaagattatcttgtatgtgtaaaagtttcaagaaatatgatcaagaaaatgatgatctttaggtttccagttgattcggtctgaaggatttctaagcaattagcatctgagtttggaagattcggtgcaatgtgcactagcaagtttgtattcttaattggggatatagtttgaaagttatgaattacaattgtgagaactagcacaagtcttatagaattcattctttacataaagcatcaacagtggggttctttatgaaacacaagtgattgacttgacagtaagctagtcaaaagacgagatagaaaagatggcagtaacatataccatagtagacaagtgtgttggatgggttctgcttgataacgatgtttacataacatggaacttagaatgaaacctgaatgcccaacaaagccattagttgtgaaacaaactccgggtgtccaggccatgctgcgccagttactagattcccgtcagtgaagcacctgtcgattggatctggttctagccaagttcctcctccaagtaccacgttcagtttcacggctggataagcagtgcatttccttccctgcaccagccagtgaacaggtcacatagaataaattcctcaaacaacttgtagtggcaagaaaaaggaggacatagttaaataaaattagagctacgaaggaacagtgctgaccttgaggacaccagcagcagctaagatctgttgtccgtggcaaatagacgcaactggtttctcagaattcatgaactctttaactatgttaaggacatgttcgttcaaggccagatattctggtgctctgcctccaggaatgaccagagcatcataactcgaggaaactaggtcatcaaagttagtagttaaagcaaaagtgtggcctggtttctcactgtaagtttggtcaccctcaaagtcatggattgcagttgggcagcgatcaccagccttcttctctggacaaaccgcatcaacttgacatcccaaagcttgaagggactggaaaggcactttgacttcatagtcttccatataatcctgcaaaggtcaaaaattaccaaaagtgtgatgttcatatcaggagattcaacgatcttgatatcttctaccaataaatttaaaagtgtgaggtcatgatatttgaagtacaatctaaagcaagatcataggcaaaactactgaaaacataaattcatcagaatggtaagattgcttaccccacaaagaaacaagatccttttatttgctccagttattttaccgccaagagccttgacaaaaagctggataaattcaggatgaccctcatatgtagctgcagtaatcaaactaccatcaacaacacagacatccggagttatcggttcgacccacttggcacctgcagcaacaagggaaggtccaacagttgcataagctgtacattttcgaccattgactgtgtctgcagctgccaatatcaactgcccatggcaaatagaggcaatgggcttgccagatcttgagaactctttaaccagctcaacaacagatgcagtcaaggccaggtattctggagcacgtcctcctggtataaccaatccatcatacttgctaaggtcaacttcatcaaacgttgcattgagcgtgaaattgtgacctcgtgactcagaatatgtctgcaaattctctcagaaatacatcagaaaagtgtgcacagcttaaagaaacttgtctacaatacattctatcatccaattcgaagctcaattggaatgaaccatttctaaatatagttacaatggatcgtatatcaatagatcaagcagctacacatggagatctagagagggagagagaaacctggtggccacaaaaatcgtgaacggcggtggggcaagagtcaccagctttctttccggggcagacggtgtggacggtgattccgaaagcttgtaaagcttggaacggaaccatcacctgagagaagacgccacacactaatcagctgatatatatataagaacaaggaagaaatggtattaagaaaaagaaaaaaaaaagttcagtagcaaaggaagaagatgacctcgtagtcttccatgtagtcaccgcacaagattaagacagttctcgagttcgccatttttcagcaagagagatgaagatggagagagcgagcgagagagagataatgactctgaccggagctatctggtcacggcgacgtttagggagcacatgtgtcatgtggtttcagtttcacaagtatgccagattttttttttaaaagaacaaaataaaattaaaaaagcgtgaacggcaggattcgaacctgcgcgggcaaagcccacatgatttctagtcatgcccgataaccactccggcacgtcttctacttgttgtctcaatcatctgcaaacggtaggtataatatagtgcacatcatcgtcatctcttaaaactgaagaataaactatacagtaattcggtaaagatggtaatgttttatttatccttatagaattttgaaaccttaaaaagttaaaatcttatatatcattcaatgcgttttcaaagtggtattgtatgccttgtcatacataaatatgaccaaagactatagcgctacgtagtcaaacaagtttgtttatttacatctaacatgccaattggcttgagatctgtaatatttgtcaaccttatctccattgtcatcaccaaggtgtcctagataatcacgaaactcttttttcttttctctcatagataagtgtttttcaatttaaaaggagaagacattagaaaaaaaatacatttgaccactcgagaggagctctaaagagatggaggaaatgaagccatgcgccgcaaactcgccgccgttgacgccgataggtttcttagagagagccgccaccgtttacggtgactgtacctccatcgtttatggcagtaacaccgtttacacgtggcgtgaaacaaacctccgttgcctccgtgtcgcgtcgtctctttcttcactcggaatcggcaggttcaacgtcgtatccgttctctctcccaatactccggctatgtacgagctccagttcgctgttcccatgtctggtgcaatcctcaacaacatcaacactcgcctcgacgcacgcaccgtctctgttcttctccgtcactgtgaatctaagcttcttttcgtcgacgtcttctccgttgatctcgccgttgaagcggtctcgatgatgacgactgatccgccgattctcgtcgtcatcgccgataaagaagaggaaggaggagttgctgacgtggctgatctttcaaaattcagttacacttacgatgatcttatccatagaggtgatccgggttttaaatggatccgacccgaaagcgaatgggatccggttgtgcttaattacacttccggtacgacttcagctcctaaaggagtggtacactgccacagaggaattttcgtaatgtcagttgattcactaattgattgggccgtaccgaaaaatccggtttacttatggactctaccgatatttcactctaacggttggaccaatccatggggaatcgccgccgtcggaggaactaacgtctgtttgcgtaaattcgacgcgccgttaatctaccgtttgatccgtgatcacggcgtcacacacatgtgtggagctccggtggtgctcaacatgttatccgcgactcaggaatctcagcctcttaaccatcccgtcaacatcttaaccgccggttctccgcctccagctaccgtcctcctccgagccgaatcaattggtttcgttatcagtcacggttacggattaacggaaaccgccggtgtaatcgtctcgtgcgcgtggaagccaaaatggaatcgtttaccggcaagcgatcgagcgagattgaaggcacggcaaggagtgagaaccgtcgggtttactgaaatcgacgtggtggatcctgaatcgggtttgagcgttgagagaaatggagaaactgtcggagaaattgtgatgagaggaagctcggtcatgctcggttacttaaatgatccggtcggaacagagaaagctttaaagaaggggtggttttacaccggagatgttggtgtgattcattccggtggttatctagagattaaagatagatcgaaagatataattataacgggaggtgagaatgtgagtagtgttgaggttgaaacggtgttgtacacgattccggcggtgaatgaagtggcggtggtggctagacctgatgagttttggggagagacaccgtgtgcgtttgtgagtttgaaaaatgggtttagtgggaaacctacggaggaggaattgatggagtattgtagaaagaagatgcccaagtatatggttcctatttcggtgttgtttatggatgagttgcctaagagttcgacgggaaaggttacgaagtttgtgcttagggacattgcaaagaagatgggtgataagacaatttcttaaacgtctttctttcaccgttccacaaaattacgaatcacattgattctaattttatggaatgcatatgttgtaccaatggacaatggcttaatctatatttgtaatccatctattgtatacgggatgtgtttcctttatatgtaacaaaatggtttggggtttatttgttttcacgctgttcggaaattggaatattcttaaaaatatatattgcctatgagcttatgtaagatgtttaagaatcttttttagtgtgtttcattttattagattctttaatgtcttaatgagaaaacagaaaacctaaaccctaattgcaagctttcgctttcctacataaaacatatgttactatatttctgtgagagtaaa

SEQ ID NO: 35608 - DNA, 4347 bp, Arabidopsis thaliana landsberg
agaaaaaaaagaagaagaagccatggcagacgatagagagaactcagagaagaaacgaagattcgtaagaaaagtaaattagcaatacatattatgagtaagagagtaagagagaaagagaggagaaacttggtcttcctttcctcgaagacttggtctcccacttgatagaagacttactaaacaaatatttttttaagtgactaaaatcaaaccacctaacaagacaattgagacgaactaaactaatatgatacagaggtttactatacaccggtattttaaaagattgattttgtggttgtcaactgtcactgaattatgactaagtcattgtaaaagacagaaataagattataatttatcataatttcgaggcaaatagacaaaaacttcaagtttgtttcctctacaaaagatattttgaagactcaaactatctaatttgctaaaatactctttttagttttccaaagttgagtggtgtggacagtggagtgaagattgttaaatatatttttcttatttacttttacaattgtaatattagtttagagtttggcttaatgcgtcagcaaccattgtgggttgctgtttaaggagcatttggtttctaagggtttcatgtactggatggaagaagtagtgcttgagagcatcctctgcgctgattcgtcgcctcgggttaactatcaaacatctatcaacgagttcaagaagcggccgtggaattgcgtctagaaactctctgctttttgtgttgagttcgccccattttctcaactccatccccttcaagtaccttgactcgtataattcctgaaacaacaacacaaaactctacctgatttcatctctcacgatcatctatttaatcactttgtcatcaatttacattattaagatatatatgttctgtaatgggagtgcagtagaagcaatagaacacaaaacgctaacaatgaaaacccttttatgtgatatttaagctggcggtaaaaagaacagagcaagtatatgtgtctcataaatgaatggagagtacagaagagtggtaagatgagatgttaccttagggaaagaggattcacggttgtgcagcttggctacttcccataattcttcactgcctcgtagttgtgcaatgtcctttatgttcctgggaaatacaaggtcgttgtaagaaggcaagaaagaagaaacgagtggaaccgagtgatggtgtactcattcaagtcagatcttaactgttcagggtcaccagtgaaaggtgtccttcccattatgaggtataacaaagtaactcccgcagaccacacgtctatcttaggtccttggtgcaaagatctgaagcaaacctgcacaaaccaattcagccaagaacagccccagagaattagctttcccatcagagatgtgctaatgagtagctcaggcctacaactttagtctgaaggcacaagattttcatatttaactagtattaagagaagtgagctatagttacagttgatgtacctctggagctcggaagcctttggttcctgagcaaggaccgtctttcttctcaattacgtcccctagtaaagtcagaaaaactcttcttaaggtttaaattaaactctgaaacaaaaacaaaagtcaatgattacaccagaactgcacctgcttcaggccgaccgttagagcacagtggcattggggtcagataaagaagttccttctcagctttccctggaagagcagctacccgttttctcatagacgtaggagctttggatgatacttcatggtttggaattggaacagacattgtctcttgcagaaaatctaaaagcgcttttcttccatgacatggcaaaggctctcttctcttttcacctgaagggttgttccttgtgctggtcacatctttagctgaagttaagccagacccttctgccccttggctattgagtctctcccatctggtcatgtcattccgagctcttgtctttcccgctgctttcttgatactattaggcgctaaagttttctgagaaggtttgttggtccctcggtttaccgcatcgagtgatttaaccaatgtatgatgtttcttgctggcggtaggaagacctgaagctgcttttgatttatctacagaacataacaagagatagctttagtttccatattttatagccaagtacagcacatatgcatgaggggagaagtttacctgctcttctgtacttctggtgcaaatcctaattgaaccatgcaggaaaaaaaagagattaatatcaatgggtggggaagggaacataacagtaaattttaacatgaacgtttgtgttcctcaagtttttcagtgcctctgttagacactgaccttagaattgaataagcagtttttttcggttacttcaaattctatagtaagaaacactaaccaaaaaccgtcgctaggaaaattttgataagagaagggtgacaaaaaatgctaaccatggcaaggttaaaatcaatgagatagcctttgttggtcttcctagagaagaggaagtttcctggcttaacatccctatgaacaacacccttcaagattgtgaagagaaaaaatagaactggttagttgcgtgattgaaatatgaatgctaaaaataattcagtccaaaatctgcatacctgcttatgcagactcgatagagctttgaacatgcagtagccgtaccactgcagctgatacacatctatttctctcttcaatgaatcaggtctgtcatgttcaaggtgctcaaggatgatgcaatcagaatctccattcttgagacagccttgatgttttattatacagtttttccccctaaataaagcaataatttcagcagtttcagatcgttatgcttgaaaatgtggaaggttcatgcctaatcatacttagttacttacccaaaacgctccagcattctgatttcattattcacatagtacttctgagcgccaacatgagggcctgcaaggaaaacaaatgaggcaagtcttccaacgaaaaacactgatgcagtgaaaacatttagccacatatcattttctttcccgtacatttaattgcaaactctgttccatcagttttcctcgttgccttataaacaatcccgtagccacctacatttggatttcaccagtgattagtcgataactagttaagttgttacaatagaatgaggaatatagatgaaatagactggaaagaaatacctgaaccttcttcctctacaatagtgtaagaatcaaaatctggaattgtgttatgctttgcctgatcctaaaccacaaatatgagaagagaacttttaatatagtgtgcattaatgctaaaattcggtgcaagagtgttaacgtagttaacattatataaaggcctcactctagacgaaagagacatgtctaccttctgatctttaagacgaacggtgttaaaattctgcttcctcttctggataactttactttttctggtgtgttttatctcaggggaacagctgtacgttttgctgtttcccggcaatttgcattgatccagagttttttgtaccaaagatttatcttgattagcttctgtagcagaaggcttcaacggcagctctctgtcaggggtgctaacgatgtctacagtgtgatcatctacaagtagatcttcagtgtcatccacaatctgcactggttctaactcattttctgttggcatcaatgaggcaacgggatcggactgcacagaatcagtttgtatctctcccttagggaagagatccttcttatttttatcatcaccttcttcgattaatatttggttgtcagcaatttggaaacctccaatttcaggtcgctcgtaatatccatcctcctgaggagatggcaaatcgttcttgctttcctctaaccgatgcgtaggattgacatccactgaagcattggatgtctgcggaccaggctgatgatcttgaacaaaagcctctattcctcggttagatgcacttaaattgaaaaccgaagcttgggattcaagagctaaaatagtcccaagcatagttccacaggcaacagttctgatgtcgttaggtctgctatctattacagagtaattcacctagagaaaataatcaataacacaatgaatcaaccacccactaaaccataccgtgagaacttcatatatatcttaagagattacttacatcgtttccatcatttcgacttcttttgggcaacggcatgagctctagctcctcttgttccgcattctctgatacattaccataaataacccaaaattgagaagagaatctctatgtaagtgtgaca

SEQ ID NO: 35609 - DNA, 2763 bp, Arabidopsis thaliana landsberg
tcatttaggttcggttagaacatttcagggaataaacctatcatttgcatttgatatctatgaaaaacatttcacggaataaacctatcatacgtatctttcattacctttacataatacatcacataaaagcataagtattctttcacctagtcatttttttttgggataaattctatcggtaaaaacatactgaaatacgctagagtggattcttttcacttgtcataaaacccaataaaaatcatatttattattttattattatttaagttcgtttcttaacataatacattacctctatctaatacttcatataaaattagatttaaaatcctataaaacacactaaattctgaaataaataatgttaggttgtttaatttctttttttttgtttgtcaaatcagatatattgatataaaacaaggttacaaaatatataaacattataatacaattattatacgcaaatacaaaaatttgatacaattttgataaaggagtgaaagtaacccgacattacaagcaaataggccgtggttggtcatgatacataaatattttttaattataagaaaattactattattttaaaatcacaaattttaaactgtatattttcttaattaggcactgatgaacaattcgtgatacaatgtggaaacatgtctcaaatcgaaacccttatttgatatgttattaagatacctgctggggaggtgcctcatcccaaaataaactaaattaattaacattcatttaggtagaaaaattactataatgacatacttaatcatataattatacttttccttcataccaccaataaaagcagatcgctatctagctcttagacaagataatagcatagcttttaattttgataaagctgaatggtccttgtagataaagttaagagaagtatatgttttttttttacaaaggcttgttttcattcattcacataaaaacaagtacaagaagtggtgattcaaagatcacaaagtttaaaacatatataaaagagttattccctaataccatagtaagatagataaggtaaaaggacatataggttctatgagagctttgaaacaaaagctattaagcattttgatacttgtgaggtcacgactatttgattgattttccacgagcgaatcggtagatgacaagttggtcactatcaaaagacaaggtgacattgaagaaggtttcacgtccgagattttcggcgacacgagaggggcgagcttgaattgttcgtcggcaaggagatgggtaattgcggttatatcgtcgggtgggattggagataaaaagttaagaaagctttggtaaacactgtttcttggagacgggatcataatgccgttattcctcaaattttcattttcatgaataataactttaatatggtattttggaaaaaatttagaaagatgtggtatttttgttagttttttctttttcttattatacccttaaccagaataatacataaataataaaaataaaaggaaatacaatttagacctaaaactgaaaaatatcttacgtagtagctctttagggttcgctcttctcttttcttcttatcattctcaatggacaagtcaagtaagaaatccaccaccaaagtaacaatcttcgtcgccttaattaattatggttcccttctttgttgttagtagttttactctattaatggcttcttcgcaaatttaaaagaccttgatttggttttgcaactttaggatgaagcaactcctgctgtgattaagcccacgaaaccattaaaggaaggtaagaaattgagtttcttttgtgtcgctctctctttgctacattaaaagctcctttattgctcgtactgctttggcttaggggatacgttatttaattgatctttgagcttgtgttctctatctgctgaactctgaagtatgtcgatttttaaaaacattttattgattttaacgtttttgttggtttttcttttaggtaagagggagccagaagatgatttagagaccaaagtaaatctgtagaagcaaaagaaaaactttgagaacaaggttggattcagaggaatcctattgttcttgagagagtattaattaaattcattctttctcttgttaattttcttacatagagttttaatgatcgaaacactatgtaacaggagacaatggaaggattcaccaactttcttcaggtgatggaaacaaaggtcgatttgttagcaagaaaagtggatctattgacctcaaaaatggacttgtgtgcgacaaatgtagatttgttgacctcaaagatgaatttgtgtgcgacaaattcagatctaaaggcgatgttaacctcaatgaaggtataactttattttgtttttattttttttctctttatgaattttttttattcagtgaagtatatattctagtattatttacgttcaattaatgttttcatgaagtagcttcttaatattatctttaaacaattcagggtaagaatgttcctgccaagaagactcttgctatggctgcttcagatagcgaggactcatctgacagttcgtcttcagatgatatagagctttgtttccgtttcctaatcaaaattgttatacaattgcggccttcttactttataattatgtaaatatgactttgctttaacttttaaattgatcaggaagttcctgaaaccaagaatctcgtagcgagcagttcctctgaggatgattaatcttct

SEQ ID NO: 35610 - DNA, 5005 bp, Arabidopsis thaliana landsberg
agaactagtctggacctgagagttccaccaaagattctcttttgagatttatagattaaagtgtgaaatcattatgtataggagagagtctaacctccaatatgtcttttaacttgcttcctacaaccttcaaatccggggaagtatcactgtgcatagcagacatgttgggggtcctgcataccgcaaacataattattagacttctgaatcgatggcaagtagtcataacgacggagcaactaatcaaccttatgatgaatggtattttcagcttaggtgggacgatatcgccaaagaaggcagcttcttcagccatcttcagaagaactctacgcaagatttctcccagatacattccggaaatgattttctcaagaatctgaagaaaacaaatatagccagatataatcttatggtcatgatgatatttcaataagcgaaactctcggaaaacagcatagtttcaaagctcatacctgttcaccaggattcaaactatcgacatctagagagtggtcgtactctgtcaatggaagatgtgatgacctgaagtttccccattccatgttgatcacctacattgtggtacatacatactataagatgaaacaggtacttgaaagctcaattggagttgttatgttttattcgaaaacacaaaccatttctcctgatttgggtagcaaaccatgccatttgggaattgcatgtgcacgttcgacataggctgcatttgtgccggtgcccaaaataactgcgacaacgacatccgggttagtgtatctaccacccgcaagtgttccaatggtatcattaacctgtaaaacgtcaaaaacaaatcaacaaacacatgacaaaagggattcactagagagcataaggcgaaagagaactcacaagtgctgcgattcgcatgtcaagaccaactctttccagagccttattaagtgctccaacaacatcttgtccaacctatgcaacaggttaaacaaagattaaggcaaaggcgaaaactaaacattttaagtgaaatagttgaacgaaaatcgagcttaactgcttcttcgatggaaaagccttttgtccatttgatgagactaccagaggacagagaagtctgcttaacaggaaacgagaaagtgaaacctaattccctctgtctaccttctggaagatgaaagtcttcgcattctgtagcgacaaacttcgcaagagcttcagctataaaattgaacaactcctgaatccatcaaaagaacgcaaaagaatcttgttacacaaagatcatctaagactaaacatgacaaattgaagaacagaaaactgacatctgaaccaccagtcatcaaatgaggaggaatcgaaacttcttcgaattcttgtttaacaacacgctcttgcttcccgccaagaagcacacgcatgacacggaagtttgtcccccctaggtccaatgcataaaagagacccttttcatccctgttatattaatggtagtaaatgtaagacagacctacaacatgaaactagacgcattgccgcattggctaacaatattaaagcgaaaatgaaaccgcaccaaaatgttctacgtaatataacataatcaatgccatcatgccatctaatcacgaagtccataagacaaaagtgatgtctgtggacagacttttcagacaaatcatattcacatcactgtcattgtctgccttaatgtaactatgtattaaaccttaatcaaaagggcaataactctcaaatccatgaaaacaaatctacaaaatcaagaagtgatacaacaaaacctataagaaaatgagacaatgattcagtgggacatgatctggattccaaaagattcactgattctgaaacagtagatcaataatcctatctaatcgatcaattttgaccattaagagacaatgcaattacatctccaaatcaggacgaaactcatttcataacgtaatccatattacacaatcaacaacattgaatggatgacatattaggagatagaaatattctatcttctaatatgacaaagattgaaaatttcaatgaaaagcaacagaatttgaatccaattagaaaacattacccggaaggaagattatcaacgtagctgataagcatcttgagtttgctaccaccgtcggatgcaagaccagcatgcatctcaacggtcatagcatcagccacttgtctcagtttctacatcggagtcgcacaatcctcttcaaaggctttcaatatctctatcactcttgcccatttccctgcgcttttcattctcctccgtactatcaacgccgccgccgcacataccgccaccgaacacactaccgtcgttgcaactgccactttacccatctttctccctcgcccaattctcaaaccaaaaaaagttggcccaaattaataaaacaaaaaagttggcccaaattaataaaaaaaaaaagttggaaactttaagaacgctagagatgatggatctagttgttgaggaactggttttgtgaaaatattgtatacaaatttggagaacacgtaagcaagctctgtgttgtctgtaaactatggaaagtgatttaaattattgattttttcggatttttctcgcaggatttgtttttttgtttgtttttatgtatggttatggaattagtgtgaagttatgaaattgaccctgaagagatttggttttggtcttttacttgccgaattttgtggaggacgtttttagtaaacgattatttattattcggagatctaattactaatatcatgaatttatgatatcgaattttttaatttctcatttgttttatatcatttattaacggggtttttttttgtaagaataaccataattgatgcaatctaagtttttttttgtcaacgacgcaatatagtttcataattaaaaatatgattgtatatcagtatatgagaacatctagttttagttagtttgactttgacacgtcttttgctttactaaaaaaaattaacgtttgactatacttaagagctaaaagacgcaatttattaattattatggtcagcgccgaccaaaattatgttaattatttcgtaaattcttcaacccacttttagtttttatttgtgatatccaaataaaattgaaactatatatagaaaatcagtatcgcaaatttgattgatagtttgatacatgtcgaaactttgccaaaattatgttacaaaccaaaaagatattgcttggtacagttaattgggaatagtaaaatttggtattggcaaaatcagtgagatctttattttttggtcaaactagctttttataaatcattctactctccaaagaaatggttcaacaagtacatcaaagagactacaaaggtcaaagaaaccactgctacaaatggcatacagaaaacacgaaagaaaaagatagaagcatacataacagttaagcaactaaagttggagacaccaatagtgctgaaacatgagatgagctttcggaaataagagagcacacttggtgatctgctgtccggagatgcaacatcctctagtggataaaacgcatcatgaaatacggttacgatagcataggcgacaaagcaccaacttcttgagcctacgagatgtgagaaaaacctcaacttcggagaggtgtggggttgcgaaaaccaccacttctcgatgaacaaatctggagtccaagacccaagatcatttcttgttaagacgtcatatgtcttttcctttatcctgcgtgaaatttcaagaaaccaaaccaaagaaacaataacatgaattgctcttaaccaaagtttttgaataacatcctcataatgaggtaagagaagcctaagcttatacagaatcaaaccaacctcatactgaggtaaaagaagctgaattcgaagtccaatcgaaaacaacacatcctcataatgaggtaagaacagcttgagcttaagcaagatcataacagcctcatactgaggtaaaaccagcctaaaactagtagaaatcatcacatcctcatggtgagggaactgaagtataaacgaaggcatgttccaaaggaaggtaaaaaattcaaagaaattactacctttcagatagacaaaaccttttgatagagtgactagaggatgagagaggtgtggaatagagaaccaaagctccaaacaagcgagaggaaatacttggtaccacgaactgcacacagcagtaatagatcgtaaagcaaaacccagatctagagggctcaaagcttgaacaagatcttatcctagatctgaagacctcaacagcaaaatcgagagaaaggagttggaagctccaacgagatagtctggtgggtctggagggtcgggaggttcagaaggagagaccaaactggtcaaatcttgcggtagagcacacggctgcggattcagagaagggaggagcaaaggtggagcaggagcccgagcaagcatcactaaagccatagaagaaaggaagaggagggagaaagaggaagattctcgccggtgggcgagaggtcacaccaacggcggcaaggagaataagaaaccctagtcgtcaaattgagagagaaaaaggcggttttggattgacgatgtcccttttcatagttattaacaatatatatttaacatttttttgctcgatttaaattcactcagtttttgacaaatattgatgcaacgcctaacaattttcattgctagattgcttttgaaatttgctcgttattattatcaccaacggctaccaaacaaacatgatttagtcattgttgttatcgataaataaaacaaacatgatttagtcattgttgtcagcttcaaaatttgcatcaaaaggagattgatccccggtctctgaaaagggtacggtcgcaagttaagcgagaaagatctcgtatggtccagtactctaacaaaataatagtccaattttgtatccttccaatatttccatcatccaa

SEQ ID NO: 35611 - DNA, 355 bp, Arabidopsis thaliana landsberg
tataagaaggggtatgggtatatatacacatatatattccttatgattaccccaatccaatagactatgtatgtgtcgcatctctatatacatcgatcattgatgatgatgttgatgattaattgatgatcatttgggagataagccatcaacgagacactgcatgaccttgacctgtatactaaggcacttgatgtaatgagccgtctcttgcatcagctttgacgtctccattactacgcctgccggaacaagattcctcaggcttttcgtcgactgctccaccaccggagctgtatggttactcctcctacgaattgatgatatcttacacgttaccttcctattactactt

SEQ ID NO: 35612 - DNA, 2279 bp, Arabidopsis thaliana landsberg
ctccgtttccaccactcacaacattggaaccagattaaagaaattcaaattgtttattctttcaaaatattccaggtgagccaagctctgggtcaagggactgagatttgagagcataaattgggtcaagagaagatcaagaagaaaagagcaagtttcgtttacacgatgatacaaagattagtcaagaaaattcaccaatcttcttctatctcaagaacatgataacaatagatgagaccaagaacaccgtttagtacttttccaaatttgtagaaatataagttatgtctctcttgttttgtaaccttgtgactgtgagtagtgagtactcttgtgatatagtgagtggttatagaagaacaagttgtatgaatgtcatgtctatctttttttgtaaattttccctattgtatgtgtgccccaatatataaaaccggtgaatttgtgatataatgagaagtggttcgagaagacaaagttggataatttcatttcatacactatacaactaataaaatggtcaagttttcattgacatagcaatcaacatcgagtctttttaagtcctacctaatacccccaaaagatttcaggttctcaacaagagaaagcaaggataatatcaaatgaagatgcttctattttagacttttagtctacatcttacgtgcagcttgtcacttttatgttttaagtccaaaccccattagactaagagaatattacgtgattagacacttttttgaaagttaatgcctaattaggcactttaaaaagagaaaacactttcgatagattatttgacccatttaccctttaaatacatttttatttcgttacattttatttgtctttctctccttctcctctcacttctctctctttctctcatttttcaagaagagacaatcaagcggagaaaataaaaacctttactatgattttccttcttcgggttttcattatatgttttcagaatgagacgaccgttagtcaaaccagataattaacgggacataagttatttaagaaagctttaaaattcttccgttacctatatgttataactttttttttgtagacaaaaaaatgctaaagaaataaatttatatgttataacttataaacacttaagtattctaattaattacataatttaatactgttttgttttctattttattcaatcctataaattctaaacttctttccctacccaaaccatccaaatatcaaagcaaatacaagtcaaagagagatgggaaacaattcaagagctattttctctttattcttagttgtagccttatgtgctgcaattttaatcactcccggaatagctcatgatgaacaaccaccgccccgcttacaatttccaccggattttcctattgatgtggaaaaatgttggtcatcacttttcaatactcaaggatgcgtattcgaacttttgaagtcagttttttctggtcggtttggagatgttggagttgcatgttgcaaagcattctcgaccgtagatgctaactgttggcttcatatgttcccgcttaacccgttctttccacctctgcttaaggacaactgtgcgcacatcgtacccaattccccctcaaagtaacttaatgctttataatatagtcgagttagtttagtaatctaaagaaattctcctatatatgtaccaagtgccttatatatgaataaaggaaattctcctatatatgttccaagtgccttatatatcttttgttcccatttattgatattgtggtaatttattagtttactctattctgtctttgtttacgaatatatatgggaattaaagatataataacttacttagtttccatacactaaattagctgaagcatgtagattacttagaaagtattttcttcaaattggaatgcttatttgactttgcattttccctttaagacaaaccaacaaagaaataacgtttccttcaaacaatttataaaaacatagaccgtttcaatcgaacattttgtcacctcccacatttgacctaatatcacaaaacttaaggtatgtaattctgtatgatataatttgcaattgagatatttcataaaaatgatatgttaattatcgcgtattttataatggtaaaaataataataataacaccagtgaatgtgtcatatttcgcgatcatatagcttttaaaattagtgctgagtatatagttacttgtagcttttcgatcgattggccatctattcttcagtttatgtttgattgcagtt

SEQ ID NO: 35613 - DNA, 3333 bp, Arabidopsis thaliana landsberg
agttggtttgcaacactatcgagaatgggacagcaaatagaattcaaactagtgcagagattgctgtgattcttaaagtttacaaaaatgactttggaagacctttggaaaaggtaactaagaggaaaagatctgaagttattttagaggaagtctatggagaagacagtgattaatggaggtggaagaaattgttttatactcttcttattaccttactggaaggttagcatttggttttgtttaataacaaaaatgagtaaactattgtaaacattatgtgtagcctgaaactagtttttattttgacttaggatctgccggttcgtcacaacatatatgtcatgcacgtggagaagaaagtgtctgacgctatgttgtccactctaattcacaatgctaaattgaaagatggcttgaaggcaagaaaagatttggaagatatgggaatacgaagccacttgcatacagaatcacggggtaagaaaacatatttgcctccagcagcttaggatgtagaaagaggagaagaagagattttgcctgaggttatctaagttcagaggtcctgatgggtattgtgcaaacatcgctaattgtgtgtcagtgaatcctcctggtattggtagtcttaagtcagacgatcatcatatgctcatgcaaaatctattacttgtggctttgagagggttgctaccaaaagggcctaggattgttgtgactcgagtatgcaactttttcaacagattatgccagtgtgcattagatgcagagatgcttttgtcattggagtctgagattgtggaggtaatgtgccaaccgaagcggttctttcctccatcactatttgacatcatgttccatcttcctctacatctagcaagagaggcgcgtttgggtggaccggtacactttcgttggatgtatccatttgaaaggtgttatatatacttttattttattgtctctattagtaattgttgtaatttgcttgattagtaacattatgtcttgtgattgagttgtaggtacatgaagacacatataggttatgtgaaaaaatatgcaaggcctgaagcatgtatggctgaggggtacttggctggagaatgtatatccttctgcttggagtttctacaagactcattatcaattccagaagtcgctaaccgcaatgaagatgttgatagtgattcacttgttcttgaaggcagaccactgcagaaagctacacaagtaactcttatgagtaaagagcgagacatagctcatagatatgttctaatgaacatggccgttatggatccatatgttaagtaagtgatcctgcattattttttatcattattatttgattgtcattaacttatattttaagaaaaggaagacacgaggaccaactaggatgcgtaaaatagcaaagcaacctgacgagaagctaaaagttgaatttacttctctcggtgaacatgtaggttcagggtcaatcaaactttcatctttccttggtcctcttgggagagagcatgtacctgttttgcttcatgactggaggcacttacctgatgagactagggacacactctgggaagagattcaggtatatcagtctcatttgctgagtttaatcattgcatgattgtgtttaactatgtgttttcaatgtgtaggggaggttcaatttgaaagaagattggcaaaaggatgctgtttttaagcagatgggttgtgtgtggaggtcttctaagtcgaagctcacaacgaaagtgcgtgcagtgaagagcaagacggatttgctttcgctgaaaccaagtaacatacaatctgtgacggcttggaatgcttgggtgaagaacaggaagaccactgccttcaaggttgtgtatttttgttattaaattgacatttggatatctttagaagatgatttgttttaatggaagttgcttttgcaggaaataagtgacaagtacaggatgttgaagaaggcacagattccacacaccaccagccgcaaaggaatgattcgcctagcccatgagatggtatagtatatgtctactctttaatcaattaagcttgtgtaaattggttaccatcaactaatcactatcatacttgtagaaaaaaaagagttccaaccctatattggtgacaagaagcaaggtttggataccaggtcatatacacttagatgggagacctgtcaagcctgaatttgcagagaccattgtaagacaatcatttcacttgctttcgtttttttgttttgctagtacttcttgtcattacattttgtttcaggaaaaaatcaaatctattgatagtgaaatggactcatcatcattcaccgatcttaaagaagatgctgtgagtcaagtattaggtaaagacaagcctggaagacttagaggtatgggcagaggagtcactgcaactaagttagcattcatgttagctagagattcacatgtggagaagcttgaagctacacaagctgatttgctgacaaagcttgaggacttgcaaaatgtagttagtggcttagctgccaaaaaggtaaattatctaactgaagacacttgtgctattaagcaaaattgaatgttatatgttactaattccattgtttttgtcagaaacatgttgaagaggtttctaagtctgaggctagtaatgttagtgaaggagttcgatgtcagttacttgattggtgttcagatgatgatgttgctgtaggtgaaggagaattctgttatgctgaacaaatgtacaagattggacggattctacttggacgtaatgttgcggctgttgttgtgaagtcagtgtcagacgccacaacttctttctggaggcctacacaatctgtgagttcacttggccaagctgttggctgcaaaattccatggccattcaataaaataattctggacaatatagactcaccaactggaattaagacagctggttcatcggtaaaagttttttctttgaactagactaatttttgtttcaagcttatgactggaaggcttataataatttttctttggttatgtatatatgctaccaatgcattagatgataagatcctgatttatgattggaattctgaggatgaaataatagctgagggtagttggtattcaacggaccaaaaagatctagtcaacaatgttcctttaggtccaaatgctgcaattgtgactgttagtaaagtagttaacaaagaggcttttctatggagacccagtgcccatatgagtttgatgggtgatgcactacatgaaaacattgcatggcctatacataagatacaattcattcgag

SEQ ID NO: 35614 - DNA, 1824 bp, Arabidopsis thaliana landsberg
tggggtaaatgggttgcagagattcgagaacggaaaataggaactagactttggcttggtacttttcctaccgcggaaaaagctgcttccgcttatgatgaagcggctaccgctatgtacggtccattggctcgtcttaacttccctcagtctgttgggtctgagtttactagtacgtctagtcaatctgaggtgtgtacggttgaaaataaggcggttgtttgtggtgatgtttgtgtgaagcatgaagatactgattgtgaatctaatccatttagtcagattttagatgttagagaagagtcttgtggaaccaggccggacagttgcacggttggacatcaagatatgaattcttcgctgaattacgatttgctgttagagtttgagcagcagtattggggccaagttttgcaggagaaagagaaaccgaagcaggaagaagaggagatacagcaacagcaacaggaacagcaacagcaacagctgcaaccggatttgcttactgttgcagattacggttggccttggtctaatgatattgtaaatgatcagacttcttgggatcctaatgagtgctttgatattaatgaactccttggagatttgaatgaacctggtccccatcagagccaagaccaaaaccacgtaaattctggtagttatgatttgcatccgcttcatctcgagccacacgatggtcacgagttcaatggtttgagttctctggatatttgagagttctgaggcaatggtcctacaagactacaacataatctttggattgatcataggagaaacaagaaataggtgttaatgatttgattcacaatgaaaaaatatttaataactctatagtttttgttctttccttggatcatgaactgttgcttctcatctattgagtaaataagcgaatagcagagtttctctctttcttctctttgtagaacaataaatgtacgtaattaccaaaaattataaccataatttacaattacagttctaaagaaatcttgaatttagagaaaagaatcatggataaaataacttggcaaagaaaagctcgttccaagtatcttgaagaccaggcaagcaccaatgtatacagtctgagtagctagccggatttgctagctgctccttcgtcaatgggctccattgcttcttgtagattgacgtgtgcgcgtctttccgatagccagagagttgtgtaatgttaagtaccgtcaccggaaactctgctctttggtctaattcctctcctatcactttcattaaggttttgctgcagtctgatggccaatggttcatgtcttggatcggtgtcgtttgattgtaacaattttttccttgttcgcctccccaatcctcgcccctgatcatggaggtagacaaatatgaaacctttgtatgctaaatcttagtgtggtttctaattgcggatcatgttataagccacatttacttaaactattaaagataaaccggatcaatctaaactccattactcatttcattcaataccaaatccggactacattgttctaagccatatatctcctctctttttggttcctggttttgaatttgaagtgtttatagatagttaaatcacagtaaagttcaagaagttactgacttgtaatgagtaggagacatggtagcaaagaaaaccctcgtcttcaatggatccatattcttcttcacccatttaaccatagtcttcaacgccattctataagcatcttcactctccatctcaacgattctcttcttctcatccttgaaagaaccttcccttcaaataacaaatcgaaaaaa

SEQ ID NO: 35615 - DNA, 1076 bp, Arabidopsis thaliana landsberg
tcgagcgcataagtactcgttggaaaggtatgaaaaagatctacatgattctcatattgattatcactaatttcccacgaaaaatccccagaaattcctagaactactactgttcatcctcccacaaaaatctggacagcacctataccgattcgcataggtaaacatgtaatcaattggattgcagcacaaatactaaaaagaatgatcttaaaatcaccttgggttcctcctttcctccttcctttcttccttcttcctcgcctccaaactccaatggaagactcgcacccacacgacggggtaccaagcggggaggctgcaccatggagaggaggagggggcggctagggttgaggggtggtgctgcaatcacttgggggagaaggagagggagagagagggggtggcggccacaaaggggaataggggagggggcggctgcaaccaaaggggaataggggaggggcggctagggttaaggggggggggaactaatgggctccccaccgccggatcgagatccacggcccaaactcgctctcacgtctgctcccgaccccagcgcacaagtccaacaagtattctactgttttacttgtgaatgcttcctaaaaactccaaccccaactacacagatcacgaaaggaaagggaaaaagaaatttaacttcttttcagaaaattggggtatcacaacatctcttctcatcttgggacaaaagaaatgaccagcaagtatgtcctccgttttctttgctccaaaatgtcccattaagccacctccatgtgcttcctgtaacagcaacaaatgaacggagctaactggaatgcatagcttgttagctctaaacacaaacccatcactaacgatatatttgttccaccctttcccatctttacaatgcagcaacacatctttaaaatcagcatcatgaacatattggtctttaatcgtctctaatccaaagattttgtagtcaagttgattcagcaaagtatatctcctagacaaagcgtcagcaatgatattctcttttcctttcttgtgcttaataacataaggaaaagattcga

SEQ ID NO: 35616 - DNA, 5212 bp, Arabidopsis thaliana landsberg
  unsure (1)..(5212): unsure at all n locations
agagtcaatcaagagatcctcgtgaagattatcaaaatcaacttcggctaaaacacatggaagattgcatagaggagcctaaaatggatatttcttcatttagtactttccatacctatcagtggcgaccaggagagttgttagatagctctagagaggaggaattggtcaccaacaatgccttgatccaaaaagaacccctggatccaacgccacttccattagtcatgatgataccaagcaccgaacacactgtgaaccttactcaggtaagtaactctttaactcgatttgtttctcatgtttctataattgttactatgagtttatcatatttaggaaacattgagaaagagttggatttatttaaagaatatttggaatcaaactcttgtcttaggataaaagtaaaacatgaacatttcaagaatggtgcattgattaaagttgagccatgtttacttgtttataatgatttcatgactatgataacgcacttgctttttgccaaaggtgttgacaacattgcaggtataaaagaggagccaccagacttagaatttctcatgtccaatctctttaataggactggaattggagttgttttgatgccaaagattgattatccatccaaccgaacaagaagaaaaagcgacactgcttatgaacttgggctacaaggtaagtataatgtgagttccaatttcaatgattcttacttggttcttttcgttgtaggtgaattggatttgaggtcaaatccttttcaagtgggagaggatgatgtgatcatggaaagcacaaaggacttggaatttgatcaagagcttgtagccgaggaagagcttgaagcagaggagcagcttcaacctgaggagcattttgaaccagaaaatgagcttctagcggagaaagagtataggaaagatgttatcttaacctcgttggttttgatacatgatcatcaaatgggtatgtgtctcattggtactctttttcccttgtcaagttttgtcccaatgggttttcttgacaaggtttttaatgaggcaaatgattcacattcaaatcacccatttgatgatctaaaccatggtataacattcagaagttggcccaatggaatatatatgaagtccagccaattttatgaccatcacaagcccaagaagagcccaaaccaagtgggtaatttgatggtcaagaggagtgacgaaaatagaagttcaagagtcattttggagccaaagggtcttttctattcaaattctatctttaattattatgttgtgtttctaggcaaccttggagtatattccaagatttgtctctttctcttctcttcttcttctctttataaactccttgtaatctcttatgagaactcatctatctttttatcaaaaaccttttctaagaagatcatcttgttggtgtgtatatccagcaaaatccttagtctcttttggtgcgcatatccaaaggatctaagtctcgatatcttgaagcccttccgcaagcttctgtgatatccatcgattcattcaaatctatccatcatcacgtttttaagacatatatatatatatatatatatagtttttaggttattgtttagacctaaggttggagaggctaatctcgtttttctcttttgtactttgggagcaaaaccatgtggagactccctttagagaagatctttacttactcttttcttttgttattttcttcattgatttcttattcagactatgatttgtgtttctttgatcatgtctaagtaatccacttgttaggtttagggtttctcatttgggatttagatgatttagtagattgcccccttgctaggttatctgtaggattcttcatcttgactggtcttaatgatagttctagagtagctaactggaacttgatattagataataggtatgtccaccataggtacttgttatttgaactatcatagatgagcctaggcatttaagaaagaacaggtaggctcatagaagggctctggtttagatattaggtgaactaatcaaacttgataataatgcatactttagtataggatttctcggcttctccggttatcttaactctaactatagagagtttcgcggaacaccaccggttactctaaaatcatagtttgagctcaagaatggttcgataacaacctacctatttctagatatactatcatctatttcctgagaataccctaagcctgacgcttttaatatcttgtttcacaaccatccaatcgtctattgcttacttttgtttctctttagattcattattgttttacgtagcttaattcaaaactttagtctattgcgtgttccgagagctttgtgaattcgatccctaagtgctgcaactgacctctttatttgagagagtggtcttacgattaatttaacctatatctattcacatgggatcaaatgaatcacaaatacccatcatttgcaccagaagaaaagaatctgagacttggactttctactgatggatttaatccattcaatatgaagaatacaaggtatagttgttggctagttttgctagtaaactacaatctgccacttgacttatgcatgaagaaggagaacatcatgcttaccttgttaattcatgggcctcaccaaccgggcaatagtattgatgtctacttagagccactcatagaggatttatgccagctgtggaattatggtgattgacttatgacgctttcagtaaaacgacttttactctcaaggcaatgctgctatggaccataagtgattttcctgcttatgggaatcttgctggctgcaaagtaaagggtaaaataggctgtcttttatgtgggaaaaatacagactcgaggtggttgaagttcagcagaaaacatgtgtatatgtgccacataaaaggtcttccaccaacacatacttataggggaaagaagtcatggtttgatggaaaagctgaacatgagagaaggggaaggatactaagtggtcgtgaaatttttcataacctgaaaattttcaaaaacaactttggaaatctgatacaagctccaagaaagagaaaaaaagagggaaaatgctgaattagactctgatagtgaggatgaatctagtgagtcataagaagatgagggggaagaagtggacgaggaggagttatccatatggaagaaaatgtcgattttattcaagctaccttattgggaggaactccctgttagacataacatcgatgtaatgcatgtggagagaaatgtggttgcgagtattgtatcaacattgtcgcattgtgggatatcaaaacattatttaatgcttgtagagatttggaggatattagtattagaaacaaattgcaccctaaacttagaggaaaaagaacatacctaccagcagcagtttggtttttatcctatacagagaagaagatttttcgtaggcgacgttttgagttcaaagccccagatgggtactgctccaacatatctagaggcgtctcattagaagaatgcaagatcacatgactgaaatcacatgattatcatgtgttaatgcagcatcttctttccattgcacttagaggtttggtgcctaaaggtcctagggtagcctttgtacgcttatgctcgtatttcaaaatgttgtgtcaacgagtaattgatagggagcaaatattggctatggaggctgagattgttgaaactctctgcatgtttgaaagatatttccctccaagtttctttgatataatggtacacttgacggttcatctaggaagggaagctcgtcttggaggaccgattcattttagatggatgtatctgttcgagaggtacatgaaagtccnnnnnnnnnnnnnnnnnnnnnnnnnnnnnnnnnnnnggtgcattgctgagtgttatcttgcagaagaatgcatccaaatttgtaatgaatttttgaagaagacgacaaattttcaagagaaagcagaccgaaacattgagtacgagaacagctctattcttgaggggcaaccaatatctgcagggagatccatttctctcactgatttggagaagaaaattgctcatatggttgccattcagaacatggctgtggttgaaccttatgtagagtaagttccacattttaactagttcagtacacaatttctataattgataaaccaattgtagctgatttcttcttattttcattttccctgataagtgcacatctgcaacatctacaagactcaaactcaagattcagatgtgatgcatcaacactatggactatgcatactcagaattttgcctcttggttaaaaaatcaggcaagtaaatatttaatcagaatatcttactagataccgcttaaattctataactttctaacatattttactttccttttgttagatactgcttgattcaaacagtcatgatgagactcttaactggttggcatttggtccacgtagttgcgcaaggtcatatagaggttatatagtaaatgggcagcggtttcacacaatatcaatagatagaaaaagtcagaatagtggtgtttactatgaggctacagcaatgctaaggatacttcacaagcggtggatttggtatcatactatggggcagtaacagacattatcttgttggactacaatgtgttttatgtccctttgttcaggtgtcaatgggcagttaagggtaatggagtgaaagaagatgatggtttcactctcgttaaccttaatcatagtcaagttagtttttcaaaggacccgtacatattagcctctctagcaaagcaagtgttttactctagggaagacgagtcatcaagctggcatattgctatgagaggtccttctagaagattcagtcagaaagagtttgacgctggagatgcagacatcagtcctttgcctgcatatatgtgtagttcttcttcatttacatgattagttagacttttttttgaatagatgtctgataggaaattgtttgtttcttagcttattctctgaatagatgtcttagcttattctctgatagtttctctatatattttatatatattaacatttgaaatgggaactgggaactggaaagaaaaagagaggaagaaaacctaaatagaaagatgatgaggtagaatatgtgggaacccgtgaacctgcaccagttgag

SEQ ID NO: 35617 - DNA, 1180 bp, Arabidopsis thaliana landsberg
  unsure (1)..(1180): unsure at all n locations
tccgaatcgctcttcaccacgtccactctcctaccctttcaaacaactggtcttcattcgccccgccactgcccccaccgctacaaatcagtcgggtgcccctggactcgtttgcccgttctcccaagctcttcaactggctgcttcaactgtggaaagtccggacattttatccaggactgtccgtacccgaagcagaatcgatccagtaatcagcagagttctgggaattccgctcaagccaagggaaatgcggcaaacaataccacgggcaaaaatacaaggaaaacaggattgatttttatactcaagtggccacaacaccagaaggcgaaccggttatgacgggtacgttccttgtggccaatcatcccgcaattattctctttgattctggtgcttcacatacattcattagcaagaaatttgtggagcaacattgcattccataccatgaatcaagggaagggtttaaagtacattcacctgggnnnnnnnnnnnnnnnnnnnnnnnggcttaccaagtgcccgtaacattagctgaacgggactttcctactaatatgattgttctggaaggccaagacatagatgtaatcttgggcatgaattggttggcccaacataaagcaattctcgaccttgatccgagaaccatcagggttgagttatgaccaagaggaaattcttttgtctatccccattccagctaaaactactggcagaatatatgaagccatcataccggagatcaaggatattccggtagtatgtgagttcccagatgtctttccagaagatttgcctggattgccacctaaaagggatgtagagtttgtaattaagttgaagcccggtacggctcccatttctagaagatcgtaccggatgcctccaaatgagttggcagaactcatgattcaattgcaagacctactagaaaagggattcatccagccaagctcgtcaccatggggttgtccagccatattcgtcaagaagaaggatcaaacattatggatgtgcgtggattatcaacccctgaatgaggtcactatcaagaacaagtgccctcttccacggattgacattctatttgatcaactgactggagcaaggctattctccaagattgatctcagatcgggctatcatcagatctgtatcaagctcgaggatg

SEQ ID NO: 35618 - DNA, 9131 bp, Arabidopsis thaliana landsberg
tatttgcatcattattctcatcactcaaatggtttctaagtcattgacccttattttggatatagcccgacgcaaggaagagttggaacaattgctcctggagcatcagagtagagacgaagacgtgtgaatgtgaatggacgacgacatcagtttctttttgtattaaagcattgtgtgagctctcggttttcatcctcccacttggataataacagcagattcttttgttttttgtctgttgaaaaacaaagctttgatactggtcgtataagagacgagcactattgaatataaaatttgacatgatattcattatgggcaaagagattagaaaaccataaaaataataatcgcattagattggcgatattcatcttcattaaagtatcaagtttttggcttggccatcacatttgaacttattaagatgttttctttgtcgtctgagctcctctcatcatcagataacacaagaagaaagtcattataacaagaggcagcagttgaatctctacttttgttcactctttcgatcgatgctgaatcagacttgatttctctgcttccatgaatccctgaagattctccagtaactataagctcatcgtcatcatcatcttctactttcatctcaacttcatatgaatcttgagaatcagagacgtattctactgaaacagcttcttcatcatcactgtcctcaatataaagcatgcatccctcttttcgcaatgtttctatctcatgaccagtggatttctgtatgtccatttccaaatggtcctttttctcacaactttcttgcacttcttcctggtttgagaaattgtatagaaacattatcaacataagatacttagcagtagaatctaaactgaagatatagaaaatgaaattttaccacaataggtgacatgaagacctttcggagcttagaagacggagggtcataacctccgctgtaagaaacttctttgctaagaatcagatccggcgagcaagtcttcgtttgggaaatgtctgtaacggttgatgaggaaccatcaaatggttttatccagttacagcactcaatcacattctcactttcagtttcttgatcattcctgttggaaactccacaatgagggtggttcacttttggaattagctggaagaatacttggatcatgacctgggtgggggttgtaaagcaattctaagatgtttctacgcttaagtgaagcttcctttgcaggaaaccaattcctagttagctgaaaagaagcagaaaataaattaaaccatctcattcaaatcactgtttctcggtggagtgctttcatatcataagaaaacttaagttgtaaataagattataaaaatttgtttcaattttcttaaatatcatttgtgaaacagataaaatagtattctcaaatgcatgtttcaatagtcacatttaattttaagaaaatagtaaactaacaacgatctgcttactatggcatagtaaattcagtatgtcagatgcaacttcatcatattcaagagatggaaacaagactacttacaaaatttgccgatcttgagatgagggatggattgaatttagcaggagcttgagccacaaaaagatccaaatagtggagcaaaaagaggccacagtcaaaagaattctcttgctgcgggagctgaatttgtgaaatgaggcaatagcatcagaaaaggcactaaagaaattcacaaaatccacaatggtaatatcagttgactccactagaatagtaacatgcttttcgaaaatagcctaccgaccaaaactgatttgatatgtgccttctatctgacctcaaaaatcaagatcatttcatccttgttaggaagcaatacctcaagtgagatggactgcatatttggagctcttgaggaatcatttgttgtgttttcatgcctcgctttccactcttcacgtaggtaactatgaccacatgatggacatttaaatagttatgataaaatccatatatttgactaagcatgctaaggaaaagtggaaaaacgaaataataaaaagatgtaaatgggtagaaaattaacaaagagttccggtagaaaattaacaaagagttcctatagaaagaatcaatcatcaactggaaacccaaacactcctaagccagctttgatctcaaacaaacaaaaaaatagatccaacctcatatgcataatgtgcatccaacactgaagtaactagtaataactctcgagactaattcaaaagtatcacgacttaaaatggtctcctgaaacccaaatgtcaagaacaagtaaaatgtaatggcagtgaactttaatgaaacgtgttagagcatacctcggaaaaatgtttataagaccacctttgtggctttctttaattgagtccagatgcaagatgcagggaaccctttgtgggttttcgacttcatcatcaaaagagtgaaaatttacttataagttgtaaaactaagtcaacaagcataagaaaataacagaacgagttaatcttaccatgagaaggaaccaattcaccgggatgacagatgataaccagactccagtgaaaactgcaatcaaatgcaagaataagtcatcttaatagcggtaagaaaaaatagcatctgtgtgaaatatattttcacctgcagtttataggaataaatatataatctttttcaaaaagatccacattcttagtccacttctgcacacgttggtatgcttcccttcctccacacgtgctaggtgtacctttgtctaagttagccagcttccggaaaaagaaacaattgaaaaagtggaatctgccccgttccttcggtgaaattcgattcttaaggtacctgcaagtatcaaacccaactttacaagctgcttcgaactaggttatgcatggaaacggtaaatataaatgaaagcaaatataatatgacaagccttgcttttggcttgtaggcattctctgctctacagatactgtttttatttccttctaatgttaagttaatatggaaagatagtaacttacttgatataaaaatcaatgattgtatcgttgatgaaacgtcttggcttcagaagctcaatgtcttgcttcctaactactacagcatctggctctccttgagggtaaactagatcttcaaatgaatcagcgaggctgaagatcggaatacaaacagcacatatcaagaggtaagataaggtcataaaataacataaaagaagagtacatccccaaactgtcagattacatttaccaaagaacataattataaaccgcattattcgaagataattatagttcatactcacttggtgagtgaagttcccaaatcatgtccactaaaagcaatttcctcgctctctctgtcaacattcaacaacgacaaattaaaagttagaagttataacccaccagatagttttcctatcttcgtaacttctttctcccaaaaccctttacaggatttaaaacataagtgatccttgttaaggaaaaaagcttttcatatgttgattcgttcagcatccaagaaatctatttaggtaacaaggaaacagttgaaagcaagagaattttttatatgatagcacatatatattttgtccactatgtcatcaattctattaacgatgtggaaacaaaagaaatttatatagatttcaagacttgagcaaaagaccagttatatcatataccaccaacataataatgatggaaggagaggaagtggggagaactgcaatgtatataccaacacaatggtgccaatagtatttctaagtgacttacgttatggtgtcaaaccaaatattcttgtatctcgagtccaacgatctgatggtttctacttctttagaccatttagggtcatacacggaaaattttaggagatcaattcctgtcagcatgagtacagatgttagttagactagacttgacgttgtaaacatcaaaaactagcaatagagggattatgatgtgtatgcccttcttattcagataacgatttaaggaaccccctcgcttgaaaactccctttgcacttaagccacacaaacataaacaaaagtgaactttatggtagacctgaaatatctttcgcaatatcaactccttcaggcttcctggacttcagaaggacgttaacaaaggcagtctcaacctaaaaaatacaactcaagtatcattaaaaatacaattcaaaaatacaacataaaatgaggatcttacagaactcacctctaaacaccactgagactcaattttgatgatatcttctattgtccactgacaactaaaggtccctttagttgcatttactgaagaactttcaacattcatacagttgcgtgaaaatgttaacttcgagtttgtacagtatatatctccatatataataacatcagggataataagaacttgtgcattctcgggatcctgtatgtgcagaaaaagaaaaagagtatgagttactgtctgcatataaacccaagtgcataagccttgagacaaacagcatatcaacaacttttcagaggaagtagagcttatgcttttcattttgttcgtgatccttaactatctctagttaaaagaacagcatatactcgaaaagacttacaacttcatgtggatcagaagcaggatttgtggcttctccagttgaaactaaaagaattcagcagtttctttagagcaagcaattttgagataacaaacaggaaatgattactgaaactaaagatagagaatactaaaaaccttcatcattttccgacagagatgatgacgttaatgaatcgattccaatccttctatgggagccattggagataacatcaatcaggtcactctgcaatatattgtacaacaaaaattagaaaatttctagccattctcattccttgtaataactccatcatgactgcatgacaaaggctcacatttccatctccgctgagttcacatcttgacggttcttctttgactgggactgcataagccataattggatatttctatgctaccacacacactagcatctgaaaatttggaattctacacaattttcatcatttgtagttgagaactgttctccaagatataattttcctactattaccttcaacatcaataacaatgtgttgcaatactttactctcgctttgggtatccttcgcaactgcaatagaaagatattaacacaaaaaataacatattccttctcttgtgttaccatgttaaacttggggaaattcaatgagaaataagatcttccttcccaaatattttgcaggacacagccaaaaacaaaattcaatgagaaattcagagaagaaacactcacagcatcgaaggaattcatacttatcgatggcgcagtggtgttttttagtaactggggaatcgaatttgcgaaggagtttcttcgactcctcttcaacacggtcatcctcgtcagagtaatcaaatacatcaatcggtttccgcttacttcgggattgaactgaccggagagtcatcggcgccagaataatactgagttacagttccgacgggctcgagaaggtccaaagcgtattctgtaccaaagagacggaattttgaatttcgattctgtctagttaggttgacttttcgggaatgaccacagattttcaaaattcaattgcttgtctatccggttcgaccggtcatatccgtcaaaccattagttgttcgtctttccggttttttatttggcaaaccatgtatccggtttgaccgggaaattccattttggagtttttggtacagctgtgacaaaataatgatcataatttttgtttgttttatttggtgttttggagattatttcatatttcatagctttacacaaaatttatgttgttacatcagattttataatatacttacggtggtaattggtatttataagcttaaaatgacatttaaaagtttggttatagacttaacatgtgtattagagttagatagtggtgagtgttgaactaacttcaataaaaatccttgaattgtcaaaataatctattaaacacacattaagttgaactaacaatagctcaagccaaccataaagtacacctaaccaaaccatatatgatatttgaataaaaggtctttgttatccatagagactcttgccgctatataaactcaatcgcatatctttgaatttctcatcaacacaaagcaagcaatacaagagaagcaattagaaaggcttaaccataattagagattcacaaccaaagcaaaatggcatcatacaagctcttccgcattgcttttctagtgtgcctctcttcctctatgatgatcaacacttgctcagcctcacgccgccttctccaacaacaacctcttcctcaaatcccaaatctgcctatcccaacaatgggactacctccattgccatcgacgttgccacaaccatctttaccaacaatgcccactgcaatgtctccatttccaatgccatcagctttgccacaaccaaatcttcccaccattcccacggcaatgccaactttgccttcatttccaactacaattccttctcttccgactaatctcccatccattccttctcttccaactaatctcccatccattccctctcttccgactagtctcccatccattccgttcttctctcccccgccttctacaactacttcgagtccttgaactatcatcacttcatgtgattgatgatgtacattttatcataagattgttgtagtgagttgtttcattgtggtgtgtttttgtttggttaattacgcatatatacccccgtttgatgatttgtattttgtacctttaatttccttttgattattaatatgttgtattttacatttgtttgtggtttgttaaagtgcttacttggttctttactcatagtaatataaaaacaaaattggtgacgtttgatatatgcacgtataagttggtataagtgcatgattttagtttaaatttgcagtaaaacactatctcaattctttaagtttatgtggaaatttcgggttgtcaatttatcaaaataaatacatctttctttcttaaaaaataatcatgtaacagtggcggatccacaaaataattctaaatataataattataatttaattagctaatttttattataattattcaaaaaattatatattatacattagtgtatgacgcggagactaacactagcacgaactttctgaacaaatttaaaaaataaaacaagacgcatgtgttggtcgatgataaaaactgccacaaatgttggcgcagatgtgataacgttcgtttttcaaacatgcaatgcatcaacatctttggcaaataaagttagctttatatattttgcctcacgagtttcatttcacccatgtcatctgataaaaaccattctctttcttcagtcttcacattcatccactctccccattcaaaacatgactaaacgcagcgtttcaaggaatctagttacttgcttatagcctcccctaagttctccttgaacttcttgtgtcttgtcgtcacagcttttgttcttcttcaaatctggtcatttcacattacccaacaacccattttacttcctccttcactattcacatatcttaaagaacaacaacaagaacctgaacaaataatatctgagaacgagacggcttcctcctggagggcttgacatttgtctcgtttaatcattacgattacggtaacatgtggcatggactgtccgccatggtccaatttgttgcttgaagcccagaaaggtgacttttctaacgaggtgtcgtttttaaatttagaaacgggacgcagttgaatagcgaaaatagtaaacgagacatagttctgtttgtaatcagagtgcaaaccgatggcagccacaacaatttccgccggcgattaggaaacaaatgagcagcgttgccgtcgcaatgaaggtcgccgtaatcggcagcggaagtgggtttcctcaatttcattcttagatttctttttcgggtttcattcatgaaaataagttttcaattattcaaatcggagcagtttctggagccgtgtgtgcatcgactctggcaaggaatggcgtctccgtcactatcttcgactcgggtcgtggacctggtggacgcatgtctcaaagaaggttccttttgattaagaatgttccttttcacttataaagtgtttaactttgaatgatgatgtctcgtttaagcagagagattggagaagatgggaaggagttgatgttcgaccatggagctccatttttctgtgtgagcaactctgatgccatggctcttgttcatgagtgggaatccagaggttttgtttctgaatggaaacaagtttttgggagttttgattgtgcctccaacaagtttcttggcatccaacaggttttgaaacatcagtctttgtacttatattaaaactttagtagattatgaagtgtgatttacttgtttcaatgtatgcgcttgtaagatgcttgatactaggattgattgattccaagtaatcaatttctgattttaatgtgtgtaggaaggggatgcaaagaagtatgtgggtgttccgggcatgaactctatatctaaggccttgtgtaatgagtctggtactttttctaatctttctagtcgagagcttgaactcaaatctctgaaacatcagtctctgttatcaactccgtgatcaacattgtaggtgttaagagtatgtttggaactggtattgccaagatggaatggttggaagaagagataccatggttgttgacagattcaaaaggagaaaatttgggtcgtttcgatggagtggttgcatcagataaaaacattgtttctccaaggtttactcaagtaactggactcccaccgcctctgggtaagacttgcacaaactcagtcctcctgcagttgctgtttcagtgtttatcacatttatctctattcacttttatttgctttcctacacagacttaagtctagtcccggagttggcgactaagctgcaaaacattcctgttctaccatgcttctctcttatgcta

SEQ ID NO: 35619 - DNA, 4739 bp, Arabidopsis thaliana landsberg
cacaacccataacgcagaaaaacagattcgattgcacaaacaaaaaaacgtgctttccttgaaaaatctttagcttcaagctggggctagaacaagcaatttctagggaaacgaaattcgtgggattcaacaatggcgtccagaaaagtgtagggttttgcgaatgtcatgttaaacgcggcaaaatcgaaaaaggaaagacgaaattggaacccaaaggcagaatctttaatggaaaaaaatggaggaagaggaagaagagaaacaaaggttacaaaagaggaaaaattcgtaactttatcttgttgctgctgttgttcgaattcttctttcttttttcaccttggtggtcttcctcaacctttgttttttcccttaaagggttatttcgtcaacccttttaagagaaagcgtcaaaaatttgagaaaccctaaaatgccaaagcagaggaatttgttcctgaagaaagaataaaaagagaagaagacgaagaagaagagagagagagagagagagagagagatgaaagaatattggtttggtggatccgacggatggagtacacgggtgggtttggcctctgccacagccgcgcacgagttcccaaatcaaaccaaaaactttttgagattatcgatgctttcttttcctcgagataattccttacttttctcgtttattttctccccgtttcgggtcgggtatcataacattttctcgacccgataatccatgaaaatattgaaaacctaatgggcctaaggccgtgtgaattaggtagctatcacattaccatacaacatggtaaaaaatgtaaaatataaaggattacttagtaagtgtaatttacctcgagaccatgtatgacatggtgagtcaatccatatatccactgtttatgaaacagtcttttttttttgtgtacatgaaattatgagttcactgatttagaccaattacatggaactagagaaagaaatcttctaccactcaagcaagaaagattcgactcgatttctatttgtcttatctgcaaatggctagtattggtgaaagaataagtttgaactcaaatatttgtaatcgaaagagtttcaagagatcttctctctggttcatatattatttatatatatggattagtattaggcatgagaatgaccgattgacacgcgactgtcttagtagccatgcatgaagattggagtatataagacatttttcttttcttgaaacgtggagtaacacacactttcttaagttagtttcttactattttacttaacttttggaattacagattttaccagtaccactatatatatgatgagatcgtatgatgttatcagggatttgatcacataaaaatcattattttcttgcatgaaaagcatgcattaatacattttaggggagtttgttacagtattctaattttggtacttccaaaaaggaaaaaaaaaaaacccgccgacgcaatcaagtgtaaaaagaaatgacagcaaaagcaaattgatcagaccaattttgtcctaaaaataacaaataatttttgtttccaaaaaaaaacataaaccagtttctaagaatctaaagaaaaagaaacaaaatctaaaaattcactccgatttcattggacaacagacttgtcttgttcctatttcataggaaatggattttttttggagacaaaattttgtgtgagaaacagtccgaagttcaatctcttccccacatttagattgctaataaaacaagcctctccccaaatcctttattctagcctttccctaacaatggctctattaactaatcaatctttttaatttgtaatgtttaaaccttttttaaaaaaaaattaaaaaaaaaagtgaaaataataataaaagagtttacctgagaattaggttcaggatggcctcaaggagcctctcctatacacaactcctaggcctcctgtcctttatcctcctcttggtcacaaccaccactatggcggttcgtgttggagtcattcttcataagccttctgctccaactcatcctgttttcagagaagccccggcttttcgaaacggtgatcaatgcgggactcgtgaggctgatcagattcatatcgccatgactctcgacacaaactacctccgtggcacaatggctgccgttttgtctctccttcaacattccacttgccctgaaaacctctcttttcatttcctgtcccttcctcatttcgaaaacgaccttttcaccagcatcaaatcaacctttccttacctaaacttcaagatttatcagtttgatccaaacctcgtccgcagcaagatatcgaaatccatcaggcaagcccttgatcagcctcttaactacgcaagaatctacctcgcggatatcatccctagcagcgttgacaggatcatctacttagactcagacctcgttgtggtagacgacatagagaagctgtggcatgtggagatggaaggtaaagtggtggctgctcccgagtactgccacgcaaacttcacccattatttcacaagaactttctggtcagacccggtattggtcaaagttcttgaaggaaaacgtccgtgttatttcaacacaggggtgatggttgtggatgtaaacaaatggaggaaaggaatgtatacacagaaggtagaagagtggatgacaattcagaagcagaagaggatataccatttgggatcattacctccgtttctgctgatattcgccggtgatataaaagcggttaatcataggtggaaccagcatggtctaggaggtgataatttcgaaggaagatgtagaacgttgcatccgggaccgatttgtcttcttcactggagtggaaaagggaagccatggttaagactagattcaaggaagccttgtatcgttgatcatctatgggcaccgtatgatctgtaccgttcatcaagacattcattagaagagtagagaggcaaaagaaaaaaaccattaaacatggcacatataggagaggagaagatacaaaagaaagcaggggtttttagcgatcaaagagagccaaaaatgtttcattacaaagtgaaaaaaagttgtaatgttaaacacattgttgtgcatttgagctcagagtgtgtttcatcacaagaagagatagatggtattatcatcatcatcattttttttttctcctttcttcggttttgtttccctctctttgattcaaacctttagaatattcctcgtgtaatatacataggtacaaacaaaatggaggattaaattcattctttttataaacagagaatcgaatctaaattgtttacaaatcatcaaaactttatcactaaagaaaaaagatccgacacagaaactagcgacactgtttcgaaattccggttacagacagtggctgtctgaaatcaatctacatcaatccagaacaaaacaggaagacaataagttttaccagaattaaggcgagagacgtcacaaatctgcaggattctccaacaagcaagcataaggaacttttggccggtatagttttgtccgcttcggtctcggtttagtggaattcccgacgacaagcttacaccgccgatcaatttcgtgtctttctttgggttagattccggtgtctggtaatggcgaatcactaactaacggattctctgatttgtaactaatataacgcgggaaaaaaactaaaggacgagcaaaccaacctcagctgattattagagaaaaatattgatatacagaagaaccctagatacctccgatcctcgaaatcgatttgtatcttcaggggaagaataaatgtgtttccttttttcaaatctgtaaaatttataatgataaagatgacttttttattattattattaaatttgagttgagactcgagaccatgtcctttggaaagttaataaaaaacagagtattttttaagtaatgttattacatttggtcaaaaataaaggtggagcttttttgctttgcttcttctcattctctctctctatctctatatgtatctctgtctatcttcttcttcgtttcaagccctaaattgtgtatcttctttgttgcaatcttctctacgaagagaatggtgaagagggtcaagaattgagagactccaaagtgaagtctaatcggcacacaaacttgaagcctttccgagctgtcttgcaatctccgtcgtgttaattaaaggaagggttttgcgttttctttcctgattcggtcgcttctatggacatggagaggtaatcttcggaggacaatacatttcagatatgtgtttcgattagtttttttgtctttttttctccctcaaatttcatttctttttagcttcaattaaattcagatacgggttatgattaatctgcacttctctagttgtctgattatatcttctcattgtttcttctttaggagttttccatttttgcgttttttggttacataaaaaaaaaaaagaatgcgaggctaattagagatctaagcttaggtgtgagatacataatctttcagtagctatctgtctttgttttgtatttactgttttctgtgtccaagaatgtgtagtttgatttcgcatcactgacattggttgcatattagataactgtctgtgtacatttggttttatgcagtgcagatactgaacctaccagtttaaattgtgggaacaacatggttgtcaaaacttatccattaggaatgg

SEQ ID NO: 35620 - DNA, 4441 bp, Arabidopsis thaliana landsberg
caaggaagttacagggtagctgggtgccaaatttttccgttagcgtttattatttcattttattgctgatagggcatggtaatatttttaaaaattgcgttggtgactaaagtcccaatgataagttgggctggctttattgatcttggggactgaaaaaactttgtatatttaagaattttgcaattattaatcgcctctttctctatctctctcgggattgggtctcaaatctttttttgtcttcaactgttcgaaactcttctgcttttgtgtttcctgattcagccacatccacactcacaaacacaatctctaggttttttttcttccttttaactttgattctctccctcaggtagtttttaaaaattcaagttcttgattcttgattcttgatatgattaatcttgtactgtgtttcttgattattattttttgtatactttctgtgttttttttctcccttgctttttggaaattctcctacaagagatgaaatcatcaagacactttacttctttatgtaataattgaatcttctctgcttttgactcactacgttgagctacacaatttctttttactctgcatttttttttccaacctcaaattagggtttttttctcctctcaatttcaccttcatagatcgggtattcctctacgattacacaattcctgtattgggtttttctgggtttcttcagttcttcacgaaaaacatttgctttttatcaagaatttgactttaatcctccgaatgatttggtccgattctgtttgttgctttcgaaactgtttatgtatgatatataaaaaaatggtttggtgtgaaatgattacgatgttttaacctctcttagattccatcagaaacttttaaaattccacaccttacacgactcttcttcctcttatttttttgcaggatctcatttcccgaccaaactcatcgaactaagaactcactgtaataaaacttttaaaaggtgtaaacaccaatggcagtttattacacaagtaatgtcggttgttaccagcaagaaccaatctttctcaaccatcaacaacaaaaccaacaagcttcttcttcatccgccgccgcttctttcaccgtcaccggcggcgatactgttcgaaacgagatggtttttatcccaccaaccaccacaggagacgttgtaacaggaaacggtaccgtttcaagcagcgatctaagctttcacgatggtcaaggactgtctttgagccttggtactcagatctctgttgctccgtttcactttcatcaataccaattggggtttactagtcagaatccttcaatttcagtcaaggaaacgtcaccgtttcatgtggatgagatgagtgtgaagagcaaagagatgatattgttgggtcaatctgatccttcctctggttatgctggtaatggtgggaatggcttctacaacaattatcggtataatgagacatcaggagggtttatgagcagcgttctgcgttctcggtatcttaaacctgctcagaatttgcttgatgaagtggttagtgtcaagaaagaactaaaccaaatgagtaagaagaagatgaaagttaatgactttaacaatggttctaaggagatagaaggaggaggcagtggcgagctatcgaatgattcgaatgggaaatcgattgagttatctactattgaacgtgatgagcttcataacaagaagaacaagcttttaacaatggttgatgaggtgactaacttacatttcttaaaactagcttttggtttataacaggattgatggagtttatgatgatgatttggttgttgtggatgtgttaatgatttgcaggtagataaaagatataaccaatattaccatcaaatggaagcattagcttcatcatttgagatagtagcaggacttggatcagctaagccttacacatcagttgctctcaacagaatctctcgccattttcgtgctcttcgcgacgcaataaaggaacaaattcagattgttagagagaaacttggggaaaaaggaagaaagtcgttggatgagcaacaaggagagaggataccaagactcaggtatttagatcaacggttgagacagcaaagagctttgcatcaacagcttggaatggttcgacccgcttggagacctcaaagaggtcttcctgaaaactctgtttctgttctccgtgcttggctcttcgaacatttccttcatccgtatgtgtttcttctctcacaagtcacaatcttttcaatctcccattacataacatttaagaaactttctgtttcttttctggttgttttatttgtagatatccgaaagaatctgagaaaatcatgcttgcgaaacagacaggactgtcgaagaaccaggtaaaccgagctttttttttgtcttccctaaagttgcattctttgtgtgttatttttgaataactctggtttctatgctctatgattaggttgctaattggttcataaacgcgagagttcgtctatggaaaccgatgatcgaagagatgtataaagaagagtttggtgatgaatctgagttactaatctccaaatcttcccaagaacccaacagcacaaaccaagaagactcctcatcgcagcagcagcagcagcaagagaacaacaacaacagcaacctcgcttattcatctgcagacacaacaaacattgtcttctcatcagaaaccaaaccagatcgtgttctaggcaatgataacgacccacagcaacaacagataaaccggtcatcggattacgacactctgatgaactatcacgggtttggtgttgatgattaccgttacattagcggaagcaaccagcaagaaagtagattctccaattcccatcacttacacgactttgttgtgtgatattatctggttcttcttggtacagaggagatgattcttgaagcgcaagaaatgtgcttttgcatttttatagtattaggcataatacacccattctctatggattatatagtagatgtgtaggttgcttttgtgtatagtagactcttaagccaaatattgatatgtgtgtataataatattcacggtggtataaaggatacttgcaagtgtgaaaaaatctgaacttgagacttttgtggtaaatgtttcacgattctttatagtatactcatctgaacttgagacttttgtggtaaatgtttcacgattctctatagtatactagatgagtacccgcactacgtgcgggtctatgtattactatttacaaattattttatataatgtatgttcatataaagtaaagttgaatgcatcggttttgaaacataaatatgatttgtaattgttttcaaaaagtccaactatattagttcatctgaaaaacgaaagtgcttgagttgttttttattgttgttttagattctcagtttttttttttttaatttatatatctttgttcttttggttatatatttagtttgtgagacagtgaaattttagaaaatttgtttcttacattaaaaatataacatgtctttattaatcatgtctctgcatatccaatctaatcatattcaacttgatgttattgtaaagtttggttaagttcttgtcataatcttatatcttacgtattagttataaggatagctcatcaaccatctttcaaattacttgttttcttagcataaatctcgaaaagcttaaatatatttaatctgcatattcatttagtttctttcataataatcgtctaatttttaggcaaggaatatgtgtaacatatttggatctcaaaattaaagaggatatattgaattaaaataatgtagaaagagtgatggttcaagttctgattaattatatatttctattttagttattatgttgaattaattactaattatgtattatttattttatgaagtctaagtgacaatctctcatgtgctgatgtgtcaagttgtgggagagagttggccaactttcatatatataatttaaaattttccgaagacttggacgacccaactcagtttggataaaaccttgtggtctattctaaatttaattctaatttacttctgattatgtggatttatacacggttaaacatcagaggctgaataataattagtttgatagatctgatagttcctctgttttctttttcttttttgagttgattatactgtttgcttttgttgattattagtccacaataacattaattgaacaaaaacaaaaaaaagtgttcacgctttttggtcgaccgtaacatactttattgaattttgtttaaaaatcattacacaaatgatattatggatgtgggtggtccaaaaaaccaaatattgactggagaatgataactcgtagaagtaactcaaagcttctctctgcgcttcttttctctctataaa

SEQ ID NO: 35621 - DNA, 1414 bp, Arabidopsis thaliana landsberg
  unsure (1)..(1414): unsure at all n locations
gctagactaaccaattcatgcccaaaattacatctatgtcttggccttttagaacaatcatgtttgtaggaaagtcccgttcagccaatgttacgggcacatggtaagccaccactttagtaaatatttatcccccggacgaatgaattacaaacccttcccttgattcatggtatgtaatgcaatattgctccacaaactttttgcttatgaatgtatgtgaagcgctagaatcaaaaaggataacggcagggtgattggccacgagaaacgtacccatcataactggttcgcctttcggtgttgtggccacttgagtataataaatccgtcccgtctttttagtattcttgcccatagtacttcccttggcttgagatgaattnnnnnnnnnnnnnnnnnnnnttgactgggtccggctttggataaggacaatccttgataaaatgcccagatttgccacaattgaaacatccagtcgacgagctgggtaaagcagggaatcaagtgcctggggcaccggctgatttgatgcagtgggggcattgttgggacgaataaagactggctgcttaaaagggaaggagggtggacgagaaaaagaacgattctggttggaaggccggatgacgaaccgttgcttcttcaccgagccctgactagacttctcaccaccaaattccttgttctttccggaacctgcatattttgcttcaaaagataggggtgtgctgacagctcttccataagtcaagtcaatgcaagtagccatcttcctttgcaatcgatcatttaatcctctcataaagcaattcttctttttcagatcagtgttcacttgatcgattgcatattgcgacaggtgattaaacttattgagatactggttgacagtatcccctccttgctttagcttcatgaactcttcttgcttcatatgtagaacaccttcgggtatataatgctcgcggaaggccactttgaattcttcccaggttatttgatgattggccagttgaacggccacgaaatttccccaccaagtgctggcaggtccgcgtaattgctgggctgcaaataaaggcttctgggtctccgaacaacgtagaagtccgaatttttgttcaatcactcgaagccattcatcggcttccaacggatcttcagctttaacaaacaagggcggacgtgtctctgagaagtctaggtaagaagtttcgcggggccctgttgataaccctgcccaccttgctgctggagctgttggcccgccatttctctcagaaagcgagtattatcacgtgtcgcattcactaataccgcaatcgcctcggccagtgtgggaggaacaggaggtggatttggggtagactaccctcccacgcggaggtactagctccgtcctgtgctcgag

SEQ ID NO: 35622 - DNA, 689 bp, Arabidopsis thaliana landsberg
aatatactataatactttaagaagcaagaaaaattttgtttagcgtttcagagtcaaatatgtttacatttcatgtgtatggttgaatataaaactagaacctcaacgagatcacgaaaggtaaagtattgtttcctcattatatgattcaaaaccaaaaactcataagaacttcggcttcaccatcaaagctttgagaatcaagaagcttggttagcggatttgtagtcaaatatgacaagatactttgtgtatcattgagtataagaactagaaccgcaaccggattctggaagctaaagtttggggtctatggtctagggtttagtgtttagggttaagggtttaggattaagagttaagggtttagggtttacgctttagggtttaggatttagggtttagggtttaaggtttatgagtttagggtgtaggaattatgtttagggtttaaggtttaaggtataagtgttgaggagcaaatatgttttaacaagtaagaagaatcttggtatgcgttttggagtcaaatatcactagatgacacatgtatgatttagttttagaactaaaaccacaaccaaagctaggaacctaaagtagtttttccctagatccaaaaccaaatattacccggaccttggctccaccatcaaagttatgtattgtacaaagaagcttggtttgcg

SEQ ID NO: 35623 - DNA, 4198 bp, Arabidopsis thaliana landsberg
taaaatccacacatttggagtggaatcttttggatagtggaccacaattaaggctcttccaggaaaagccacatgatcactctaaggattataaatacagcatggtccactttcttctatgttctttaatgatcacttcaatcatgtatctttgcaattctcgtactagtccaagtttttgattttgatttttagacaagatggattcatttcaagaacatataaacatagaaaacatggatgagtctattaattctccttagcctatttaactcagacttagtcaacaatatcaaaaaggaaaaaattgcaaaaatgcaagctttgtgaaaaatttgcaatgtgtcaataggaacttctgttatataagagaaagattggtatcagcattgtgtcttccatcacatgggtattttcttctagcccgcagcgatcggcatgcccaagaagccaacgaaaatgctcaagaaacattggactattgtaagaggtgtggtgcttgcaaatgtgcccaagaactcaatgattatgatctgaaagaaacttataatatccacaaaaatatagtttttttttgataaaatcgaaagcatagttgtcgagtatgcctttggaaacatcgatctcttccatctccctcaggtttatttgattggagacatgaatattatgattaattatttatgagacgtttggacttacacagttttgttttgttgagagcccattttaaaaatatttttatttcttaaagatgatcttcttttacaatattgtagtagattaaattgtaaacatatatatatatatatatatatatatatatataaaaaagttgatgctacaaaaatttctttttcattggcatagggcatcatcatctcttattattacaaaggctgcccacttatccacctttggaacatgataaaactctcttgtggtagatactctgccgtgtgtccacctccctgtaatcaaaacaaaattataatacaatttttcaaatggaaatgcaatgaaaataaaaatgttaagctgaaacaattaagaagacttgctttgacagtagcaaatgtcatcttattggaataagttctcgtgtatctgcaagaaaatgattcttatgtgagtttgcgaggtttgttcgaacaagagagatctacaacaaaaagtgtgtatatataaatatattacccagcgatttgaccttttatcatccaaggcctccagtcatcaatgatggagtaatttagagattttatccaggcttgagttgcttggaaaggcattgtgatgtcatgatcaccactgttcaccataaaccgtacaaattagttctatacaaaactaaaaccaaaaaaaaaaaaaaaacatttatactttgatttggtttcagttcggtttgatgcaacgcatataactttgggtttggttttcagtttggacttggtttgatcgtagtttacaaatctataaaggtttttgtaaatttatgtttacgtaatataaaatttggttcattcgctttagtttagctcaagtacactaaaatctgtttccgtctttgttttatgtttttaacgatagttttgtaaaactttactggtttcattgtattcttggtcagatatctctggttatgaatatttttttttctctttttttttttcctttgttgtaattgtttctttgtgcacccatatcgtagtttgtataggggtatacgatcagttcttttaaaagtaaatttaattctaacctgaagataagagatcggtagccattgatgctgttattcatatggtaaggtatgctgcttctaatgtcgcttttgtatggaataccataatgacatcgtacccattcccctatagtctcctgcaatcatagatcgtcctataagaatgacattgttctcttaccaagcaacattgttcccttaccaagaaaattaaaataaattgttaccttcttgatttgaagagctttgcgtacggtttcgtcattggcccaataggcagctagcaaaaaacggtaaatctgcaaaagcaaccttgtatacatatatttttctcaaatggtttaacagagggcaagaataagttgtatgaattacttacatagcaatttggagtttcagtttcacaaaatggatctattatacgtcgttgacatatgctgtttgtacactaaataaagataatcacaaaaaggtatgaatttagggatgaatatttatttacgtacggcacaaacaacatcagctttgagtgtgtaaccttattaaattcttcaatgaatttcaagcattctgtattacgtggatgaacatttctatagtctcctttgcaggttttcttcaatgactgcggacaaaaagttttgttttgaaccgcttttcattggggtgacacgaaacaaaagcaaatgtcatacttcatacctcgaagagttcatcagagatcagtgccattttatgagcaaatggaatgcggtagttacaatcatatacacagtctgttaacgggttaccgagcacatagccctgaagatttattggacgattgcagcattgacaatttcctgcatcaccatcatgtttcttctgttacaataatggtatttgagaaaagggcttaggggattgatatcataaaacatatatataccttttgaaatttcttgaacggtagctggaacaaccagaccggaataggaatctccgccaacatagaaagggttggaggaaaactcttgatgcttgcctagccactgcaccacaacaacaacaagaaaaatagaaaaaggctcctactaagaaccgtttggcttcaagagacaattaagtttgtcattattttactttttgaagaaactcatggatccgtttggcttctcctgaatcactgggtttattaaaaagttgagttcttgaataggaaaagccagttccaacaggctgatccaagaatattatgcttgaagtctgaggaaaatgatgatcaagaatatattgattattgggttttgctgatcggcatatatatcaagaatacacacttttttttgtattacctttgtccaagaatatgtagtagagaccaaagaagggagagttccattgtaaacgtcaagcttcatagccagaggccctgtttatatagatatatagaattgactaatcaaagacgcagaagaaggagtttatcaatgttttcgatttcaccattctcaaaaagaaggccagagatggaagagcagccaggtcctccacttagccagagaagaagagggtcttcttttgggttcctctcagactttatgaagtagtagaatagttgcacttcctcttcctcaccaacaccaatataccttcattcacaagaaacattaacctaatttttttacattatctccaaactcagattgagaacacggatttaataaaacgaagacatccaaagcaaacccggtttcgagctcaaagggaagagggccttcaaaaccaggaagagacttgataattgtggcagaactaacatgttgcttactcaagaatacaaggtgaagaagcagaagcaacgacttcagaacagaggaaaaatacttgtttgccatttcgtatttcagattctgattagcaatgtctttaaagacaacatctttatacttgaacccaaaaattgtcgcacattgtcacagttttctaatggataaaatcttgcaacctttatccttacaccctgtataacaaattaacaatgaattgtcaatgataaacggactataaaattcatgagtattatataaaattactaaataatcgtcctcgcattttgcgatcatagaaatataattatactattaatcttttgctctataattgtatctgattcaaaacgtaaaccagagtatcttcaatgatctgaatccattttttaaagcaccaaaaaaaaaaaaaaaaaaaaggtccacacaaaaatagaccaattgaccaatccactaatattattgctttggactcgtgtggttttaagagatttacttaattattttatagcacccatttcatttcaagcttaacgtgttagacattcgatttactttggtattcgttaaaacttttaaaatctgcgattttccttcaccattgtttattaaaggaaccttacttgtatctggaagaaacaactga

SEQ ID NO: 35624 - DNA, 1787 bp, Arabidopsis thaliana landsberg
tcagagagcctctggtggttttggtgcactcataatcaataacagagaccttgttcctattccgttcactgagcgtgatggtgaaattatctttattattggtgattggtatactcagaaccatacagtaagtgcagttttggtgtctagatggtgtttagtgatgactattggttctgagtgttatgttattatatctgtgaaactctgtttctttcaggcttaagcaggatacttgactctggtaaagaacttgggatgcccgttggattactcatttatggttaaggtcctttcaagtacaatagcagtgtacctgatggaattgaacatgaaaccgtttatgttgatccaggtaacatttttagagttgtattttaactttgctgtcattctgtttccatttgcatttggttgtggaattgtgtgcattggatctccagtttcagttttttttgttgctgtcattgctttgcaaatcaaagttggctttgatatttcttccctcttacttcattatgagttacatttcacagggaaaacatacaggatccgtgttcacaatgttggtatctcgacaagcttgaacttcaggattcagaaccacaaattgctcttgattgagactgagggtcgctacacctcccaaatgaacttcgccgattttgatattcatgtgggacagtcttattctttcctggtaaccatggaccaaaacgccacaagtgactactacattgtggcgagtgctagatttgttaatgaaacagtgtggcaaagagtcacaggtgttggcattctccattattccaattccaaaggacctgcttctggtcctttgccagtttcagcaactgatgttaatcacccttggtctgcaatgaaccaaccgagagccataaagtatgtctagaaaactgttcaagcaaatgaatgtttcacataaacctgtagccatgtaaatgtgatcctgattcttttcatatgcaggcaaaacacatctgcaagtggagctcgtccaaatccgcagggatcatttcactacggacagataaacattacacgcacatatattttgaggagtttgcctccaacaaaaatcaatgggaaacttcgtgctacgcttaatgggatttcatttgtcaatccaagtacccccatgaggcttgcggatgaccataaagtgaaaggagattataagttagattttccagacagaccacttgatgaaaaacatccacgtttgtccagctctatcatcaacgcaacatacaagggctttatacaagttatcttccagaacaatgacaccaagatccagagcttccatattgatggatatgcattttacgtggttgcgtaagtaaatcatgccactcttgggtacatttattacattttcgatcagtttaactggtctaacgaggattttcaaattttggtattccaggatggactttggtatatggtcagaagacagaaacggttcatataacaactgggatgcagtagcacgaagcacggtggaggtaaactctcatttgcaatcggtctctgtacaccatttgaagtgataatattggtcagcaggtttactttattgggtacttttttgttttaacgtttgcttcaggtctatccaggagcatggactgctgtacttatttctctcgataatgttggagtttggaatataccggttgagaatcttgacagatggtatcttggccaagaaacatacatgcgaattataaaccctgaggaaaacggaagtacggaaatggatc

SEQ ID NO: 35625 - DNA, 5082 bp, Arabidopsis thaliana landsberg
  unsure (1)..(5082): unsure at all n locations
cagcttacgaatgttttgactaactccacatcggtttatctcttaagttccccacctacaaatatacattttaaaaagtaaaaaaaaaataattattaacaaaccggtgaagtatcatttataaacatgcttatgaaatgtattttctaaaacataaccgctaaccagaaaagtttcctagagttctgcttcagactcttttggtcgatcaagaaatctccaagagnnnnnnnnnnnnnnnnnnnnnnnnnnnnggccagggaacaaatcaaactatattattaaacttctacatctggtcctaagttccttactatctcatgttaaaatttgaagtctaatatactcaaagctgtcaaagaagcagaacatggaagaggaactgtcatatctgagaaaccaaaattggcaatcttgcatttcatatttagaatctacgccatagtattgagatggaaacaaagagttttcgaagagggtcaaagagtttgacttatctttgacaccactcatacattagctgttcatataatctaacaactagtcaatatcaagtgtctccaaattacggagagtacttctctaccaattatctttttgtttttcataaacattttactaattgttttttctatatctcctgctcaagcaaacacctaactctcctttcctatatatacactaaaggttgaaaacaatgaatccataatctacagcaaaacataaacatataagcgaggcagagtcttcagaaaacttacctgctctaaacaacgcctcggtgtccaagctcacttcaatggcgttacagctactcctagctgtattctcttgtgttcttcttcttcctcaacctgcatttgggattacaaggcattatacgctggaagtatgtgaagattgtttcttctgtgtaaatttcttaaaaaggaatgcagttattgatagaaagtttcgttttcgcagatcaaaatgcagaacgtaacacgtctttgccacacaaagagccttgtttctgtaaacgggcagtttccaggtcctaagcttattgctagagaaggtgaccaggttctgatcaaagtcgttaatcaagtgccaaacaacatctctctccactggtaaacaatcttaaaaccacttgcactatacattaagagcaatgtttgatgactgacagctggctttaatccgtgaaaatctcaggcatgggatccggcaattacgaagtggttgggctgatggtccagcctatataacccaatgtcctattcagacaggacaaagctatgtttacaactataccattgttggtcaacgaggcactctgtggtaccatgctcacatttcatggctaagatcaacagtctatggtccacttatcatccttcccaaacgcggagttccttacccgtttgctaaacctcacaaagaagttcccatgatctttggtaaggatgatgaggaacagaaacagacagagaatctgatgagagtttagaaacataattactgatttttatggttaaatttcaggggagtggttcaacgcagacactgaggcaatcatccgccaagcaacccaaacaggaggtggtcccaatgtctctgatgcttacacgataaacgggcttcctggtccattatacaactgctccgcaaaaggtgatggttgattcctacatctagatttaattatggtttgatgatatatgtccactaatccaagtaatcaatgatgtgaaacagatacattcagactgagagtgaagccaggaaaaacataccttctcaggctaatcaatgctgcacttaatgacgagctctttttcagcatcgcaaatcacacggttacggttgttgaagctgatgcgatctatgttaagccatttgagactgaaaccatcttaattgctcctggtcagaccacaaacgtcctgctgaagactaaatctagttatccgagtgcctccttcttcatgactgctagaccatacgtcacaggtcaaggaacttttgataactctacagttgctggaatcttagaatatgaaccacctaaacagaccaaaggtgctcactcaaggacctctatcaaaaatcttcaactcttcaaaccgatactccctgctctaaacgatacaaattttgctaccaagttcagtaataagctacgcagcctgaacagcaaaaactttccagcaaacgtgcctctgaatgttgatcggaagttcttcttcacagtaggactgggaacaaacccgtgcaatcataagaataaccagacatgccaaggtcctactaacaccacaatgtttgctgcttcaatcagtaacatttcattcacaatgccaacaaaagctctccttcaatctcactattctgggcaatctcatggagtgtattccccaaaattcccatggagtcccattgtcccttttaactacacaggcactccacctaacaatactatggttagtaacgggacaaacttgatggttctaccttataacaccagtgtggagttggtgatgcaagacactagcattcttggcgcagaaagccatcctcttcatcttcatgggttcaacttctttgttgttggccaagggtttgggaatttcgacccgaacaaggatcctagaaacttcaaccttgttgacccaatagagaggaacacagtcggtgtgccatctggtggatgggctgctattcgattccttgcagataacccaggtaagagaaacactaataaaccaacgaaagctttatagtagtgtaatctaatcaaggataataaccgagtttacaaatgtttcacaggagtgtggttcatgcactgtcacttggaagtgcataccagttggggtctgaggatggcttggcttgttcttgatggagataaacctgatcagaaacttcttcctcctcctgcagacttgcccaaatgctgagaattctttccccatgattcaagtcctttttctttttgtttcttgtctcttctttcttacaagcttcgcacatttttttcgtttttttcctcggccatttatcggtttgacatgaggtcaattcctgttcaataatttgacatgaggtcaatttctttacaattatttactgttgcacagctctgttttctgcaagtgtagatctatgtaaacccaaaactaatatatatacacaatctaatttgcatgtattgattttatagttatttaatacaatctctgtagcaactagctgttgaagatatacacaaatcgtttgaatcagatggtccatgtaacaatgatacaacacccacatatgacatctacacactgtatatatgtacatatttatgatgaaaattgagtcttgtaaggaataaaaaaactcaatggttcacatatagacagacagtgcaagaaattttggctatacatccaaaacggttctgtacatttatcccaactttcttagtttaaatttatttttcaaaaatcctaggaatagcccaaagtctaataagaaccataatcacatctgctatacatgggggatcactacgaaaaacccataatctgaagtaatttttggatctaatgtcttagtaagaaattggattatccttgacaccatttattagctgttcagggtccaacaactggtcaaaacacaaaagaccataatcacagagcttctctaacacttgctttgattttcataaactaataatactatctctggctcatgtttcaaacaaaaacctaccctcgtcttctctatatattccctagggatcaaaatatgcaagagaaagtagacgcaagtttcagtgaagcacctgccaaaccagattgtacaccagttaaccacatgactctttcaaaaattcatggggatgccggtttccacagagttcaaatttttccatgctgtgcgctccttagtcttcctcagcctgcatcaggatttacaagactctaataagctcagagtatggtgaacttacaaatagccttcttatcaataagtatgaatcatgcacagccacttgtcgggtttgaaaatggcttcacttttttggatggaaacaaaagtataagactgatcagtattccacaaaacctcgtaactccaccaacatcgttacctaaaagttgatatcctaatttcagtcctagtcttggtcaatagtttttctattcctctggtttcacactactttttatatctttggcgttctcgagaacttcacatgggataatgtctgtgcaatcaaaatgtttctgttagttcatgaaatagaccaaggaaccaacacattaacagagaaactcgcatttaagatatacataccggacgatcgaggatcatatgtactcgcacaagttgagttgaacaggacgtggaaatccttcttccttgatacaggaaacgtccaatacgttcaagcaccagactttcaagtgcctacacaaatattgagcttacatataacatttctagtttattccgcaacttcggcgagtagattagagtgaatggtaacgcttcaagcactccaaaactttgcattcaatcatattcaaaatgtagtgaaggataaaaaaaagggttgcatcactctaccaaaacaacaaaaacttcaatgcaaataccataaaactttaacaagagagttccaaatatgaaatccttctcaatcttaattgtcaccaagtaacatcttcaactacacatacccaaaaatttgaaagatttcttagtttcaactacaaaaatttctcaaaccttcagctaaaaccccgaattaaccaacttcaatcatcaatctccttcagtttcctctttttcttgctcttcctctcctctgaacccatctcttcatcactctttctctttttcttactcttcctctcctctgaaacgatctcttcatcactcttcctcttcttcttcttctccttttttctctctccactcctttgctcgtcttccaacttctccttctccttctcatcaaaaacatcttcgtctttgttcttctttttctcctttatctctgcgctcttttgctcgtctactaacatctcc

SEQ ID NO: 35626 - DNA, 1396 bp, Arabidopsis thaliana landsberg
  unsure (1)..(1396): unsure at all n locations
tgttatgttccttgtgactgtcacttaaacacataagcacacatttcaaaaccatatccacatgtttaaaaaccaaaacacataaccacaagtttgagaaccaaaacacataaattttttaaccaaaatatttaaacacaaattcttacaaatttaaattttaagaacctcattagaagttctaccattggactaagtaaaacataagaactcatgggggtttctaaacttttgattttgcaaagttaagttataaatgtttgtaattaagaactcctaatggtccttaccattggcaatgcttttactgaaccaaacatttcaagactaaatggacgattacctgcccaacattatgttttgatttttgtttgagataaacaatatctttattttgatctgccatttgaatttgtttatgtgtattgtgctatagttaattaatttgtgtgaaactaccaaagtcaaccctaaaaagtcgtctcattcagaaacatgtcttgggcttctggttcgtttaccgtgtccagttcaacataaattatacagaataatattctatggaaattaacaaactaaacacataaacaaacgcaaatggcatataaaacaatattgtttatcttaaacaaaaaatcaaaacataatgnnnnnnnnnnnnnnnnnnnnttagtcttgaattgtttggtttcgattcttcttacaaaaaaaaaactttgtcaattcgttttgtttcttcactcacagaacgataagagagcttgcaagtttacatttggtacgatactatttcacattctttgtcgtcatttttggttggagtatataatttgtcacaacaaaactgttctttattgtcggtttttaaaagctatgtatcatttcatgaattgtttctttggtcaacatgggtacgtccaggaatttagccaataattgctggtgatcaaaacatgggtacgtccgtgtctaagccggtttctgatgataagaaaaatggtacgtcagtgtctaagccggttaaaaacattgttctagtggggcgttctgtcaatggaatatgcaccactgggaacaatattctcggtcaaaacaagttcggctccgaaggtgctttcatgcactgtcagatgtatagtaccacgacaccagatggtcaaatgatcaatgtaattaaaactcctggtatgtgctcaattaaaacttgagatttagcctaaccactcataatcttccattgtatctttgtttacccactgtccaaataactcaacaaaatcattaattggaaattaacataaatggatatccttaacaatattcataatatagttaattcttagagtttgcttactgaattgggcaaggtaaaatgatcaaatcttgattattattg

SEQ ID NO: 35627 - DNA, 2576 bp, Arabidopsis thaliana landsberg
aagcatacgattagtttttcgtcgtagatctcaactcctacgtggataatattacacctctttatttctgattttcattttatttttgaagacaaaagaaagtgaatgcaaaaagtacacgtcgatacatcgacggttcattacgtttagaatactattgctatataataactacatgtgcgttgatatcttggtgcatgtttggcttattttgacgatttcaatatctcgtgacacttaagacaataattgtattcatcatgacagcttgtaaaacgtatcttaagcccatatgtctaggtccaacccaatccatgatcgcagagaaggcgataaccaaaattcagtttaaactgatcttagaagtttttttttttgtcgactgaaatacatacacatatatcaaaatggttcggtaatccaaatcgatggtgtatatagaactataggtcttacatacttaaaataatgaaaatgtagtggtgaacaacatgctagctaacaagttagcaagacaattctaattacaagaataacagaaagccagaagagagcaaatatttgagtcttgcaaaccattccaaatatgttgagaaaattggctaaaatgttcaggaagttgtcaattttcttttagctttgaacagtccattgagatagttaccgatgtactttgatgcttgatcataggagaaaggcttatgcatagattcctaactctaaaaagagatccttctatgtcgttatgaaaaccgatccaacctatatttgaaaacatatcaagtctccttccatcaactatctataaaatcttcacatgtttaccaaaaaaaatgaactattttataaaacattaatttgtgacttcaaactccagtttttgtaataaagaccgttgttcaaaggtacttgtcttatgttcttgcagctgtgcagtttctcaaatgtatcattaaaaaccttatcattacgtgccttccaatgtatcaaataatccatggaaaggttaaatcttttgaagagccaggttgttccaagaaaagaatatccaaatttgcaaataccgacgacaccgaaatttccatagtgctgacgagatctgagcgcacatatctgcaatgcaaggaacactcagaagaacgttgcctactgtcttctctgccccaattcttaaacatcgcggatcacaattgaatactctatttcccaattgatatggatttagtgaccaacttaaaaacttcctatagtagttaccaaaaggatgaagagaatttacaaaaaaaggatcaggtttaatgttttagtttccagattaatcatgcagattcacaaaccacaagtatgaactcgactacattgtaatcatgcaatgcaacgccttctgatatgcagtttataaaacatttttttcttatcattaatcagcaatctttattttttgggaaagtaaaacaagattatcattgaaacttcaacattagagattctacaatccttttcataaaactggtctctatgacaaatcagagcaaatcttggaaatgggctctactcctccttcttcaacacagtctcagcaggagcatcatcactcttatcaacaacggtcttctaggcgttgtggttacatgagcatcttgctcaacattctctgtgggttcagagacagatgcggtttcaggttctgaaccagccactttgacagtaccaaccttagcatacttgctcatgaacttgtactcccagtcttgtaacgcctctagctcaaatgcaccgagacctgagatgtctccagtcaagtcttggtcctcaaatgacatctttgccagagctcggcttgcatctttccctgcaaacagagcatatggcccacctggtccataaaacatcctgcataaaaagaacagatggtcatgcaaattagcgaccagtaagagttaagtagagtttgaagaatgaaaaactacagcttggcacatatgaatatgattcatctagatatgtagtacagctgatgaactatgtacaagaaaaaaactaaaagttatgcatacatatacatcgacatgtatctgcgttgatgagtgtgtctgtgtctgtcgccactatgaacaagcaaaacggtatgatcactgaagtgattatttcatctagcacaaaacctaattaccacaacgaagttttcggtaactggaatgtaaaagaactgtctggttgacaagtcagggatctagacaactgcagcatggttacataccaacaatgttcgccaaaacttaatttacaaacgtcatggaacacaaatagcaagcaaatgtggataattaatcagtgaacgatctctttcgccacaatagcaatattagaagccaaacctttgacgagtttgtacgttatcaatcgctactaatccaagatgtaatctaaatacaggtttttctagtataagaaaaagtagagatctttccgataacttgaatacaatacaattgtatcagtgcttctaatggtattgttccaagaaaagaagtgaaaaaacaaacactaagatcaaaaagcaataaaaagagccg

SEQ ID NO: 35628 - DNA, 3794 bp, Arabidopsis thaliana landsberg
agctatcagatgtcctccccacataaaaactcactaaggtaaccaacacaaaactgattaaagaagagtaatcaagatagaatcaaaaccagatgacaggttcgccgtcaagcacgccttttgtcatccattgctcaatcatagtactgttatccgacgatgatatacggctcaatccacgtgtatcaaataggcaaaatgaagcggaacctcctctcgggatcatatattcctgaacaaagtatgttccgcctttagacggcgtaccaactgcgatatgagagtgcaaaacatcagtaatctcacctttaaaatagaaactatagcaaacacatatatacttaatttacatgattcttgagctctatctaggagaaacgcgtcgtcttcaatcactcttgtaatcttattaacaaggctactcttcccggcccctttcggaccaactagcatgatcgatgtcgtctttggaatattgtaatcactcaacttgacatcagaccatgatccaggagtatagctatgcattatcaaccataataatagtcaaaaacataattcagtttgtatgatcaccaagtagaacaaatacaacttttccctaaatgaaatgaatttaaatattaaaaaagacctcaaaatctcatttctggcttgtctaagtttccgtttgctggttctaagcaaaagatcatggctttgaagaatctcttggtaagctttttctctccttctcaaatcagtaacatgattagagaacttggtgaaattctcttcagaaacaacatccttaaaccctaaatcatcactgccacataaaaaaaaaaaaaaaccaccatcactttcttgattatgattatgatcatactcaacaaaaattagtgataaagattaaataataatatacctgaaacaacaagaacaaggagatgatgatgatgatcttgaagattcttcatctacaacatcttaaaaatcatttacttttcgttaaatcaaacatgcaaacacagttcaaagaaaaatatcaaaaaaattaccatctttgagagtatcaccacccatggctacaaggttcttatttgttcttcgttttagagatttctcagacttatgaaaaaattcagaatcttgttttgataaaagatcattaaaagaatattttttgtattctgttctatctccaaagtgactttttttttttcaatatctttggtttgtttgtaggacttgttcgctttactaaatatagattaaaataagtatcgtaattaacataataaatatagtcttaaattttcttgtagataagacagattcacaagttaaagacttttatattaaaagacgacagaaccaacattaataaccaagccaataaaataatattgctcctatgcacgtgcctatcaaccccaaaaaaagcgcaaagacaatcagactatccgagtcccagaagccagatactctaccccacatgttttgaaggcactgagcaatctgagcagagtggctgtaggcgtaggaggggacgacgagaatgataatcagaccgaacagtgctatagaaaagcattttgtgaagaagcccaagcgagccaaggtatcatgagaataaagttccatcaccagacagaaacacatggcaaatccagataatattgcagcttcatcaaagagcctgaagtcgtcaaagtaagctcccaagagggatcccagaaaggttaagatgatatgagcaacggccaagtaagcagataggaagaaatcatcagtgaagcccatggcttggagaagttccgtggaggcagagtctttcaccggtcctctcagagccaagaaggcgatgagaactgagaccacacggaaaaagagatcatccatcttcttgatcatggcgtcgtattcagccttaggaatacgcaaaagcccatgggtaattccgatgatcatgctgaaacaaaggaaagagaagaattaaaagaggaaaaaagggaacaatgcaagattgaaacatacccattgtacacaaactctactagtgaattaaccaaagtatattatgtgatattgaccaaacgtgaaaccaaaatctctaatttttcttgtaaaaccaaagtaccaaacgaattacaagaaatatttgctcttttctttttttacataaagtattttttaacaacacaatcaactagcacaaacttcatccggaatcaaagtcattagtttttcttggatcaacattgttatttagaacatcaaatgaactcacacaaaagaacaaaaaagtgagcttttaggcaaaaaaatcttttaaaaaaacaatgttgaacaagaagaacatagattcaagaaggacaaagattcaagaagaacaaagattcaagaacaacaaagaggaagaagaaagcttgcttaggaagctcctttatctctcttctctagaactctctttagattcttttttcacctacctccactacgttgtacgttgtaatgcatataaaaatgacataaataggtccacaaacttttgcccacacttttgttcttcttcaccttccaatttcgttggcccaataattgtgttatgtcaaacccaaacaacaattctccaccttttgacaaaacacaatcttcctcgacgaaatcgttatctgaaacctccttttccctttgtcccttcgtgaagccaacaacgtcaccaccggattgccattacctccggcgttttacaccggcgacgttctccatcaccggctgacacctctgttcccgccggtatcaaactttgccgaatctgagaaatctcgttgtctctcatcttcacctcccttccatgacacatcatggccgtcttctccagcgattagctccggttgtgatctcctcataatctcccattctcatcttcaccaatctcttccaagcttcctctctttcccatgatgaagagaagatgataaaaattggaatcaattttagattccgaccacagcctcctttgtaactccaggttcatcaaaggtactctctaatctctttcttgtcacacttagagactaggatcctttaatatttccagagaatctgaaaaaacttgattttttttttttttttgaatgtaattctggtgattggcacaacttctccggtgaactctacaacttctccgatgagataatacccaatcaatttcgaccttaggtaagctcttcctcaccaactgattttgcgattcaaattttaaccaagtgatctgactcgatctgctttgctaatagttgaatcaccacacccaacgatttcagctggcttcttagaggactccacctgaaactgatattcctctcagcacaataacaacaactttcaggtaatggcatgccgttaatcaccatctcttgtagcaatttttcaatctcacaacattatgagatttcctaacccaatttctttctgaaactgtgttgtcagatactccacctggaacttgcaactcctacgcagttccagcacttaacaggtaacaccaactctaatttaatgccttactcaattctgacacttgagtacttctcacaaaactgactcatcttgtttcttcctgttttgcgagactgttggagttacttgtagccgctgctccatcttagtggatgttgagaagctcgtagcaaagctggaacttctgaccaggtaccgtcttagttaagaaatcagccggattgactgttgtgtgaattttgtgaaaaaaactccgccttgagacactatatctctgatgaaataaa

SEQ ID NO: 35629 - DNA, 3963 bp, Arabidopsis thaliana landsberg
agtcttttataagggaaatggtgaaagagaagatttatctagtagagacttatatgatttgagagtggcacatagagctttccgggtaaagtacctttgatggcagagctatgagctgatgcaatacctccgcggtctgtgagcatgattctgtaacttggggtttggtttacatccatgatttcagatattgtggctcgattattactactactgaggatgttgaagctaagacaatgaagggattgatcatcacccccgctaattacattgaacatcaaaccattgccataacttggagaactgtttgagcgagaaacatgaaggcaattcactccagattgatgagcattcttcacgacatgtgaaggctttatctcgcttgtcacaggaagagaatctgcatcttcgttttcaccattttcctgaggatggtcatttgtgagttccaaagacgaggctggatcttcttctgcagcttcaccaactgagttgctgttctcttgtgctctcttagaaattttggagcctaacagtttccatttccgaccaccttgacttcctcttccagtccgtggtcgtaactgacaatcaatgtacttctcaatatggatgctagatacttgctttacaaaagcttctacacatttagttacatcccaaaaggctatgcttccatctgtggccccactgatgagcagataaacatcactatatgatgtattacctgtcaggtaaagttatcaaaactattacgacaagaagatttcaggaaaacaatttcatttagcataaaaggaaacgaattgataagaagtcaactgatagagaagtattaatatcaatggctgaaccttcatgagggggatccagaggcacaacggcgtgttgtaatgacaaaactggagattttagaggaaccaaggatgcaacatcaaacctgaaattagacgcagagtatatcaaaataaaacacaaactcaaggtgaaaatgcaactcatcaaacaagtaaaacacttctggttaccataatctatgtggcaagactagagcacgtaaggtaagggtggcatcagaacaagccaccgcgataaaacagatagttagcctgaaaagatgaagagaaaagatttctcaacattgtctaccattgatgggttcaatcaaagtaagtgaaagctgtccctctaacctagaaccaacacatttgacaagaaatgcagtggcagccatgtatctccagtcatcttcatagttttctcgctcattatacgtattagatcctaactttgtgacgtttgcagaagtatcttcttcaactccttccagttttggagatttctcgatctttccacaaggacgagatttggtgggcatgtcagtagcaagccattggaacgtcactggagacacttccgatgacgctctatcgtgtccattatcactaatacaagattctccctttttcttgtgtctaccattccttaggagccaagaggttacaacacgcttggctccaacagaaatcagtaagcgaggactttcgcaatcatccactgcagagtcttgatcgcacacgtctggtaagttaggtacgtccgaagacatcatgtgcatatttgatacgcagcaaactgatctcacagctgagcctccaacatgttctcctaaaagctctgatgttgaccaatttccaaactcagatgcatacctagatgaaccccaaatacttttaagacatttaaataaaatgatttctaaaccgccagcaaatatcactgaattaagtttaataagactagtacctacctagtcaatctcacagatccatcttcacaccctgttgcaatccaactagaccgatcagatattttactttcttcagaatcgaatcccgcttttgtatctgtagagatgaagcataaggaatgcaattctctgccatgaaactgtgtatgcaaatttagaggaaagactttggtcttctgtcctccaacccagtgtctatgaatatgaatgacatcatcctaaaaaaagaggcaggttgacaatcagtcaaagaccaaacattcctaaacaactttaacggagagacaaaggatgcaccttcacatatgcaaaacagttttgccactcagggatttccccgagataaaaggaatggggtcggcgccagccaccacatgagatttgtgtaacctattgacagaatatcgttagagctcgcattaagaaggtgaaaaaaaaggagacggcgagggtggacctttgtttcagctgttaaattccacagtatgaaatctgttgacgcaaatccggctgcatagtcattgtttggatggtctttggaaaattgcaccccttgacaaacagattgaactaagttcaattctttcagttgtttcaaacccatgaactctaaagtctgcatctctctgtcatattcgaaatagcatatgcaaccatctgctccagtctaaacatgagattgcgaaaaaaagaaagatcaacacaataaagtcattgtcagcgtgacaagaaaatactactgaggattgcatgatttattctccaaaacaaacaaactaccaacagcaaaagattaaaaaaaaaaaacgtaagttaaattagtcataccgagcatatttcagctttgttcgaagttaatctagcaactgaaagactggaaacagttgaaatcccatgggcacctttgaaatattttagtgatggtatcttcaattctgaagaaacagaaactccgtgcagcatgtcctttgtcagaggaaagagtgtgatattgccacgtaaatctccacacagaatcacctacaagcaacaatctttcaatgcaaattactaacataacaaggcttagacacaaactcttggctgcaaactttttagacttgatatcttaagaaaatttatttcctagttttcgcccacccaagaaagattggtgttcttttgctccacgtttagttgaccatggtgataaattaatatgcatcaactagagagtataaagaaagcgatagaatacagaaacatgacaataattgaaacggatattacctcatcttctactgatgcgtcaacacacattattcgctttccaaaaccagaggagaattcagccaagagggagacatcataagtttcagcagcagattctaaagaaccggatagtttccatagcttcaagagtcctctaggattgcaagaaaaaacaaacctggaagccagagactgaaaactgtaatctcaaaaatattccaaccaaatgattccacacattggatgcattgcctgagaaaattattcagataaatcattattcaggtccaacatctatttacctatagcctaatgatttgcaccagaatgcccctagaagttgtctctctgggctagccttccaactttgattcaagccagcatgtggatacatatcaccaataacccgaacaattgtcatatttcctttgccatctccaagagcaacccaatcgtctaatgcacaagactcgcgtacctttccaccagacatgacatccatggtaataataggcccttcttcaggtatgcgaactaattcagtccaccttacatttccagatgacaataaccttgcgtggtacaagcaaccatggtttgtggccacataaatggtatcttcctgtgtgaactgcaagcaacgtacatactcactcttgctgcaaggggaaacaatcatatttacaattatacacaagaaacctcatacacttatttattcaatatttacagtaaaagtgaatccagattaacagatttatttctttagcctcctcgaattttctaacattacttggcctttactgccatccatgttcaatatcatcaaattgtgtattcatttggcatacagtaaccaaaaacgattttgtagacactaacatgttgtgaagggacatgta

SEQ ID NO: 35630 - DNA, 1579 bp, Arabidopsis thaliana landsberg
agaagcaaagacggcagcattccaatatgatggcaaattagtaaatttctatcgctctggaagtgcatgtcccttaaaacggttatgggaaagtatgtaattaacaaattataacacccaaaaaaaatcatattaaaaaaaaaactaattaaagtttcttttacattcatatctcctttccaatccatttaaacaaaaaacgtaaaaattttaactaaaggcaaaaaagaagaaattaagaaagagagaatattgtatcaccttgtgttgtttttgcgtttgcgtttgcgtttttgtgcgtaaacgttttacatgaaagcgtcagggaccttgaaagtgtcaggatcttcatcttgaatccagccaaacttctccaaataaggattcagaatcgattttggtggataatcatcaatgcaatgattccacacatttccttttgattcaccaccagtaagatctctcacaacttcccaaacgcagctattacacttaaaaccagctccaaagcttatcataaaaactctatctcctctcttcaatctcttcttggcctccatgtaagccaacacataccacaaactactcgccgaagtattgccaaaccggtgaagagtcatcctcgcaggttcaatatcatactcgtttaaatccaagctatgtccaatcccatcaatcacagcttttcctccggtatgtatgcaaaaatgttcgatcccggccttgaagctgattcctgcctttaatggagtccccggtgggagattcgtggagcccttgctagggttttgacgaatcttgattttcttgataagaagctttaacatgaaccttattagctcggctacgggaagaatcttgggtgttataaccttgaggttgtctacaaaagcacgagttgcggcttttggtttattcttccccaagtaaaacccgacacggccttggtcatgggcggcttggatgcaacaattataagactcctctctagctccatggtgagtccgtaccatacacttgagtttaaacattgctttctgtctcaagctacgtttgttagtcaagagaatagcacatccaccggaccggaacaaacagttggctaagatcattgaacggttgtttccgctataccaattagggctcaaagactcggaggtggcaacaagagctaacttgtttgcgtagctcttaaaaatgttcttgacaatgtctacggagattagacttgcgctgcatcccatcccggtcaagttgaagactttgacgtcgtctctcatcttgtaatggttaatgattcttgaagctaaagatggcgttgaagagagcatggagacgttgactacgaggatgtctatgtctttaggagatatttgatttctctccaggagttttccgatgctgtccacgtagaactcttccatctcggagatcccatcttgtaacgaaggacgctcttctcgaccttcaaagacaagtcttggagcgtaggtttgttctccaatccctgagcttactatggctttgagaaggaacttgtattcggttaaaccaaggttttggtttcgataaatgatct

SEQ ID NO: 35631 - DNA, 1666 bp, Arabidopsis thaliana landsberg
gattttgaaagaatctcctttgaaatcagcctttgagcaaatcaaacgattatatattattattttttttgtattttattggtagaacattttccaaaaattttaccatttctcaccattaaaacaataaaaaatacaacatttttttgtatgtttaatatttgtaatataatttaacttgaatactgattttaattatttcatatttcagatgtttttagtaattgaggtaatgaaaggtaataagcaccagaaatttcagataaacttttgaccaccagccatattaaacattttaattatggtttgaatctttcctcacttttttgcgtatgtacgtctaaactagattttaacccgcggtataccgcgggaacaatttattttttaaagttagtatatatatgaaagtttacaaattgtatctatctataaaataattttattttatagtttacaaatgttattaagtaacgtcctgccaaacccgtcctgtaaaaaaaaacccatttattttattaatgttgatcttatttatgatatgtttatgaatcattgtctaaatattttgtaattttgtagtaattaaatgctatcagattatatctctgcgctttgatgattataatcgaattgttatagttatggagaaaagcaatatcaaaaatgataattttgtagtaattaaatgatattaaatattttggaagtattcttttagtaaataatcgtgtagttaatatggagagattttgggaagattgttaaatatcaaatatttaattcgaaaattttttttttaattatcaaaaacatacattaaaattcagtggcagccattgtaaataagtctcaactataggatttatttcacaaaatggctgcaaaaatgtatatatagatgtagtaagtaaccatgttgatgagtggaaatacaaaactatcctccaaagcttgagatgcataattgaggcaaggtaagtgtgggtatgacgtagcataactagaatcaacctgggttaaaatattttatcactatttgcttttgtaatctgagttagactataccatatgaaagtgtaaataatatagaattcacaaaatatatgtacgatttttaaaaattaacatttgaatatatccaaataattttgtttttacattaatttatgaacaatacttggatttaggggcaaacccttttatcatcctcttttattagatgtcatctaataaaaaaaaaaattataaaatctaaactttaaccattattttataaatccaaatcatacataatctagtttaattacaaaatctaaatcttaattctcttttgtaaacctaaaccgacatttaaacgagtttaattgtaaaatctaatctctaaccatactttcaaaacccaaactgatatttaacttcgttttattgtaaaatctaaatctgtttataaaccccaaccgacatttaacctcattttttttgtaaaatctaaacttgattataaacttaaaccaatatttcactatatttaatcataaaatttaaaccctaatcatatttcataaatcaacttatatataattttgttttgatggcatattagattttctaattaaatgattttttatttggtagcaaattctgattagctgaaattaaagag

SEQ ID NO: 35632 - DNA, 1597 bp, Arabidopsis thaliana landsberg
aatccgacaacgcttcagattcatgactcttccttagtttagctttgaatggaaaaatatcctttctgttattccttagataactcattcaaaggagcaggagaggctggataaggagaagaatcctgagcatccttctctctctgccagttaaacaaatccctattttcattacttccaacaggaaccatagagggagacggaagagatagaatcttgggtctagtttctgaaactaaatctcctgtctttaaacctgcatctctgataattttttcaaaatttgatttatttctttgctgagaaaacggacaatcacctttctcatgagtcagacgttggcaaagaaaacacctcttcctgattctttcataatcaaaagtaactgagacaacctcaccagttggaatcagaacctctttacaatttcgtaaaggatttcgaacatcaaacagtacctgaactctgacataatcctgagcttgagacttttctaagtctaattccacttttaaaaccttaccaacacaagacgcaatctccttaatcgtatcagatgtgtaatagttgacaggaatattccgcaatcgaatccaaacaggaagaaacatcagataatcctcttttggtttctccacccatcgatccattatcacacaccattcatcttgagtccaaactccagtttttaaaatttcaagtaaatcatcttccgatttaaaaagaaactgaaatctttcttgtgaaagagctctaattattattattacacctcgaacccttgagtaaagtctccaaattctcataaaattattattattttctctaaaattaaatactcataccaaatttctcaataaatagaactcaaccttggcgtgtgttctccacacttcactgatattctccactttcattttcagtctttctcatttaacaaaacaaagcaaaaccaaactatttaagtttaaccatggaatctcacaacaccttgaacctagacatggagaaagatcaagaaaaggcttttgactactccaaacgagctcaatggctaagagccgctgtgcttggtgccaacgacggtcttgtctcgacggcttcacttatgatgggtgttggtgcggtcaagcaaaacgtcaagatcatgatcttaactggttttgccggtttagtggccggagcttgtagcatggcgattggagagtttgtctctgtttactctcaatatgacatagaggtagctcagatgaagagagagaccggaggagagattgagaaagagaagcttccaagtccaacacaagcggctgcagcatctgcgttagcgttttctcttggggcgatggtgccgttattggcggctgcgtttgtgaaagagtataaagtggcagcggttacgttggcgttggtgatgtttggatggttaggggcggttttggggaaagcaccagtggttaagtcgtcgcttagggttttggttggaggatggttagctatggccattacgtatggttttacaaaactcattgggtcacatagtcatatgtatgtgtgagttttactgaccaaactcactcctcttcatgtttcgatg

SEQ ID NO: 35633 - DNA, 815 bp, Arabidopsis thaliana landsberg
tattaacttatacttaagaacttactcaaaattttacctttttattctataggtatacctatacaaaaatatgtgcgaatcctttcagaagcatgaacgaaaaaaaatctttagtatctaaacaaaatcgaaccatgccgttcggaagtgattaagaaagaaaacttttattaattcattttttctttaatttcattcgaagtaaaacatccgaaacttttttgaacaggggtggtattacacaacccccttttttcacaaattgtgagttacagatatctagtttttatattagaaggattaccatatataacacaaattttctccgccgattctttttagtcgagcttctcggactgtcattataccttgagaagtcgaaaggattccatttcatattccacctacaattcgtggaattcgttgagagttaaaatgtattagtagaaccggtcgcctttattctctttaaatttaacatcgagttggaggattctttcaacggtagtagatgtcttagggtgaagatcaataaatattggttgttttaaagatgtatccttacgttttcaataaaaccctctcgtaaaaggtttttagcaatactgtcggttatgttagtcgatccaatccccccgggtccccttctattcgtgtcagcatgtaatatagaggttattatatcagcaatggtgtctttccccatgataagttaaaattccttattgttctataattttgatataatcaacatgttctttttcttttatttatatatagatatagacgaattatatattaatatatgaattaaa

SEQ ID NO: 35634 - DNA, 4404 bp, Arabidopsis thaliana landsberg
  unsure (1)..(4404): unsure at all n locations
caaggttgtcagataacaataaaaaaggactatagcccgtctatgacaacaagctttgatgtaccttgatatatcattgtcactaagctgactccctcttcttgaaacaaactcagtaaccgcttgaatggctccctcagcagattgcctgattttgtcacagatagctgcagtgcaactatgcaaggctgctacaagctacatgacatagcacaacatgatgggaccacaaccatccaaaggaaccaaaatttacacaaaagaaggagtaaaacaaacctcatgctccgttaagagagaacaaatggaagagactattctgttaaaaacttcagatggatcaatagaggcatcctgaaagccaattcaaataaatctgacaccctgaacatgaagcaaacaaaagaaatggacataactctgagcctaaccacaaagtgcttacacttttcaatatggcaatgacatcctcaagggaagacagggctttataggagtcttcagaatccaacccgcttgtaagtacagcttttggaagggaaagggaaatgctgaagaactggtcaagaatctaacaaaaataatagtaggagaaaccattagaaactatcaatgtttcactcagtttaaatgctgacccatcgtcttgtgacacagttgatcaggataagtactaatcaaatacctgtgccgaaattttccgtacttcagaatttgtgtcagcacagcgtgggagataggttatgaccctatctcccaaacataatacctcgcgatcaggaaataaaaataccgctgttggtcaaacaaaggaaattaattaattagctggtagataatatacgttataaagatcaaacaaattgttgaaggatatcttcctacatggtagatttgaaaaattcccctgcatactgcggtcagcatactttctatgtgggcaatccccagaacaaccaagagcacaatagccaccaacacaaagcttacgaaactttagaagcatctcatgaactgccacacaacctctttttctttgataatcaatgggtgacgaaacatattgatcaagctgtttaagcagatgcaaaagctgctccgctcgacttcttccatcctctccactagttcatgcacatatatcattgaataagcggcataaaaatacttatacaaatttgtacatacacttgtagtaggactcaatatttgagactccaaatccactaccataatcactgaatctaatctaacattaagtaacatgtaagttatgcaagataatgaaacagatcaaataagcttataagagacgaaactagaaattaagtctctaataaagtactttaaataaataagtaaaaactgaaagaataaacctagaacatggataatttatttaagaaattccactgaagacttcagttttacagaaagtatttcaccaatgggaataataaacagatcaagaaacttttcctaagattcagagaatctgcagtcacataacagcttggcgaatttaaaacttgtcaagtaaataaataccttgtaagaaggatggcacacaagagagtcacaagattgtctataaggggactaatgacatctgatggatcattaggcaaagcaaagaatcccagtgtagcctgtccacgaaaacaagtaaatgcaagagaaaatgtataaacaaaacaaacagcactaatctcattcttttctttttatactcggttcaaacgagaaaataatcaccttcatgacacgatttcgagtttcaatggtcagctttggttccacagagacaagtgttgtgcatgcattcagagcgagtgcctgtacaaatttattagaaagagaaatggtatctgcctcttcgaaagaaatgtcacatggtacagattcttgacataaagtgtactacctgagtgtgtagaacttcgagactagattctgcaaaaccttcattttcatctcggcccatcaaagtcaatatataatcaagcatctgatctcttcttttcaatgggaatgtagcaccagtttctgcagcatttatgacagcacgaccttcacacaaagatacaaaagatcagggtcctatatcctctttccctaaaattatatccataccatgtaggcagtgtaacttgatagaaaaaaatcaaagagaggaaagaaaccgatcagtcattgaatgaatgattccatcatctacatttcaacgccatactaacctaataaatcaatagcagttataacagcttgttttgctgtttgttgccgcacatgaagaagccgtgaaagcatattggtgccctgtaatacatgcaaacgaaatatgattatgaaaatggaatttgaaaataaacgtggtgcggagataacaaaaacaaggtctcaacagttcaaacataaatcactgtctggtcacaaaaaaactactcgaatttccgactcttcatgataatttaatttcataagatgagttttcttagcaagacttaaagtcaatctgacgcataagtttataacagattatagaaaaagaagcaggatggaagattataatctaattagaaatgcgattcatttgaaggtttagaatcatacgacaagtgcatctattctggcttcaataactgatgagggtgcatattttgcagcatatccatacatcaaagccaaagcagcgtgtatatcatcactgtcttctgttttatagctctcagagaagagagataagatcctacaataaaaacaagaacattaagtcagtaatatgtcataaattttgtaaacctgttgtaaaagtgaccaattctagaatgcctggaagcaactagatgactaagaagaagctattttctaatattaggaaaccttttgatataacattttctgcatgtgccactgtagctttaaatgtccaacttaatacacacataagaagagttgggataagctagaatttaagaaccttttagatacagccttccactactgaaatataaattatgatctaaaagagagaaataaactaataggttcgacaatgagtgacagatatgcaggcatagctagatttttaacattagaaagtatatgtggtgatgatttcaataagtcaagcaagataaacctttggaaaatactctgcccaacattatccacgatgattttcagcttttccagtacagtgtccaagtgagaagccgcgacctacgcaataagttagcatattaacataggctgaaaatcaacatctaagagagaaaaaaggcaagtacactcaaaataccagccccatggccttcgccaaacccagtctatttgcaggtatagaaatgtcagcctgttcgtacatccagtcaatcttgtcacgaacatatgctctatcattaactttctggagaagtattccgatacacctgaaatcaaagcacnnnnnnnnnnnnnnnnnnnnnnnnnnnnnnttaattaaataaatacagttttcagagagtttaaaacttatcagccatctctcagaatctgaaaaataacaataaaaaccacaagtaaaacaagcttgttcagccacatagtgaagtacacaaaacaattttatgtatactatcaatgcaggtatcggaatgtctctctttttataaactttgataatatgataaaagaatcagaaaatcaccagatacaaaaatccagaaagttatgtcaatcaaggaatacattttaaaattctgacaatatgcgacccacttgctgatttgatgttagaaggaatcaacaatccaaaccaactatattttctcaacaactaacgcaaaatagtcaccaacaaaacgtagaggtatgtcaacttcatcagagaccagaaaaaaaatgaaaaaccaagaattttaccggtgtagaagtgctgcatggtcatcatccggagcgtaaagaatatattgttttgcaaaagaatttccaagagatataacccagtcagcatcctgggtgacatccaatgattctgctagaaactgtacaaaagaacaatgattagaagtaatatatagatcaaactttgataatatggtaaagaaacttcagctcagaaagatgttttctttttctttcacagaagttgaataagctcacattgattatcatgtcatcccaagtttcctggtaagttggatccagcttcagatcttctgtgtcatagacatacgccttcatttttggaatctagagcttaccaaatgtgaaaactaattagggtcacgtgtattagtagctaaaaaaggcaatcttcaagtagcgcttaatagtggtcataagattatctagaacaaacaacagtgtacctcatcttgccaaaacatgctgatgttctttgggaaaagaggggatagatag

SEQ ID NO: 35635 - DNA, 1259 bp, Arabidopsis thaliana landsberg
gcgatactgaacttataatttgggatgaagctcctatgacacataagtatacttttgaatctctcgacagatctttgagagatataatgtttagtagtgacccaaattctaatatgaagccttttggtggcaaaactgttttgttgggaggtgatttttgtcaaacactacctattacaagtcaaggaagcaggcaagattgtgtttcagcatcaatcaaccgttcttatctttggaattactgtcaagtttttacgctttcagaaaatatgtgtttaggaaaaacagaaaaagattttgcaaagtggattttggatgttggaaacggtattgctaaaaggaaaatcgttcttaaatgaattttcagaagttgatcaaatcattgtggatgagaatttgttgctaaacgttaaacataatagtatctcagccattgcagaacatgtctacacatcatttgaaaaaaactatgctaatccaaattatctaagggatagagctattattactccaagaaatgaaattgtggatgaaattaacaaagtaatgttagattggtgatatgtcccggcttttactgatttctaccataattttagaatgtttttagagtcgatctagtcctttttgtatgttttgagtcgtttcaggtgcaattatgataataggtttttaagatcaattaatcctaaaacactatcctgtcgttgtagtattttaggtgtcaatccaaatgggtgtgatgcaaacagatgagatatgatcagaagttgctaagtagagccaagcagtatttggttggttttctaaagtcctagtgtttgatgcagaaaacattaaaaagtcacagaaatgactgatatactcgatcgtagggtcgactgccagaagggaccctatgatcgagtacaacgggatgacacagagtgaaaattcagaaatggagcagtttactctatcacacagtctcactgttagtagcagggtgtgatcgagtagaatggttgaaaactggaaaatactaaaatttaatagcaagtgaatgacgtaggtaaataaacagagaaatcaattggatgagaaattcctaatgatggggtaatcgaatagtgtggactccctaatcaattcagttggttatcaaatctcaataaagctttccctagacaatgggttcaacaacagattaatttacttcctcgatagaaatcctcaagcaagctagcccacactaatttcattatggaatctaacatgca

SEQ ID NO: 35636 - DNA, 1773 bp, Arabidopsis thaliana landsberg
gtatgacagtatctgcattatgttcgtagctaccaatcttgtgacaaatgttacgaccaactctgcatctctcatggctggtatatcagaaactaccaaatcgtacatatttctcactaaaggatattcatagtatctcatatatggttagattatgaattattatgattttcaatattcaaagcttactctttctaaaaatcgaaatccactaatcaaaatgtttttcattccatgtttatcagatggatcagttagttaaggttcctggtttacccatagatcatgcaaagcaaacggggaatttataattttataacaaaattgtttttttctttagcctacagtactatttgtcatatggataatgtagataaatagactattagaaaaatgtataacaaagacttattataccactaatctcacaaagaaagattaaacaaaaggatcttttaatccaagaatcataatttctgccggaatagatggaccacaagaactagacataaagccgaaagagactagtttaatcaagtacaacaagtccttcgtgttctctattctttgagtcaattcttgttaagtttcatataatttgagctaagaaatcgatcacaaatccgttgtagtctagctggtcaggatactcggctctcacccgagagacccgggttcgagtcccggcaacggagtctttttttgctttctgtttttttatttccggaaactgtaaaatagaatgaacttagaagtcgtgagatactgttactatctgctcattgctcaataaaatgttgaatgatgaaacgaaaatagctagaggtaaacaacaacaaaatatcacacatgtcaatgtcatacggctcaagcatttaaactaaataagactagaaaaacttgacctcccttgggccacactactaagtgaagtcactattcacaaaacgtataacaagaaaacctaataaatgcaaagctattaatattttgccaaacattgtattcaatgccgtagctacatttccccacccacctccccaaaacaccaaaaaaataaatacaccaataataatctctccatcactcttttttgccatcgacgccaatcccacatggccctaacctctttcttcaccatcaaatgtcaaccgccaccctcgtcgtcttccctcctccacctcctgtccctatccctacctatataactagcctcggccttggctactccatagccatagctctaggtttcctcgttcttatctccacaatcattctctcttcttacatctgttgccgcgcctcacgcctccgcttctctgcctccgccgcaaacgcaaacgcaaacgcatcgtttagagaccgtggcgttatcgtcccaagaatcatattcgtagctgaagacgacgatcttgagtctggaaacgtcgtcgttggaggtcttgatcattcagtcatcaactcttaccctaaattccatttcactaaagatatcaccgccgtagtaaacggtgatgggtttcacgacggagaaggaagagagacgacgtgttcgatctgtttatgtgagtacatggaagaagagatgttaaggatgatgcctgagtgtaaacactacttccatgtttattgtcttgacgcttggcttaagctcaatggttcttgtcccgtatgtcggaattctccacttccgacgccgcaatctacgccgcagtcaactcctttgtcggaagttgtgccgttgtctcaatacgccgccgatcggaggagatc

SEQ ID NO: 35637 - DNA, 1557 bp, Arabidopsis thaliana landsberg
ttaatttaatgtgttgtacaaacaaacaaaaaagcagttgggaaaaagaagatcacataactaaaacaaagaggttgtagtattaaatatgttttcgtccactaactaatccgattaagaccattttatccactaactggtcttaatcttttatgaccattttaggattaatcttttgctaattttctctcactatacttaggatatttcattgcttgttaccattgacagcaaaattccagctggagaattaaataacacgcggaaataatctgaggtttgtttccatctctaccccacttttatttgactaaaatattaggatttatgaatgacgaagaaaaaaacaaattattaggtgaaaggaggcaataagaatttgaagataatcattaaatatatattttacctaaattaactcacacgacataccgtgtttagtgcggctaaaacagtgttaagatccggtgaagatgctaatacgcgattcaaagagcgcgtgaccacaaacccaagatcgaacggctcagatctcgcgggaatcatctgaagcgtgtactccacgcccatgaagaacagaagtccggcagcgaacatgcacggtatccaatggtatctcaccacgtagacgatatcacgcgccgtccacgtggtgaacgacgctttgcttctgcatcctcctcctccgacaccattggcgtagccgttgtcagttttcttagcagatatatccatgtgagtgtttgtatctccgacgcgacggttgttgttgtctagggttccgtcaatggcgacgccgttagtgtggtttccgttaagagagttagatctgcgacggagagagacgtcggtttcagctgcggcggctgacatggccgttaaggttaacggagagggacatgttcggagtatagagagatgagttatataagagatacaaggcggagatttccaaggaaaattgtttgtgttagaaaattcatatgaaaaaaatgagttttgagagcgacattaaatttattgttatagttaagtcttgttttcttttctctctttggtgggctttacctttgtgtactgacatgttgttctttttatatgttaagtgtgatattcttcgacaacaagagagacagaagtatgagaatgagattctcaaaactatagtaatgcattattcgtgttatgtattaatgattcgtgtattacagatacttacgaaggtcttgtatgatgtgtcgagtaaaaaaaaaaactatctcgtcatccaaagcagcagaagcattggtgtagtgttaaacaatatagaaacaaaaacaggaagaaacaaaatgatcaatcgatacattaccaagaaatatgaatgaaacaaaatttcttctttgtagaatattgtcatattgacattgttcactcgatcacggatttgatatctgacgtagaagaaacgctatacctgttttcttgattatcttggtttgaatttccttgcatgcccacatatattttgagaaattaaatatatttagaacccttttattttttatttgtaaattt

SEQ ID NO: 35638 - DNA, 1894 bp, Arabidopsis thaliana landsberg
  unsure (1)..(1894): unsure at all n locations
cgcgttttgtggttttcgtgagaagtgttttctcagtctctgatttaaaattgcgattagtgagttgtttttcaggtttaccacacgagtttcggcgcgacaagcggttccgttagaagagtttatgttcttgacatttgatattttgtatgacaaattagtacttattacattttgacaaagaaaaatacactctattgaaacagtctaattgcatattaacaactaaaacagtcttgttgccaattttggaattttgaacaatttttgaaagtaatgaaaagtcattcacgtgtctcccatctcaaacttaacacgttatattagcaaaagtaaactgatcttaatcaatatcgacgttgtaccttaatttcatggaccaagttattgtctaaaacttaaaatagcggccatttcgacggaaaaaagtagcaataaactttggttttctcgttaataattaaagttatatcataaacatatttggaattgatcataatcttaattaagccgagagagtgtaataggttttgttttgttttttgataagagtgtaatagggtttctgataggtatcacattacacatgtaccttactggtctcatatcccgtggtcaagccggcaaaacaagagaaaggaaagttccgcttttacatgtgattactacgtacgtaccattacctatattacaaagaaattacttgtcttctacgttgatggagaatagtggatcattgaccccctaaatacaaatttaaaactaatttctatttgattaagaatagtgaataagacttgtatatttgattcttcaattacaataagtattttagcacacaattaaatatgaactacttaaacacataattaaatcaaaaacatttgaattagaccacttgatattatgatgatgatgatgattatgaaggtatgtgtgatatggtgggtacatactacatatatgtctcggccaaactcttttgttgttgttgttgttgttgttgttgtaacatgttgcattatcttggaggaatttagaatgaatattgggatctccatgagatgttacctatttaaaactcaagtgtcaagtcagtagatttgaggttgaagctatagttgaccatttttcttcttacaaaggttgagatgacaaaaaaaaaaaaagaagttgaagctaccataagttaaaaagataattttttaaaaatgaaaataaatacagacaattaacaatttaattacatcagaacaaaaataaaatgtagggccttggccttttagaataatgggcctttaacattggtaactagaataactagattttgtctcatgaacaatttagaaaaaaccgaggtgatattattgttatccacacactctctgtttttttgatactacccgccatcggaaaaccaccatgtcagcctccgtcgccgtcgtgtcgggttttctccgtatcccgtcaattcaaaagtctcaaaacccttcctttctcttttctcgacccaagaaatctttggtgagacccatttcagcttcaagctcagagttgccggaaaatgttcggaatttctggaaatggctcagagaccaaggagtcgtatccgggaagtctgtggcagaacctgcggtggtaccggaaggtttgggacttgtagccaggcgtgatattggaagaaacgaggtcgtattggagattcccaagcgattgtggataaacccagagacagtgactgcttccaagattggacctttatgcggcggattaaagccgtgggtttcagtagctcttgttttgatcagagagaagtatgaagaagagtcttcatggagagtttatctngatatgcttnctcaatctactggatctactgtcttctggtgggttt

SEQ ID NO: 35639 - DNA, 2768 bp, Arabidopsis thaliana landsberg
ttcgattctagcccataagtccctatcactcggcgggtgtgcaatggttatagttctttattcagttgagctagttcaagcattcatacaagaatttgccaaagaatgaaatacctatggtcaagtactaggtggcgttccggacatacaagcattaagattaaactcaaatagaaagaatagtgtaatcgatcaaacaaaaccatagagacggccaacctagactttcgatctattagtccccatgaattcccctttgaaaccccctcaaacccaactagagatctactcgctcatggcaaaggagtgataaggttcaaattaccctagaactactctctcaaataaaagatcaattgcagtattttagaatcgaattcacaaagttcttttgttcaaacaatgagttgaatgtcgagattaagctagcaaatgatgattgaaatagtaagaaaacaaagtaagaaaacagcaggttgattgtgttgtaaacgattaggacaagagctaggaacagggtattctcaagaaactattggttagtagatctaatgaaagctaaggttgttatcgaaccattcttaactcaaactctaattatggaatacccggtggcgttccgcgaaactccctatatctatagctaagaataaccggagaagccgagaaattattaacctaaatatgcattcttaacgagttcgattgttcaccttagtagataggccgattcttattacacacctaaaaaccaggcttataaaataatagatccaactacagatacctatggtgaacatatctattgtcgggattcaagacctagttaattactctagatctagcattaagcataattaaagatgaagaattctacagataacctagcagaggggagcaatctactaaactatatgaatccctaatgagaaaccctattcctaacaagcagattactcagacatattgattgaagcaaacaacatttttgagtatgaaaacataaacacagcaaatagattaagggaaagaagggatcacttcactgtattaagatcgaaatcaatctgtgaaaacactcgatgaatagcttatgtttcacggtaacagggtttgcaaaagcttgataagaaatttatatctaaactagggtctaaatcatgtatataaaccctgtaaaacgtctagggactaataatgtaaatagggaaggcttcttgcgcaaatttcctcttctataaacttgaaagcgtctcgatcgacactccttttgattcctgagtccgaaatcgtccttagcttccttttgctccaaaatgtctccccatctctattgttgtcccattgcatagaatacctgaaaatacactaaaaagactcgagaaataacataaagacttaaaatcctatacataaaacatagataaaatcagtgaaaatagggatatatcagtaccttattcagaagagtcgattggagatatcagatggctctagactcattgaacaatggtaacttcaacaccacgtatcttgcagatgctataactttgatagagaatcttgcatgtagcaacaatacgtagaatccaaacttcaagaggaagaagatagaaggagctatttcgagaaaccaaattgttgaggtaaatgctaagcttgattcagagcatagcctacttacagggaagaagcaagttcacttctttgcagaagcagagactatcgagcctaaggcatattaagaggaaggcgtgttctacattgatggtcagagataaaagaagttggttcgccatgggggaaaattatagtggtattcgatttatggtaaccaaaatcttcacctttcactccaaagcctacttttcataagacttatccgtagagtagtttcacaaggacctatgatgatgcaagtctaaagagctacgcaacaagctttctacatccactcaaggacatacaaaagcattcatggctacctagtttcgcttcaaggagtaccaaagagaattcccgcatcatggtttcaacaaggtgcaactcctaggtaccttctgaagagtaggcgattggagatatcagatggttctagactcatcgagcaatggtaacttcaacaccacgtatcatgcagatgctaccactttgacagagaatcttgcatgtaacaatagtacgtagaatgcagacttcaagatgaagaagatagcaggagttgttccaagaaaccagatggttgaggtaaatgctaagcttgatccagaacatagcctacttatagggaagaagcaagttcactttgttgtagaagcagagactatcgcatcactgtttcaacaaggtgcaactcctaggtacctgatatgatttcacaaacttcctatcttaaactcacatataataatatgagactatgtcgatcgacacccttatttcggctgagggaatttctgttttctgccaagtctttgagaagccccgaagtgttccttatttgcaaagtagtccatgcacgtttttagtcactaatatatctaattatttggtcattgtgagacctaagttttgtttggatattaagatacacttttggagagaagaacccaatccctgcagagaggatcatgaactccttttactctatttctaattcatcaattcaaactattcagattatgatttgtgtttctgttatcatgtctgagtaatcatcttgttgggtttagggagtctcaatgaaactagaaaataacatgggttta

SEQ ID NO: 35640 - DNA, 1405 bp, Arabidopsis thaliana landsberg
aactgctgggaatctccgatgatccgtctagagggacgagatcttcacttcgcgcggagagtttttgctgggcaacatcccggcacactgctgtttgtgttgtggaaagagagacttgcttcttcttgggttgtggtctgccttttggtttaaaccttgcaccagccctaactattaaatccaaattcataagtttcagccacatcaaacaaaaagccatgaaactaatgaaagtggacaaaagaaaaccccaattacctgctggtgcagcatgatccgagggttgatcatcaaaatctaaatccattgatttctttcacaaatactctccctctcaccaaagtgtcaccttcaatacaagatagaaggagcttttgtcaaaccattatactaggccaaaaacaagaccaatggcagatctcaagatatatatgtatattagtatatccataaactcataaattcacagaaaaggaaaagaaaaaaaaaaggagaatactgtaatcaatcaggcaatcaaaacagaacaattgaatatcattccagagaaaattcaagtaccattgaatagaaaaatcaacggtgattaaaaactgaaactttgatgaggagaattggaaactagaaatacccgataaaccacgaaacgatacgttgaatctagaccattgctgccgccgtcgctagggtttagctactcggaggagaagtttggccggttaaaatctgcgtctattatcgcagggataaatggaaataaatttacaaagttaatgaagcagatcgtgcaggctagtggtctattattttgtctacgagtttggttctgacctggccctagggttcgattttttaacaccccacatcgcaaccttttaaatgctttacatccatcgtgggcctaacgggcttaatgaaattatgctttatatgagagagcccaatttaaaaatgactttttggatttaaaagcccaaatccacccgtagtaaaacgtggctgactcagtaatctctcttccaatggaaagcaacaagtttaaattaataattttattctctccaccactcaccaaatctgaaatccttagtttttgtgcttcgcgaacagcagtaagtctctgtatgaatctatagcttccagattatgaattttagattttgagttgttgtttttttcatatgcaaagttgttctaatttgatttacaattcctaattcctcaaaacttcctaagatctgtaatcaacttttaccatttcccttctgtctcctctgatttcgtttgtttcgcatttcctcaaggtttgttttttttttttgtttttttttttcctgtattaatggatatttattagggagctcgaggggtctaacattttttttgcgtctatttgtagagttag

SEQ ID NO: 35641 - DNA, 1802 bp, Arabidopsis thaliana landsberg
tagttaaggtccccttaaagggaaaaagataagagtttaggacattgatatttatacatgcagaagaatagggtttttgttatggtgggttgactatttgagatcatattttaaaattatacgatttaggtacgatgtgacccccggtgcctagtggtgagacaatcacaagtgggagaggcctcttattggagaattaaattttttcttaagaaggaaagaattgtgatgacaaaatgatgaagttggttgaaaaagggttgtctattattggcactacgaatagggaaaacccacgttactttatggattagcattgtattaagtggtgcttttacaaaaatgtaaaaataactagattttattccgcggtataccgcggtgataatttatctttttaaagttagtataatattttttttgcaaattgtatctatctataatatatttttattttatagtttacaattgttattaagtaacgtcctgccaaatccatcccgtaaaaaaaccatttatttatattaatgttgatcttattaaagatatgtttataaatcattgtctaaatatttttgtcgatgcgggacgttgaacccacacattttttgctaattggttaatatatgttcatttttaaaattttgaatcataaaatatgatggaaaaattaagatttttttaaactctatatattatataatgatgttaaaaaattgtaatatatcaaattttttataagtttaaatgttaataatgttttataaattttaaatatataaataataatatttaaaaatttaatatttttgcttataaggtaatgacataataactctaaaagcaaggatttagaagatttaaatctttaattaaatattttcattaataaataattaatgtcagtgacatgacattgtaaataagttcaaatacaaaatttatttatttaaacaaaaaaacgtttagtaagaataatatttatttaacaaaaactttgttttaaaatattgttaacaaatatgtttatgctaattttaagggattgatttgaagtttggtaggattaaatttgattcataatatgattgacaatttaaatcaaaaatttaaagtaaaattaattattttgaaaaaaagatttaatgctaatggcattagattgtaaataagtcaaagtccaggatttatttgctaaaatggctgcaaaaatgtatatatagttttattttaattttaatctttaaataggaccagggtgtattattacgagaaaagggttttcttcttttacacagaaactgcaatattcccacgatctcaaattcaacctccacttctcaacaatggaacaaaaagctttcatatttctggaaatcaattctattccgatcacttctcacttttcttccatgatttttgagatcaaaaaccagaaaatttttttattggatttttttttattacagatttcttcttcactgagatttcttaaatctctattgcttctctctttctccctatccctattgagcttcagtcctttgttttgaatcaaaggtaaattttccaactatttttgatttgatctcttggaataaatattgatctcttcacgataggttttaatgaatttttttgtttgtgctactacagatctcttcttcgccgtcctttgatttgaattgaaggtaaagctctcaactatttagattagatgaatgatttaatcacgaatgaattctaaaatcttatgaacccaaaaccaaaaccattgctctaatgttctcaatttctcaatg

SEQ ID NO: 35642 - DNA, 3204 bp, Arabidopsis thaliana landsberg
  unsure (1)..(3204): unsure at all n locations
tggttttgtgctgcagaggttgtgaaaattccgggtataaaaaaggcgagattgggttgttctagcaaagaaccaacagatattttcctggccagtagagaattcttttgaatagggcttacttgttggagcaccttctggccacattggaatgacaatataagcagcgaaattctcccgtgctctaatcttgttagcaatcttaagcgcgatttccatcgggattagattattagcacctgcagtaccaaaattccttgtttatatactgaacgcatccattattaagctagccttcaagagctttcaattttcttacccaagtccttgtttgaatcccagttgaatgaagatccaagaaaatattggttctcaatgtagatgaagtgctgagcagatcgtatggccttaacataagctgcgtgtatgctcatatctatgagaatgttcttcccacatagaagattctgttcacaaatacataataagtagagaatagcaacatgacgacaaactataacagttcagagttgtgcttactcttccagtagcttcctctgggtcctttggaaaccctttgactgaagtcgaatcaattgaacggaaaacctaaacattaatatcatcgaaaaagaatgagattccttgtcaccaccacaaataacaataactagcaaaaaaattagacttgctaaattacctgaacatgccaagactctggatcattatcattagcagaagaagcttcagaaagtcccatgatgtcaggaattctgtttatcctaagcaaagaatcgtcaaaagaagttcttcctttccctattccacgaggttttgaagccatccagcgttcctcgaaattagcaagcacatcatatgcagctggaccatcaattttgctgtgcagatcatgccatggttctcttggtccaacatcctcagtagtctaatatgaaaacatattttacacggatcaagaatagtggcatccagttccaaaattataaccaaacaagatttttcttaaatgattacaacaaaatttgggttatggaagtcatctttatggagtgtctttaatgtcccgaaaagagaatgcttgggagtatcaaatcgtccgttgcacaagtctagccctccaacaaatgctacaatctttcttcggttctgagctgcttcagcatctacaatcatagttttctgatgatgcgtgtagattgtttcaacttcctgatcatcataatgacactcaaagtttagacaatgaagctatacacacatgagtttacggagtaatgaagtaactaataagcatcttacagatttttttatgaagctgtgacctttccccccatatctaggacaaaggagaacttgcaccgatgagtgcttgaaaaaacggcgagtctcctcatcacttgtgttcataagtcctttctacatgcaacaaaacaccagctttcattaaatagatagaaggattgttgctaagttagtacagacatgtataattatctaattgaagcaaactcatgctttccaataagataaacagaaaaagggtcagaactgaaacaaccaaatatgtgactatgtgagaagttaagaacaacacattacaccattcaaaattgtgtacaaacagagagctccatagaattagttaagtgataagctataaatcaaaatttgaatatatatatataagtttgattatatataagcgataagctccatgaacaattcagagtggaaatttgaatatatatatatatatatatatatatataagtgtgagattgtggttaacaaacatagaatgtcttaatcagaaaaaaacagagttatgtagattcttactgtactgaatcccaaaagactccttgaagttggatcatcccacaccaaaaccaacactctaacaccttcttgagatttgactttaagcaactctcctaatgtaccttgggtcggatcattgttaccacgaaccagcctaaccggatggaaaactgaccaacctgtgatataaatcaacctccttgcccgtcgcatcgcatcagccatatcttcccagcattttccatgtctatactgaatctcaccatcaagatgtacactcggaagagtaccgtcatcaacatgagcatcctgataaagagtaaccctaccgcctttcctcaaagggaagtatgtaccgggaactcctacacactcaacaccaaaaccaacacccttttggtaaagtctcattctttccattggaatatactgaatagacagactcaacacagcaccttgtttacaaggctttcctctactgttaagtatcggaaacagcccttcgattctattcccggaacacaactgctcggttgggatttcaacagctccaatgatctgtgatccaataatatcactgtctttcacaacaaagtgaactttcgcagcactatgagcaactggtacatcaaaatgctgcatccacacaggattctcactattgctaataacaaaagttctaccaatcacagcaccagagatagagacagtaacataaggatcacttgtgatcttagaagaattctcaccatccactttatgattcctccgacctaacccaaaaaacatcccaccaacaagggtgttatggaaaccatccatgttaggaagatgtttagcttccttaacccaaatgtctaagttaccatgtaataattcaaccctcaaagagccactactcgtagcaaacggcacgtattgctggccgcccccatggcttgaccctcctcccatagacatagtctcagtataagccggatgatacgccatgaaaaacgaaatcaaaaacccaaaaagtcagaaactttcagctgttagatcaaatctcaagcannnnnnnnnnnnnnnnnnnaaaagatcgatcacttggtgggcaataatcgagagatcaagactgaagagtgaaaaaaaaaaagataaaactttgtgataatacaaactcagatcaaatggagatctaaaaatatgggcaaattcatatgaaatctcagatttttgtgaagaagaaggtgggaggaaacgaagggaacgttgacttgaaacggaagaatcggaacattttaaagatattggctgccgttgtagatcaatctaacattagccattaatgactcaaattaatcttcgattaggtaataatat

SEQ ID NO: 35643 - DNA, 3160 bp, Arabidopsis thaliana landsberg
  unsure (1)..(3160): unsure at all n locations
ggcttgacttacagctttctgatcatatcttatctgtttgcatcacaccggatcgaattgacatcctaaaatactacaaacgacaagatagtgttttagggattaattgagtaaaatcctactatcaatttggcgccgttgccagtttggtgtttgtttgctatatttgagatcattagaaacattaagatcaagttcgtttttgttacacaagttactaacattgtgccttttttgtctttgtgtttcaggtaccttgcaacccgctttccagacgcatctctgattcgcctgttatagcacggctgttatctgttgcatgcatctgcactagttctgacactaatgacaagcaccacagagagatgaaagctctcaatgacaaactagacaaaatcatccaaacgcagtatggacatgtaaacttcatctctgaagatgaaccattccaagtacaagagggggagaacgatctgtgtgctgacagctatgttcataatcaaggtggctacaacaaggggtacaacaattacagacccaacccaaatctgtcatacagaagcaccaatatcgccaaccctcaggatcaaatctaccctcagcagcagcagaaccaacccaaaccgtttgttccttacaaccaaagccaagggtttgttccaaagcagcagtttcaaggaggatatcaacaacatcagccaccacctggtttcacaccacataaacaacaagcacntgcgcctcagaattcagacataatgattgtgctccagcagctcattcaaggacaagccacaggagcaattgaaatcactaagaagctgtctgaagtaaacaacaaagtcgaccgacaaggcgtcgaacttaacagcaagttcgaatcaatgagcactaggatgagatatgtggaaggcatcctcgcttcaccatctgttaacaacaacccatgccagcttccaaggaaagcaatccagaatccaaaggagtatgccactgcccatgccatcactatcacacatgatcgagagctgccaactcgatatgtccctacatcaaacactgaggacagtgtaattctagagggggaggatttttatcaagatgatgtgttggctgacaacccaatcgaagagcccatactcaccagtcaacccactcgaccacaagctcccccagctactccctttgttgaaaaaccggaagctgcaaagaccaaagacatagacttcgtgccaccgccttacaaacctctgcttccattcccttgtcgtttcaagaaagttctggttgcaaaatacagagccctcctggaaaagcacataaaggatcttgatgtcactatgcccttggtagattatttcgcgctgatacctgactctcacaagtacgtgaaagacctgatcacagaaaggatcaaagaagtccacggaatggtgatattaagtcatgaatgcagtgcaattatccaacagaaggtcatacctaggaaattgggagatccaggctcattcactctgccatgctcactaggccctctatcattcacaagatgtttatgcgatctaggtgcttcggtcagtctgatgcctctctcagtagccaagaaacttggttttgataaatataaaacttgcaacatttcgctaattctagcggacagatccatcaggatacctcatggcctgttggaagacttacttgtcaagataggttctatagaagtacctaccgactttgtggtgctggatatggacgaagagccgaaagacccattgattttgggaagaccatttttagctacagcaggagccatcatcaatgtcaagaaaggaaagattgacctcaaccttgggaaagatctttggatgacttttgacatcaccaacatgatgaaaaagcccacactagagggtaaagttttctggatagaagagacggaattgctagctgacgaggttttagaagaactagcagaggaggaccacttacagagggccctgaccaaagacagtagagaaaaagacttacatgtggaaactttgggataccagaagctgatggatatgagcaaggaagtcgatgactcagaagactttgaggagttgagacaactcgatcgcaccaatgacccactcgatcacgtcactcgatcgcaaggcaagctacatcacttgatcgcttcactcgatcatgatttcatctccgacgctgaatcaccatctgacgattggtctgaggtcaagacacccaaggttgacttgaaccgctgccgaaagggctaaggtatgttttttttggaatcaattccacctatcctgtgatagtgaatgatgaactagatactgaacaagtaaatttgcttgtaattgaaatgaaaaagtataggaaagccataggttattcactagatgacatcaaggggatttaacccactttgtgcactcatagaatccatctcgaaaatgaatcctattctagcattgaacttcagaggagattaaatccaaacttgaaagaagtagtaaaaaaggagatacttaaactattagatgtgggtgtaatctatccaatatctgatagcacttgggtatctccagttcattgtgttcctaaaaagggaggtatgacagttattaaaaattcaaaagatgaactgatacccattaggaccataacaggacataggatgtgtattgactataggaagcttaatgcagccactaggaaagatcatttccccttacctttcattgaccaaatgctagaaagattagccaatcacccctattactgttttctagatggctatagcggattttttcaaatccctatccacccaaatgaccaagaaaaaactacattcacgtatccctatgggacttttgcttacaaacgaatgccttttgntgcttgtaatgcacccgccacttttcagcgatacatgacttctattttctccgatttgataaaggagatggtagaggtattcatgaatgatttttctgtgtatggctcttctttctcctcctgtttgcttaatctgtgcagggtactcaagagatgcgaagagacaaacctggtgctgaattgggaaaaatgtcaattcatggtcagagaaggaatcgtcttggggcacaaaatatcaagaaatgggatagaa

SEQ ID NO: 35644 - DNA, 1141 bp, Arabidopsis thaliana landsberg
cataaattcagataaaagaaaatgtttgtgttgcatatattttttttgtataaaataatctacattttggaataaataaagttaatttcatgaatgtatctgaaatatttttaaattaattaaaatgagcaaaaaaaagaaaagatatatctatatatattttttataatttgttatttgttaggttgataattaatgagagagtgtactgtgaagactaaatattaaattatgtattttatttatctaaatggcaacgaaatgaaaattctcatatgtctgctcctccattcttactcttctctctttctcagaagctgcaaaaccagagagtgagagagaatagagattcacttttgtgagcgttgcgatgattttgtgcctcgtggaatcatcacactacaacgtattcacctgaaattcagacaaaacagtttgaggaaactgggaagtgataagataagagagtgatagagagagagatgatggaaaacggcgtcgttacaggaggaggccatactgttatggtgggcgtaaagttcgatgagtcgagcaatgagctacttgattgggctttggttaaggttgctgaaccgggtgatactgtaatcgctcttcatgtactcggcaatggtaacacttttttgtttctctgtattaaagctacgatttttggaaatgggtttccatgtttactctctcttattggatttgtgtagagatcgttgtccgagcagacaactcttgtctcgtgtgcattgttaaaaactttgattctgttcttgaagtttatgaaggtttctgcaaattgaaacaggtatgcttattaaagtggaaaactttcatgctctatcctctctgctctagctgatgatggttgaattgcatttaatacatggaattgaagctaaaattatcccggggatcttctactcgaaagattctagttaaagaagcaaagatgtgttctgcgtccaaagttgtagttgggatctacagacgttagcatacaattcattcatctgccttcgtggctaactacttagctaggaaagtagcaaaagattgctgggttctggctgtcgacaatggaaaagtcatgcttcagaaagatgggtcctgatcgatcattcatcactct

SEQ ID NO: 35645 - DNA, 1496 bp, Arabidopsis thaliana landsberg
tgagttttgaaattttggttcttgttcttgagttgattttggatttttatatagatgaagtaatatatactaggatttagggttgcatttcctcaagaaaaccctgttcctctttcaaatccaatttgttttaattagtttgtttcatctacggttgaatataactggtgttttgatgtagagctgaatacaatccagaacatgatctcttggaacaagagttcttgcttaaagggagatggtaccagaggaaagatttagaggtaaagctttttttcttctgttgttgttgtgaactcctgactagagaatccaagcaaacatgttgtgattcaatgtcaatgtagatttcatcagttgttcactgttgatcagcgtgagttccttattttccagccttggactgcctttaggatctcaaggttttagttgtgctttgttcacctaagactatagaagaacttatattgtgacaggttaaaaacatcagaggagatatccttcagtgtagtcattacatgccagttgagcgtcctgaagataggcctctaccttgtgtaatatactgccatggcaacaggtaatcgtaacttttattttaataaaacgtgatttgagctgtactggtgaaataagctagttaactcatccttcaatcgatgcaatagctggtaggatactatgacaaccatgcattgaaatgaaacacctgatatggttgccaacattactaaagttttccaattatcattttagcttaatgtttcttttagtatactattcagtaatggattcattcttattcagtggatgtagagctgatgccagtgaagctgcgatcgtattacttccttcaaacatcacgattttcacgcttgacttttcgggatccggtctctctggcggggagcatgtcactttgggttggaacgaagtatgtcctcctttgatcttttctcaaaatattcctcttcttcccttcagctgttatggcctaaacttatcgttgtttggagtaaacaagctgtcttaagtcaatatatctgcttctcgattgatatttgttagattgaatgtctcgtggtttattggaattctatcccactataaccaatacacctatgatgcttcatttggtctatgaaggtattgttatctttctgaagaaagatttccaaatgatttagagtttttgatgctctatttcatggtagacttaggtgcctttgagtgtccttgattaggttgtcaatgatttttccttccctcacagtcgctgccttcataagtcataatcctgaattgtgagagcagtcacttcttttatcactgttaaacctgatgtgagtgcttgcagaaggatgatctgaaggctgtggttgagtttttgcggcaggatggaaacatatccttgattgggctatgggggcggtcaatgggtgctgttactaggtttggcccagtctataatttgttaatttactaagagcttatcg

SEQ ID NO: 35646 - DNA, 998 bp, Arabidopsis thaliana landsberg
ttccctagctaagattatttctcgcatcttccgagacaccgttcagactcctggaagttacatatgtgcgattcacacagcagaatgctgaaatcttgtgtgaagcatgggatcgcttttaaggctatcagaccaaatgccctggtcacgggttcaaaaaagcttcacttctcagcactctctacagaggtgtccttcccaagatcatgatgcttcttgataccgcttccaacgggaacttcctcaacaaggacgttgaagaaggatgggagttgtaagagaatttggcacaatcggatggcaactacaatgaagagtacgatagaagcatccgcaccaactctgattctgatgagaagcaccgcagggaaatgaaagctatgagtgacaaactggacaagctactccttgtgcaacagaagcacgttcattttctgggtgatgatgagacgttccaagttcaggatggggagactctgccatcagaagaagtcagctatgtgcaaaaccaaggaggatacaacaaaggtttcaacaacttcaagcagaaccatcccaatctgtcttacagaagtactaatgttgcaaacccacaagaccaagtctacccttcacagcagcagaatcaacccacgccctttattccatacaaccaaggtcaggggtatgttcttaagcagcagtaccaggacaactatcagcagcaacttccaccacctgggtttgcacagcagcaccaacaaccagcttcaacaactccagattcagacttgaagaacatgttacagcagattctccagggacaagcagcaggagcaatggatctcgctaaaaagatggcagaaatccacaacaaggttgattgcactttcaacgatctgaacatcaaacttgaggcacttacctctaaggtcctttacatggaaggacaagcaaggtccacctctgctcccaaacctaaccccacttccagggaagtcaatccaaaaaaaatcaaa

SEQ ID NO: 35647 - DNA, 1331 bp, Arabidopsis thaliana landsberg
  unsure (1)..(1331): unsure at all n locations
ccgaagaatcgtattctttcggaagtaagttaaaaattgagggctttcctctattcgctgtataacccttgaatcatcgtaggctaagagatttacatgtttaagaaattaagttaggaaattgaagtttggacttttgtgagtcgaagaaattgaagtttctgcttaggaatttgaagttttgcttctcattaacttgtttattaactttaggttgtgtaattgtcagcagtgacgaagatagtttagatttttttttgtgttatcagtcaattctcagttttctgattttgaagttaacagttttcttgttttacaatctggttttgtagagtgaatggagagcgataggagtgcagcaaagccgcggatgggtacattacgcggttcatcgacctgagccacatatcatgctattcaggaggcctcttaactatcagcagcagcaccaagctcagattgctaagtagaagaattatgcacaattctccctaatctctgtttagtgcctcgtaaacgaggtttaaaatctactctgatgttttgtcctgtagttttttttattgtgttcatgaattctcttcagtggagaatcatgtgagtttggtagaacaacttttaatgttatgttaagtctggtcctttgctagactttggttggatccacgtttgaacttcttcatggttaagaatgaagacgttatttctcatgcttatgtgcttgtttcatcatttcaacctctttttattgctcctcttagagtctcaagtccataactatgaacaacaaaccaaggtatcattacaatgccaatctgaaggtctaatcacgattctcatggcgatactgattcaaagaaactcatatcgtgtctcaatcaccacattcaccaaacaccatatattccttactgtactactattagtgtattgaaaccaggagattcagagccatttttataaattaactagatatgtatcttatacctagtgtgaagcactgattgttggaattaaatgaaatttcgagaaaatgaacgagttcgtagtttgatggtaaataacaaggtctttggtcaaagcaaccaaacaagttgttgaatttaattagaaccaaaccaatccacccaatttcaattcattttggttcaaattaaccggtttataatcattcatccccaatcggcgtcttctaaagaatttcaaaactctaaaaagttaatcaaacacccctctatttctcataataacatatctaccccaaaccactttattctcctttcactatncttcccaaatttcaaacgatcagattacagattcttcaattc

SEQ ID NO: 35648 - DNA, 1622 bp, Arabidopsis thaliana landsberg
atatcattccatttccgaactttgtccaatgatcactgaatgaagtatacgcgcttttgtggtcacggtgtttaagaaatgcgtgggagtaaatgagttcgacctcgcactcatcttgaccgataatcgagtactatttcgcaaatgtgtttataacgtttttactttcacataccttacatgtaactaatcatcatgatatggtgcagggttgccgttcccgcatagaggctaccattaatcgtcgcattgcttcattttactttgaccgtatccgagaaaatgagtggatagttatcaatactttctcggttcgaaaccacgacgaggggatacacacaacgtcccatgactaccggatctgttttatggatcagaccattgttaccaaaccttcgggattggctgcaatactgtattacgattttactccttttgactacatcatcgagaagacagtttctactggagtgttagtcggttagtatatttgactgtctattcatttttgtaaatatgtacgtacacgtaatgcttttatctttcattacgtacaccagatgtgattggtgcgctcattgagattggcaacttgaccgaagactaccgtgggcggaagcttccttttaagataatggataaacagtaagttattttttaaaatgttttctcctagatgtttgttatatcctccgtataatatatattctctgtagcaaggaagttcttcaatgtgaagcacaaaatgatcaagctttcgaatttaaagatgaatgttttacgtacactactaattatgtatctgatgaattatgtaaagatgaatgttttacgtacacgaatacatatagacatggtagatgtgaaatgaattgtaatggtgtgcaatttagtattggaagattggtgcgctcattgagattggcaacttgaccgaagactaccgtgggcggaagcttccttttaagataatggataaacagtaagttgttttttaaaatgttttctcctagatgtttgttatatcctccgtataatatatattctctgtagcaaggaagttcttcaatgtgaagcacaaaatgatcaagctttcgaatttaaagatgaatgttttacgtacactactaattatgtatctgatgaattatgtaaagatgaatgttttacgtacacgaatacatatagacatggtagatgtgaaatgaattgtaatggtgtgcaatttagtattggaagatcggttttacatgaatcagagtacgattcgttgaaatattatatatgcataatctatattaaaatacccagcatccatataacttacataatagcttaatctggaaatcaaaaaaataaaattaaaattttttcgtagccaatggttagagaatttttaaactcattttaatgttgtaccatgtacgttccaataaatatttttgtgtatgtacatagtattaaatttatgtgatttagacatttttatgatgtaacttattagagcggtcgtatacgtgtacgtgtatctcaatattatcgtgtacgtttaagggtttagtttaaaatcttgtttattaacaacaattttaactcaccaacaaagatgtacgtacattatt

SEQ ID NO: 35649 - DNA, 1283 bp, Arabidopsis thaliana landsberg
ggagatcctttacgcactacttcccgaacttagcatacctctatcctgatgagaacacaactgtagaataagatttaatattattttgatttttgcattgaaaagtgaaaatatgaaatctggaagattgtctaattattgccctctgttgtcatttatctatattgtttcacttatattctgaaagctaacgtttcttgtcattgtttggaccaccagatgattagactgattacttttacaagtggtggccgtgcatacctcaatttcatgggaaatgaatttggacatcctgaggtaaatctacaaactcccactgttctaaagacatcatctttatttttctgattctgacgtttcatccttgtgtcagagggttgagttcccaacgcagagcaatagcttctcgttttcacttgctaaccgccgctgggacctgctggaaagtggtgtgcatcatcacttgttttcctttgacaaggtatcagtcttaccattaccacctgtttacaaaagtgcagcttccatatccatgattctgttagcatctctgaaaattttcttccttaattttcctagcaatttaatactgtattagtctatgaaggcggcaaataaatgttatcaagccgagaaagttgtcagactcgaacttaaaaaactttactgccgataatgctcatcatatcgggagaaacggaatgcttgattgattattgaagttttaattgtatatcttcaaaatgtaaggactagaaaatgttccaagcatatatcctcttgtatcagaagagatgctttttagctactgatctcgttctttatttgtaggagctaatggacttggataaaagcaagggtatcctttcaagaggtctgcccagcatccaccatgtgaatgatgcaaatatggtaactgaatcctttttctcttttattttccactgaaaattgattgggttcagggtctgaaaaatgagtctgtggcattcactggcatgtgagtgtttgtatatcacttaagatacgatattatacagctaatcgagaaaatagataaaccgactgtcttccggcatcatttgggaattctccgaatacctttatagaagtgtaaaatatcagtgtaaacctgagcaaaatgagactgcctaaagtaagcatcagaaatgaaagagtgtgtacaatgagcctgcttgcgagtcaactaaatgatatctcaggtgagttctttctcgagaggtcctttcctatttatctttagcttccacccatcaaattca

SEQ ID NO: 35650 - DNA, 1009 bp, Arabidopsis thaliana landsberg
  unsure (1)..(1009): unsure at all n locations
tcaaaacttagtactaaacaaaatatttgcaatgattaaaaacaaacctgcattttatatgttgacaaccctcgactttatcaacatagaatttgcaactaggacaccttctccactgcttattttttgccatctgaatcaacaaagcatcgtcttcatcactactcttcttcttcgtattcccaaatctttgaaactcatcacacccaatccccgcatgccatgtcaccttacactgcacgcagaacagtctatgacaagaaggacactccgtctgcgtcacgttagcatctccattttcatcgttcaccatcatcgccgaacaatctttgaacggacaatagaatttgtcccacgaggagatcaaagactcgcacaagattttctcccaacggtcgaacacgtccttagggattagatctcgacacgtgtaaggctctatcagtcgcgtgcactccacgtcagggcatttgatcctcgatgcgttttcttttatcttagttgccacgtaacggacagtgcagtcggtgcaataggcgtgagtgcagttagtggttcctcggaagatgtctgaggaaggtttttcgtccatacagatcatacataaccttcttgatggttcagtgggttcattctcggcttttatctccggttcctgcttaaccagcgtagcgagattcctcatgggttcattctcggcttttatctccggttcctgcttaaccagcgtagcgagattcctttggacttggagatgatgattaaccgcaaccgtagaagcgaccaaggaggaaaacagagcttcttggagatggagctccgtagcatatttttcgtcggagactggaaaaacttcatcgtaatcgaataaagcagagaagtatgtttcatctaccaacgcatcggtgtccgtctttgtgcttgacgatgatgatgaaccatcattcatcgtatagtcttggtgtagtgtttagtgcctatgagtcttangtgcattcacgttaaatac

SEQ ID NO: 35651 - DNA, 5584 bp, Arabidopsis thaliana landsberg
  unsure (1)..(5584): unsure at all n locations
aacccatctacttatatataatttgatatcgggtacctataagatattttgcactttctgtatccgtcgagggcctacttatttatgttcaaaatagtccatcatgttgctaaatagcatgtgaaacattggaaactactgtttctttggtttataattacgttacgtcgaatgtatttgaacaataatttatgtttacattgatatacgtaactataacatggcatgcttacttatatcgtgtactttctgtttatttttccatttattcctatatattgtaatatcatgcgttacggtgaaacacattgttgtctcatttgatagctaagttttgttatttttttacaggtcgtgtcgggatggaactagcaattcaggatgttgtgtatgaaggtgatgaactgtttgtcggccgggtattcaaaaacaaacaagattgcaatgtcaagttagcagtacacgcacttaataggcgttttcattttcgccgtgatcgctcctgcaagaaattaatgactttgacatgcatctctgaatcgtgcccttggcgtgtgtacattgtcaaattggaggacacggacaattatcaaattcgaagtgcaacactggagcacacttgcacagtcgaagaacggagtaactaccacaggggagcaacaacgagggtaatcgggagcataattaagtcaaaatatgatggcaacacacgggggccaagagctgtagacctacagcgaatccttctaaaggattattcggttagaatttctaattggaaggcatggaaatcaagagaaattgctttggagagtgcgcaaggctcagctgcgaatagtttcagtctgttaccggcctacattcatgtcttgcaaaaggccaaccccggttcaattgttcatcttaaaactgagattgatgcaaaacgaaattacaggtttaagtaccttttcttagcatttgccgcctcaattcaaggattcgcatgcatgaaacgggttattgtgatcgacggcgcgcacttgaaagacaaatatggaggctgcctcctaacggccagcgcacaagacgcgaactttcaagtttatcccttagcttttggggtggtcgatagcgagaacgacgacgcgtgggagtggtttttccgcgttttgagcacagctttccccgaaggagagaacctgacattcgtttctgaccgacattcatccatttacacagggctgagaagggtaatctctaatctctaatgttttttatttttacatgtattatattttaaatgttgcatttaacattaaacacacatgatagttcataaattacgtgaggtaccaatataatgcatgcgatagttaataataattggtattcctcgtttcctatttgagatagatctaacgtattgcagtttttaaccactagaaattaatatttttaacatcacatgctataccagtataacacatgttataggaactaataacagctacattaccgcaggtgtatccaaaggctaggcacagcgcttgcatagttcatctccaaagaaacattgcaacctcctataagaaaaaacatttgttgttccacgtatcgagagctgctagggcttaccgtatttgtgagtttcatacctactttaacgaagtgataaaacttgatccagcttgtgcacggtacctagagtcagttgggttttgtcattggacaagagcatatttccttggggaaagatacaacgtcatgacaagcaatgtagcggagtctctgaacgcagtcttgaaggaagcccgggaattgccaataatttcgctgttagaattcataaggacaacgttgatttcatggtttgctatgaggcgtgaggcggctagatccgaaacatcggcactcccaccaaagatgagagaagttgtgcatcaaaactttcaaaagtcagtcagatttgctgtacatcggatcgataggtacgattatgaggtcaggagagaaggttctagtgtcttccacgtcaagctaatggaacgcacctgttcgtgtagagcatttgatttgcttcacctgccttgcccccatgcaatagctgcagcagtggtagagggagttccaattcaaggactgatggcgcccgaatattcagttgaaagctggagaatgtctttccaaggaacaataagacatgttcctgatgttagtgacgttttcgctttgcctgaaccaatagcctccctccacctgttccctccagcaacacggaggccatcgggtaggcccaaaaaaagagaatcatatcaagaggggaatttacggtaaatgtattgtttttggacagaaattgactctatttaattgttgatttctctaactagcatgtgttcttcgcagggaccacaacgtcaacaaacacgttgtttctgttgcacaggcgcaggacataattgcgccacgtgcaaaatgcacatatgaaggtttgcaacatattttacaaaatagcatggtgtacacaaaagtaacaatactaattaatttattacatcatatgcagggggtgttgtgtatcgcgtcttgctaatgggttataagttgtgtaatatatgcaaggggaagtccatcaagaatggaggtatatgtaaaaggaagggtaacttggtttaatgtacatattagcaattagatgttgcgattagggtggcgcgtaaccgttacattcaaaatgcaatcaaggaaatcccaaatcctatcggtgacttaatgaagacgatgttctaccaggcaaaggaaaatattttgttttttggattttgtgtaagaaactttgaattcccccttttgtagacagacccatgctattaaataaagacgcgagtgtttaattaaaggtacatgttgtagtataaaccaccatacacaaatttaggaccaaaatgacacacagagcatcacatttattacttcacttagagcaaaaggtttaaaagacatattgaattgtagcaattaatccatgaagcaaacactgctcaattaaataatcattttccatgaacagatgctattttattgacaaccatgcggatagatcgtaatacatgttattatactgcatcacatgcgatgaacactgtttacataggattccaatcccacttgatatattttaatagaacccaataagttcgctcccaccacacattatctacccaccaccaaccccacataaatgtgtgtatacacactccaccattattgccctatatatacatgaatctcaccgaccagtgaataacgtaatcatccctataccacatgatagctcgagttgaaatgagacagcatagacaaaatcatgtacttatgagggtgggtgggttgttcagaaaataatttgaagacgcattggaggcaaacaaccccgaagcacattacttggaagggctaaggtacgcgtgttgggaaaaagatttagacatggcaaaaaaaaaaaaaaaaaaaaaaagatttagacatggctaaaaaacacattttcaaagcgattaacaaagtagatgaggtactgtttgttatggctatgtcgacaatttgtggtggagaaaaagagctaggtgaatttttcactgaacaactgtttgccctaccttgggccgaagtattagctatgggtgattctttattttcagctcttgaacgaatggctgtgcgccatggtacagcttacaggcttacatggaatggggcccatcctccatgtgtatcaatccacaacatatataatagatgcgaagagtgctacattttcttttgttcaaaagaattctgtcggcgatgttagatggtacaagctgcacccaacgtggaaatctcgtaaccagaagggaagcatcctttaaaataatatgctgttattttatattaacccgcgtagcatctataaatcacattatgtttgtaaaaagtacatgttttatgtataatgtgttagtcgttatgataatggtgtcaaataacgctattacattaaaatggcgtgatatgtacctatattacatgttttatattgactttttgatcatgttaatctgtctaaggtgtataatccaaaatatttttaaacgggtcattattattgcaaagtttacaaccgggtgagtcctaaatatcaactaagccacagttagaatgcatctatatttaaacgaatcatgaggtaaatataaaacgcacggtacatattagaattgcagcgacatatgtttactacacagaacaggtgcatagaaagaacattaggtactcaactgttaggtgtctaaaatattacagaatcaggtaatagaaggtaaacacactagaacatttgggtcagacaatcccattagctaattcaaaaccggcaatgaaatatttgttagcagcagtcaccacatcagcatgcttcacttctttgcaagcctgaatcccaccattggcatgggcttcaattaaacgagctgccataactccagaatatttgacagaatctgcctgtggaatatcattttctctgtgaaccgcaaaagatttcaaacgaagtttcttttccccagccattttaatagcaaatcgaaatagatatggtaacatttcagtaaggggcaaaagcactttcttcaattttgtttcacgccataatcatgtatagcagtcgaggacgctaatgatccttgcactcatatcaacacaaagccctacccaatgctgtaaatcaatgagaaatggaatgtagaccacagcagaacctgtaggggtacattcaagtaggtcgtgatcaaacccatacattcctttatcagcagacttgacgaattttgggtaatgcttggataattcaaccacaaatgttgaatcaatgaatgaaatggcttggtgcttttcaatgatattatttgcacaccagttaatccttatgctgttaatgaagatgtccataacctgtaaatagagtagaaggcatattaggtgtttaaggcaaaccctatgtttatagagcactatgtaatcttttttagccacatgatatttatcataccattttgggtacaacggtcttgaactcaacaatctcacgcaactcaatggcggaaagtgttcgacaagccccaaaatcaatgtccctaataacagccatatgcataagttttaagtaatatgagtcaaacaaaataaaatagcataaggttggaattaatacccagacatgccatataagcgatttatcttgttcttacgnnnnnnnnnnnnnnnnnnnnnnnnnnnnnnnnnnnnnntggaagaggctattactgattcatgttggagctgtgagcaacgtaaacgtgattagaaaatcagatgttatcttaataatcaggaaattagagtttgcataatcctaaacattctgtgttaaacttaatggcatgtaatttgttctaaaaccttgatgtttgtacgggcaaaacacttacaatatgcccggctttttaaatataattattgttgtgttaagtagaaccatgaaccatgttgaaaatacatgatggatcgcaaacatataaccgtgtgc

SEQ ID NO: 35652 - DNA, 1183 bp, Arabidopsis thaliana landsberg
  unsure (1)..(1183): unsure at all n locations
tgaacggagttggtcatcaatggctgcatgtgattgctcctaggccatagacaagccgccatgttcagtatcagctccggcaggtgggtactcgacctcatcaggtctgtggcggccagcaccgctctgaggatactcgatctctcttcttctgctgcggccaaccctgcggtcgagtgaaacttggaattcgattatctctccatctgttgctgttgagtatttctttcccgcaaaagtcgagtagatccagtgtggtcgagtattgcgcaggtttcagcggttcgcttcttgtggtcgagtatgtcttctgatttttaacactggaggtcgagtggaggtcgagtctataggacgaagttgaatgactcttgaaagaatgagactgcgattgagatgggtgaattggtcgagtatggcgacaaaatcgagtgaagttgtctaaaccgagtaactctgtgattcgtggtgatatagagaaattggagtgtcggtggtaagatgaagagaggtaggtcgagtagattttactttagggaggagtgaggtcgagttggaaaggtgtggtggagattgattatgtgattctctctccgccttatcttcggaaacaaaacgcttgggccacactctgttgacttgtgtttgaactttgttctctgttgactgggaaaaactacaggaaatctactgtaagctgcagaaaatccctgcaagtctctgtagctcctgttggtcgagtacagtgatgatttaaaatttttgggttttaaacatcacatatactcgacagatgtactcgaattcagggtctccagatgcaacagaaaactttcaaaattttgcactccaccaggccatnnnnnnnnnnnnnnnnnnnnnnnnnnnntaaattttttgaatttttactctatctccacgctgttccgttattcctgagaaacacaaacacaactaagacaaatcaaagataacaagaaaaggaaaatttatttaaaaaaatagtcatgggacttcctgccaagtgagcttgtttaaagtctctaacttgactcctcacactcatcaagaagaaaatgaatgatagagacggtctgcataatcatctctgatatcatcatcatactcagcgtcctccctggagaggtagaatactcaattcccttttcttcaaaataagctt

SEQ ID NO: 35653 - DNA, 1371 bp, Arabidopsis thaliana landsberg
  unsure (1)..(1371): unsure at all n locations
aaaatgtttttccgtttgtgcattagttataagaaaaaaatccttaaaaaaatctaaagtaatgttaatttagacgtttaatccttaatattttttggttggaaaacaaatatctcatataattatttatggttataaaatactttgtatttaaattattggtaaaatcaaaatcgcactgctaacataattatttaacggcgttaaattttaaacgtccaaattgaaattactatgggtttttttaaggacttttttccttagttggaattacatttcttttttattgtattaacctatatttgtaagcaaaatttctaaaatacatatatatgataatataaatgcttcacaaagttttttttgttgttgtttttgtgtttcatataatattgaccccagtaaaaacacggtctagactgtatttcatggtaatgttaccactatcatacctatctttttttacgaatttgactgaatcgttgttgagcatattatctttgttgattaaatgtataatatatttttttccaagcgatttattatatagaatgttggtacataagtgatatcttcttgttactttgagaaggaagtgatattttaagtacaccacactatgtaaacattgtttgctgcgaaatcgaattatttaggtacatagttttagtatatttttgtttgtttgttgagcgatagttaatctcttagatcgtttaatctccggaggttttttttatcaaaatatttatttatggtaatcgagacatcagtaagtttattttgtaattttattaatgaaattctatcaaagttttggcgtgataaccaatttccaaacagatttataaacttatccacgttgaaagtgcatatggtaaaccaagattttgttccatcattttttttttatcaaaaagattttgttccatctaaaattagaactcaaaacggttatcaccgaaaagattatagggaatgggaaccaaacatggaggatgacgtcttgcacataaccgttctaacccattttagatcttttcagctttttttgctttttcatttattagttgtcacaatttaaagtgagaacggttatgtttgttttccttttttgacataaagagaaaaaaatctagctcgattcttcagtatggatacttccaaataagattttgagaaatatgatggaaaaaaaaaaaatcagatttagaggttattttgcaatttccttcattgcaccattacaaagatcaaaatatgtgctttagataggatccggtgaagataccgcccnatatcacaagtaaattgtaagaacactgaaaaaaagccacaaaaaaaattatgttttgttgtgaaaaaaaagtt

SEQ ID NO: 35654 - DNA, 489 bp, Arabidopsis thaliana landsberg
agaagcttctatagatagatcgagtttcatttcatattctttttcaccgtaaatatcggaaaattgttttgtgtgcattagcttcattgtatacagtacaaaaatcatatgagatgttttaagttcttcaaatcgatacttagctctaaaacaaaacttggaagacaacatactctcctgacttctcttaaccttaaaacagcaaaaatttcagacaacaaaaacaggtgcagtgaactccctaacttgagccatggttgatttctgttaaatcatgaccgagactttgactgtttcttctccagtttcattttgaggttggctataatcttatcctgagcctgtatctgatgttccttggcattgagcttctgcttcagttcttcaatttcttttgaatgaccttcgcagctgattgcgaactccatagctttgagtttttccttcagttcttccatttcttttaaatgatcatcctcacaatggttt

SEQ ID NO: 35655 - DNA, 10086 bp, Arabidopsis thaliana landsberg
gaatgtgacaagatccatcattcttttcttctcttatagattattgctgtcctggttggaggattgtctatcttagctggtcaaataacagcagagcagctgacaaagtttctgttgtatagtgagtggttaatctatgctacatggtgggtgggagataatttatcatctttgatgcaatcggttggagcaagtgaaaaggttttccaaatgatggatctcaagccaagtgatcaattcatatcaaaaggcaaggttcaaatttttggctaagagcactctatcttagaaacatgttgaccatttatgagattgatgagagagtgagttaggttgttatcagtagatattactcttactatcaaaccccttccaggatgaaccacttaagagtatatgactttggacttcctacctggaggcttatagtgattgctacgctctaccatgtaatgtatttttatttatatactgttctgtaggaacgagactgcagagactgacaggacatatcgagtttgtagatgtgtcatttagctacccttcaagagatgaggtatgactgtaccgagtggaatctattttctgataatttttttgcttttgtgtgaatgtccttgaaccacagttttttgcttccaacgttttacaattgtgtgaatgttgcaaattaatggctaaatatatggttttgcatttgcatcattttacatttttgttgagtatattagaatttatgaacacacatcataaagagttttccagtcatgtttatggtatggattgtatggggcactggggctcatatatcagtttttcataacaattatatcatatgtcaatctctcaggtagcggtggttcaaaacgtaaacatttccgtgcatcctggtgaagtggtagcaatcgtaagtaaatctcaaagtatttcaacaatgcaactgttttccttagaatttagcggaagtgatatgtgtgcttatttgttttgtttaggttggtctaagtggcagtggcaaaagtacactggttaatcttttgctgcaactctacgaaccaacaagtggtcaggtactgtaggttactcaaactcactgtagaataaccctttaaagtcttccttcttaatagctggctttttgaattccagattctactagatggggttcctttgaaagagttggatgtcaagtggcttaggcaaagaatcggatacgtggggcaggttctcctcgcttttcgtctttgtagaacaaataaactttgatgaatttcactatccctttctaaagctgtcacaatgaaacaggaaccaaagctcttccgcacagacatcagttcgaacatcaagtacggatgtgatcgtaatatatcgcaagaagatataatatcggctgcaaagcaagcctatgcacatgactttatcacagcacttccgaatggttacaacacaattgttgatgatgatctactcagtggagggcagaaacaacggattgccattgctcgtgccatccttagagatcctagaatcctcatcctcgatgaagccacaagtgcactcgatgcagagagcgaacacaatgttaaggtaacctctctattaccaaaaagacaaattacttggatgcaagaattcttaagccttttgtttttccagggcgtacttcgttctatcggaaacgactcagcaacaaagagaagcgtcatagtgatagcacacaggtatctttttcttgcactgatccaatcttttacatgttttgatcattgatttataacattctgttccttcacagactttctacaattcaagctgcggatagaatagtggctatggatagtggacgagtcgtcgaggtaagccactatcttacgggttttgataaatacatagaaaccattgatggctttgattttgactgttatatttgtacacaaaacagatgggcagtcacaaagaacttttgagcaaagatggcttatacgcgagattgacgaagagacaaaacgatgccgtcttatgattgatcctacacatgctaaactgttcatgaaatagtcatgattatgtttttgaatggtcatgacgatatgtaatggcaaaattatgtaaagtgtaaccatagagaattcttattatttcacacaaatcgtgtcgttctagtatagttgacgtaaactgcctgccgtttctatatttcctgttaaagcacgaaaatttatagaaagtggaaaccactgaagacgacctgtagtttatcaattcgagaacaagcaagcaagcgatctcaaacgcaagagtcaaggactcaagaccttgctgctaatggacgcgtaccagccaccacctcagtacctgagaccgacgtctggaccaccgactgtgacggatccttaccaccaatactatcagcatcaggcgagaccacttgtgcctcctcctacgcagcccggtggtcctcctgcatggtactccaaccaatttcatcaccctcactctccatcgccaccgcctccacctccgccgcagtgggggccaccttcaccgcattatcctcaaggccaaccttactcttctcccgcttatcctcctcaccagccgccattcaacgccggcgctaacggtaacagtcagtttcctcctccatctaccggtgcgccgattcctccgccatatcctcaggctaatcaggttactccgtcgttggattgtcctgtgtatttcccctttgtcgaactgttatttgatttggttttgcattattaggaatggggcaatccaaattgggggtatcaacaacaacaaggtcacacccctcaaggtttgctttctctcatcgccatctatgttattatggatttggtttctgactatctcgtgatcgcagctaatagcaacgtcgaggactgggctgtgaaagccaaagaatgggcagctgcgaacaaggatcagcaatcacagcagtctgcaccgaaccaacctagcggacaagtctaccagcagcagtatcctactcatggctatcaagattttcatcaacaggcagttccaggagtaagctatcagcagcatcagcagtttccagttccacccacaacacagcccgagagatatccaaattacgcaacaggaaacgagagctttcctggagttggattgccccaagaaaacctgcctaccagttctgcaattcatcagcaggaggtaccttatagttattcttctgtagcaggtaaccatttacttagaacatagctcctagtcaagcactctatgtgggtttctttgtaactcgaaattccgcgggtgtcttcggttcatgataaatcatgtgcataatgatgtgctgtgtaatatatgggtacaagctcgccagattaacccatagatcctacgagtagattagccattactaatcatagttcttcttgcattttgctccctgatcagtgtgcctatgtttcccaattctgttggtctagagattggtaactcataagctctgtacaccttcagaacttaaacttgttactctgtttgcaggtaaagaagagtctggaaatacaacacaacatgaggtgcatatatcattgcctgatggtgggggacctgttcacacggagcagcatatgcaatatgcatatggagatcaatcagctgctccacctagtaactttagtgatcacaatgcatggcagccccataccacaagtggagtagtctatcctccaattccttcatcggcgcaatcaatacctcaggtactctaaagttgtttggttatcttttgtttctgtattagtttggtggaggcaagtttgatgtttactctctttgcagcatgactcatctatggccatacctcctgtttcgggtcatatcatgcccccatatggaaggtttcccccaccaaatccccggcctattggacccccatatgcttttgggacaaagccccctcttcaccctgttgcagcattcatggatgactcatatgcagcatcgtctgttcctcctaaaaaggtaagatttttttttttctgaaggagttctgtatcttccatgaattctggctgataatgtgatttccaggctcctgtacctaactggctcaaggaagaattattaaagaaaaaagcagatcttggaaggccttcttcagggagatttgaggagagagaatctatggatgatgatgtactttataaacctcctacgaaagctgatcagcctgacaaaaaaagcttcagcccctctaattcctctgacgaagaagaagaggttccttgaacttttaacacttgttttgttttgacgattcaagcgctcttggtacttaaatttgatccagtaacatcactaagatgcatggtttgcttcatataggatgagatggatgcagctagaaccacagaaattaatatggagataaagcgtatcttgacagaagtccttcttaaggtatgtggcctggtagaacttgagtggctggtctataaacatgtttctgctacagttgacatatgtcttttgaacaggttacagatgaattatttgatgaaattgcaaccaaagtcattaacgaagatgaagcaatagctaaaggtttgttgtggtctccaagatttagttttatgtctttaatatgtggaataactcctgaatgttaccttcttctgtactgttatgctgtgctattcatggttcagatgatagtgtacagcataatcataaattgtcatcatcccttctctccacagctgatccactccacaaggcttcggcaaagattttggtctcggtagaaggtgcaaatacaaaagctagttctggctctccagcagatgtgctaggtcttgctagctatgcctctgatgatgatgatgctgatactgatgctgcttctgacgcgaatgctgatgaaaatggagtggagagtcttggtgtggggtcaagacacaatgttagtcagcagccaagcactgagaaacttcctgaccctgaagcaatggccagtgcgaaattggatccagcagttggagtcaatgctaattctggcaagaatagtaagtcaggcttggaggattattctcagatgccaggctccacgagaaaagatgatgaggcgggtagtaccaaaatatctgatgtaagcgccagctctggacttgatgatgatacttcaggaagcagaaaagagcatcctgacagaactgatagtgataaagatgccatactagatgaacctcacgtgaagaattctggcgtgaaatcagattgcaaccttcgtcaggatagtaataaaccttatgggcaagatttgagtgacgaagtgagtacagatagaagtagaatagttgaaacgaaaggtgggaaagagaaaggagattctcagaatgactcaaaagatagaatgaaggaaaatgacttaaagtcagcagagaaagttaaaggcgttgaatcaaataaaaaatctactgatccccatgtaaagaaagactcaagggatgtagagaggcctcacagaactaattctaaggaagaccggggtaaaagaaaagagaaggaaaaggaagaagaaaggtccagacacaggcgggctgaaacttcgagcaaggccaaaagaagacgttctccaaccagtaatgaatcttctgatgattcgaagaggtggcattcgatgttctacttttagtttgtctgttcgcttttttttgtctaatgctttttctcaatgctcacaatggttctcctattacctttctccaggaagtcccgttctagaagaaggagtgtatcaccatctcctgtgaggtccagaagaaaacgctcttctccatccagtgatgaatcctctgatgattcaaaaaggtgacggtagagtgttctgcttttaaattttttcttttgcgtttcttttgtctaatgctaacgaactatttgtctttcttcaggaagtcatcttcaaaaagaaagaatcggtcaccatcacccggaaagtccagaagaaggtagctttctaaacctattagcattatgagatcactggtgtttcttctatatgtttgttagtctatattagcactagactctgtgaagttaaagaactattgaaagcaaaaagtttgacaaaaagacaatgggtaagccaagcggagtagctagtaagaaaactcaccacaaaaagtatcatatatgttttgattgtatagacatgtttcttcgcggtcaccacatagcaagcattctcagcacaagaacactctctactcttctcatgacaaatccaggtatgtagtctgtttcttctgtcttaacaggtggataaagctggattaaaaaaacaaaagagtgttctatatctcctcctgtttattcaatggaactcaaacctgatttgttatacaggtcgaagcggtcaaggtccagatcaagatccccccacaggcgccatcgtaaatgaacactctagcaaactggtctgagactgtacccgggacaatgttgtgcgcggtggatcacaggattgggttaatgtactggacggacatcgatataattaaaaactataaagtcaccggtttgtgaacgaaatagtgcatagtaaaccgctctttccttagttcttcagaagaaatatccaaagatttttgactgacttgtttgacaatatcgttggttggttaagcgttcctatgtaaaattttgttccctctgaaacattgcattatctaaatctatgtctttacattccacattctaatgaaatcgcattaactaaagttattttatatttttaaactaattaagataagagttgtgttgtgtgtcccaaaaaatgtctgaagtcaaaaatgtcttaattgtttggcgaattgcactaaaaataagaaccctaaaaagtcttactttagtgtgggacaagaagagatgttaaaatctgaaaacaatttcttgaagatgacgaaaagtgttcacatgtcttcttcttcttcttcttcttcttcttcaccattcctcccgccggctttccgcttcatcaccattttgaagttttggtatttctccattttcttcctttttccgttaaagctccatttttttaatttttgtctttattttctgaactttcttctcctcattcaacaattcttctttcgatttcccatgaagcttaaggttccattctcaacttgtttcgagatcttgtgtttcaattttctgaaaagtttttgactttgttgatgactcaatcttacagggtcttcgagctgggctcttgtctatttggctatctgggtttcttctaatcgctctctctttctacggcactcagcttctatctccaacttcactcaatgacccatttagatactctggcgattccattgctactgctgctccaagaatcaccattttcacttctctcaatgtctcctccttggaagaaaatagccaagctttacttgctcttcgttcatggctcgctttgtcttcccaaatcactgttgttttattcactcaacacaacaacaacaacaacaacaacaacaacaaccactcttctgattcttcttcattcaccgacaaatttggttctcgtcttcttcttgattccaccattgatttcacgtaaggctcttctattcccactccatttgtttctatattaactctagttctctgacttgtcatgttctgttgctgattctggtttcacttgttggcttttaagtgtgattattagaagggaagatttcgtcattgtgacatcttggtttttgttttacctgttaggtttcttggaactccatttttacattcgatgatggcgagaattgaagcttatcaatcagatatagctgttctaatggatccagagactgttttactgccagatttcatatctgctttgagttatgctcacgagcttggtcgtgattggcttcttgtttcttcatcagtggaaattccccgtttcccgttccattgggatgaaactagacatttttggcgtcaggacaatgggaaaagagtgagatttagggaggtatggaggaggaaacttatgtttttattgataatgatccgatctgatccttcccctaatcaaattttgatcgcgttgttcttcgtgtcaacagttgcagaagatgataagcttgcggagtttgcaatcaaattctagcgcaagcaaaatgattatggcatggaacaacattgatatgcccttgcactgtggagtgcttccaccttttttgtatcaaagaggtactcataatcaatggatcattaacgaagctatgtcatgtaaaagaaggtttgtgtttgatgccacttcaaccatatcgagctttttcctaggcaatgcagagaacatatacaataggagtgataatgtctcagaacccaaaacgagaaactgggaatatgtaggaaactcccatcttgggcagctctatggttcattgtactctaggtcttatacgctacctaagcttttgaagtgcaacagacgctatatctttgttagcgcttcagagcgttccactgatctgtctattccaaaaggaaagagtttaggatttcggacacgagagaagatctcagcttgtatcactagaactaaatcgcggagcttgaaattagattttgtgcagaaagatgagacagtgccaccattgaagtttccttttgacctggagtctcttctcccattagttgcagacaaaaacagaactgttgttctttcagttgctgggtatagctataaggacatgctgatgagttgggtctgcagattacgccgcctcaaagttccaaatttcttagtttgtgcccttgatgatgaaacttatcagttttctattttgcaggtaaaaaaaatgtcttttgcttctctttcttgctacgttgaacgatcataggtcattagagagtttataatcagttggtcttatgcagggtctgccagttttctttgatccatacgctccaaagaacataagcttcaatgactgccactttggatcaaagtgtttccagagagtgaccaaagtcaagtcaagaacagttttgaagatactgaagctgggctataacgttctcttgagtgatgtagatgtatattggttcagaaacccgtgccctctgcttcagtctttcggtccttctgttcttgcagcacaatctgatgaatacaatacaacaggtaatgatgatgaactgatcaaccagaccaactttgttataaaatactaatgaatttggcttttgtttggttttgcagcaccgataaaccgaccaaggcgcttgaactcaggattctactttgcacgttctgatagcccgacgatagcagcgatggagaaagtggtgaagcatgctgcaacctccggtctttcggagcaacctagcttctacgatactttatgcggagaaggtggagcttatcgcttgggagacgatagatgtgttgaaccagagacaaatctgactgttcagttcttggacagagagctattcccaaacggagcttacggggatctatggcttaaggaagacgtaagagcagaatgcgagaagaagcattgctttgttctacacaacaactggattagcgggagactgaagaaacttgaacgccaattgatgaaaggtctatgggaatatgacgcatccatgaggatgtgtgtatagagatgacaaggttatacaagttagatacttagatgggacattcaacggctcttggtatggtctattggatatagtttatacaaaattgtgtttatttattgtattgttgtatgaaaaatagttttaggaatatgaaattgtaaactgcaaaatattgttggcagccagagatgaaacaatataaaattgattttgattttttatatttattattgtactctccatgctaataatgttgtaagtcttacaaagattgtttaaagtcttatagattatattatcgtcagccactcgaatatctttgaaaaacaatatattaatcgaacaaaatagtgtccctttggtttggtacgtaaggggccctgtttccgtaaaaagcaagtc

SEQ ID NO: 35656 - DNA, 5798 bp, Arabidopsis thaliana landsberg
  unsure (1)..(5798): unsure at all n locations
taacccatccaatttaacaaaccatcactaacctaacaatcattacaaactaaactgtcacaacgtccaaactatggcatactgacaattttttcagccgcatttgtattcactggtgttccatctttcttggtccgtgacttaacccaaacctttagcctcgtcacttcagttgggtctgcactaccagttttctgaaaaacacaacatgccaatattgctagcaagctaagtgttttaaaatttcaaagcaataagaaacataacctaacaggcacataagattaccatatcttctgcaagtctaaccatccctctgcgactacaagtgtgaggaatctggttgcgccttctttccttgtagctatcgcttataacctaacaatgattgttaattagtaactttctacatagtaaatatacttagtttaatcttctccctcaacataccttaaattcagggctagttttgctcttcacaaattttttccactcaaatggagaaacatttttaggtctcagattcatcctttgctggtttgtctttgcttctctaaacttagttacttgccttgatttccaggatctccacaaacatcccatttgcttaagcactgcaaccttttgatactcctcatctagttcaaaccttgccttcaatcaattacagaaaaagtgattattgctgtgataaggaaagatagtcaaatattacaaaaaaaaaaaaaaatgaagtgttacctggacagatttccagagaagtgtcctgatttcttcacctatttttgtccaccgatcaattgtgataggaacgtgttcacggaccaatgcgcctgcatatgatgctaacttaattgagcctttaccaataggctctcccatcatggtgtactccactctaaaactggcatttggatccttagcaatatctttcatcctagttggtccacgttgcctcttggtcttaggttgaactgcatcttcatctccagataattcaagctcgccttcaggttcttccacatcagggtctttatctccttgttctactgttgcttgaacttcagcttctttttctgtctctacattgtttacagcttcctcaatgttttctgctggaacttgattagtttgttctacatctgttggctctattgtacccacatacttcaccttatcgtcattgcatttcttaggagaagcttttttagattgtcttccacgctttttcttctgttgtcccactgtaaatcactgagaaaaaagaaaaaaagagcattaattccattaataagtgaaacacaataacagacagataatgaacacacaaaccgacagacaatcaacactcaaacagacacacaatcatcactcaaagttaaaacaaagtcacttctctcacttcaaagacagacaaaaaatcatcactcgaatgtaaatcccttcacaatcacttctctcattctcagctacttccaagtcaacatcgatgtcaactgttgtgggcaatggcccaatgtcaagagtaacatcgtcactctcttcctctctgaatcttctcgacggacctctcattgcaacatgccaagttgacgagtcatcttcacgcatgtaaaacacttgttttgcgtgagaagctacaatatacggatcccttaaaaaagagacttgactatgattcaagttaataaatgtaaacccttcttcttccttagctccattgccctttactgcctagttgcaacggaataaaggaacatagaagacattatagtccaacaatataatgtctgttatgcagccataatactgcaccaaatccatcacttgtgaattgtcctttgcactagacctacaaactgttgtcgcttcatagaaaacaccactattctatgttttcttgtcaactgttcatgtgtgtaatcgttgcccattcgctatgtaaccagtaaatgaccttgcgcaactacgtggaccataagccagccatttcagtgtttctccatgagtactagaatcaagatgtatctataaaaaaaacaaaaaaagtcaggctcttatatctatcacaaacaaattaataagtgaaagacaattactagcctgttctataagctaagaaacaaaattttgggtgtgcatactccataacagagatgcatcacgtctgcatctcccattagtgttttgtagaagctacaggtgctcactagtaaaaagataaaaaaaaatatgatttagccatagtaattgcctggaaaatgttgaatgaaaagcaattatggcacttactcaacatatggttcgacgacagccatattctggatgacagccaaatgggctattttggtctccatttctgtaagattaataaacctgcctgcagagataggacgccctccaaggatagagttgttctcgtactcagtatttatatctgccttttcctgaatttttgttgtcttcttcaaaaattcactacagaattggatgcactcttcagctaaataacacttagcaatacaccctttagatcttgtagtgtttctcacaaaatctttgaggactttcatatatctctcgaaagggtacatccatctgaaatgaactggttcccctaaccgagcttctctccctaaatgaattgtcaagtgcaccatgatatcaaagaaactgggaggaaaaaacttttcaaacagataaagggtttcaacaatctcagcttccatttccaaaagctgctccatatcaatcactctctgacataagtgattgaaaaatttgcataagcgcccagttgctaccctaggacctttaggtaacaaccctctcaaagatattggaagaagctgctgcattaagacgtgataatcatgtgatttcaagcctgttaccttacagtcttctaaagatacacctcttgctatgtctgaatagtagccatctggtcctttaaaatcaaatagacgtttgcagaagatcttcttctctgtcttggagagagaccaaagtgctgtgagaagatatgttcttttgcctttggtttgcggatgcaagtccttccttataccaagcacctcgagatctttgcgagcattgagaccatcctttgacttcccacaatgcaacaatgttgatacaatagatgcagccacatttctctccacatgcatgacgtctaagttatgccttactggtaggtcctgcaaaacagacaaacaaaatgcattagacattttccctttgtttcaatctaaacaataaaacatatttcaagaaaagagaacagannnnnnnnnnnnnnnnnnnnnnnnnnnnnnnnnttttcttccatcttgataactcttcctcatctacttctgcctcttcttcctcatcctcctccgagtcactagatagatcatcactatctgatcctgatttaacagactccggttgtttcctcttccttgtagattgtttgaaattcccaaaattattttggaaatttttcaagttatgagaaatttccaaaccacttagtattctactctttctccgatgttcagctttaccatcaaaccaagacttcttatttctaaacctatgtgatggtggcagacccattctatgtcccatatagatatgttttctgctgaatttcaaccacatgctttctgaatgtttaccacataaaggacacgctatttttcccttcactttacaacccgcaagattcccataagcaggaaaatcactaatcgtccaaagcagcnnnnnnnnnnnnnnnnnnnnnnnnnnnnnnnnnnnnnnatatgtcaattccccattgtcccacagatggcataaatcatctataagtggttctaagtatacatcaatactatttccaggctgttgtggacccggaatcaacaatgtcagcatgatgttctccttcttcatgcataagtcaggaggcagattgtagtttacaagcaaaacaggacaacagctataccttgtgtttttcatgttgaatggattaaactcatctgtggaaagaccaagcctcaagttcctttcctttgatgcaaataaagggtattttgcattcatctgatcccatgttactgaatcaacagggtggcaaagtttgccatcactagacttgttactgaaatgccatcttaagtcctttgccatttcctctgttctaaacattctcttcaaccgcgagattattggaaagtaccataatactttttgtggctcacctttcttgacttcacccgtctgcatattaatctttcaccttgaagcattgcatttgggacaattttccagcttcttgtacttcttcagaaaagacagcagtcatttacacacgcatgtatcttttgatatcacatatcaaagctcttcaaaaacttcttcacattatacaatgatgtgtgaagcacattgtccttgggaaacattttgggcagcgtctcaagaagctcatcaaagctcttgtcagaccatccattcttggtcttaagcctaaagagagacacaattgctgatagcttgctgtggtttaaacaatcaggatataaaggggtttctgcatctgctagcttggctagaaactcatcttctctcttgtcctcaccctttgcaatctcacctaagtcaaccactggattgttatctatatcaccattagaagccaactcttggtcattgtattcagcagctttgtataactcatgaatttcctcattccaatgattgacttccctttcaccttctccatcagctactgagtctccatgatggtaccaatcactctgcagcttgtaagcctcatccatccctctcgttacaagatgaaccaccacatcactacttaagtggcggtacacattatgacagtctttgaatggacataatatcttatctatatctcctaaacccgcagccacatcaaatacaaacttccgagcacctctctcataaccaggatcagctcttcaatgaagaatttaagttgaaaaaaaactcaagcaatgttgtaaaccccaatttaaattaaacctatctatataattttattcattacctgcatagatgcacccatgacttgtccaacattatatgttataagcttaaaaaccttattaagatgaattgaaagagaacttataatcaacaacagccacagttaaagagcaacaaatcgagtgagagaacttatcagacaacttatcatgaagggacaatttaaactgaacacaatgctaaagacatactaagtattaagcaccttacactatctccgaaacaagaacagtggcagcaagctcaacaaaacaacacagtggcagcaagttcaacaaaaccaaaacagttacagcaagttcaacaaaaccaaaactgtcacagcaaaaccaaaacattcatacaatttacaataaaaaaatcacagccacattgactaacctgtcgtttgagtataacaaagccaagcttcagttccaaaatatttcaatcaccaacacttgccaaaaaaatgcagaatcagtataagataatacaatgtagctttaaaaaaaaaaactgataacaaatcgattaggcaaaatctatatcacaaaacaagatctttgtgaagagaatgtggattcaaatgttaaacagacatgataatcgcagaagttttttgtttaccctaaattttaaacaaaccgatgaaccctaaattcaaactaatcgaagaaccctaatttcaaattgaaaaacaaatatgatgttccttagcaatctactgaactagatcgatagtagagagaatt

SEQ ID NO: 35657 - DNA, 875 bp, Arabidopsis thaliana landsberg
taaatcaaaattaaattcgaaaattagagaaaataacaaactaaaatcgaaatgatattagttaactttatagttaatttttgagataaagattatctactatatatattaaaatctaagaatataatatctaaaaatattgtaaagtctatcctttaatatttgtcaatgttatataaaacaaaacaaaccggttttgagaaaccttaatattcgaatagagaacccatccgaagccgccacattgagactgcaaatactcaacggaaaaataacctccaacgatctaggaagatgtaacccgtacgtagatagtgacacaagatctgtcgccatcccgccactgtaaaaccgctttggaggaggaagaagataaccgagcttgagtttgttgaagaggcttcagtcttagttgtgagagagaaaaaagcggtagggagtagataaggaaaccatcaacggtggcatagcatcgtcggaccacatacgatctctcccgtcactgactgccctgtgagaccttatgtgtcgccagaccccaaacctaactatgaccctctttcgttcgttgccgtgaagtctccatcttccacactgcatcgcaactccgccggtaaagctcttatcgtcaaagtgataacgaaaacaacatgttgaaacagagtaacacaaaaacaaagtcaaactgaatattccgattgataaactagatataacgttcctagaaacgcgttaccaacgtctcacatgcaagagtctctacgagagaacctcctgccaaccatgacgaagagtctagagaattctagaaagattacactcagatattcctgtgtacaagcatgagcgtacatgtgcccttaataaagtaaaag

SEQ ID NO: 35658 - DNA, 2754 bp, Arabidopsis thaliana landsberg
  unsure (1)..(2754): unsure at all n locations
tttggttttttttgggggattgagcattcacgtagcctccaacttgatgacgtcttgcgttagggatacacaagtggttgatgaatgaagctaaagtccatagccctacaccgtatactctttttcttcccataactttacctaaccgcatcttccaccagagaattcacatccaagatactcaacaacttctctgtatccaaactctgtttccagtcaccacaagtttcaaatgcttcatcaggtctaaacagagctatctcaggaatctccagactatcttcaccttgtccagtggacaaagcggagacaactcgacgagtcctaccgcattttctcacggattcagtaacctcttcaacgaagttcttccacatgatcaactgcgctttttccccacactctccatttcctaagatccctctctcaatcgcaaccgcctttgtaactaaaaccaaagtaccagcaacaatgttcttcgtagcaaacaatccacgcccactaagctcagatttcttaatctcaatcgacccaataaactcagcaagctcaggacatttcccacgaaactcacttaagatccaatcagacaaatcaaaagctccagtctttgcctgaaactcaagcttcttacatttctctatatacacagtaacagtctccaagttatcactcgcttgtggatcgagcaagccgtttaaaacattccaaagccaaagagtatttgctcaatccaagcaaaactttacctttacaaagaagagtcttgaaatgagtcttctcgatttcaagtgcttgatcacaatccctcattgcttccaaaaaatctcgtagcctagctcttgcctcagctcgattacatagagccaaacagagagatttccggagcttagcaatcgaatccggatccgggtcggatccaccagtacttgagacttgcctccgagagagatcgatgaactccgtgtaaacttttatagattcttcccattcttctcgaagaagaagctccgttgctttagatctcaagctctgcaacagctccagtggcccgtctctatcttcctctagctcgaattgctctcctctcattgctatttctttgagatcaattagtaaaaaaagttttggattttggctttgatttacgaaatttgtgaattgttacttaaatggtagagttttgtaacggtcggatttgccttttttttacactatggttttgtccccacatgatgtaacggtcatgaactacataaataatcagcaaaaattcagaatttgacattactttagctgattaattagtccattctattaaacttataacaatttactaattgtaatttagttagccatatgagctgttttttaaccgcttaacataaatgtgtatcattaaccaagcaaaagtgtctttcacaagtgaatccctgtttgttttgtaaaactagtgatcacattgccttgagaaacagccaagcctatacctgttcttccaccattaccaacacctctataatacaatctccattgatgatcagaatctccatccatctcaatcaaatatggacacccaactccttcgttatcccacgcaccgccttcaccaaccgcgatcaccgcttcctcgtcttgcactcgtttccaatctttaatcccgtctttcgaaaccgcgaagcctatgctcgtcttcccggttctatctacaccttcataagccatcacataactctcatctctcttgttccttgtcacacaaggatatcttcctccaagctcatcgaagaaacctaatccatccttttcggattttcttcctcctaagatctttcccaattttaaccacttgatcccatctatagacctcgccatcccaatgcagaattcaccggttttctcatcgaatgaatggtaatacatccgtaaatcgccatctccatggaaaactacatgtggagatgcaatatagagaaagtcccaatctttttcagacccaacatcaaacaatgccccactatgatgctcaccttcaattctagcccaatgcctaccatcttgactaatagctaaccctggaagtgacctataataaaccctagatttctccgcattctcatcacaaaggtgaaacctttccggatttcccaacacggacgtaaaatcttgggattgaaactcaacagtctccttagtgtagccagtgtaatacatccagtaaacagagctattagctctgactttagaattcgacattatcacaacctcaccgggtctaacacttgcagtatcaaatccccaccagtcttcaccacagctcataaccaaacccacatcttcgcttgactcaactttaccatttcctctttcccaatgaatcccattgttggaaaccgctaatccgatagaatcagaaacagggttctgctttgagcttccatggtaccacatgtaccatctctcttcgttatcgcttagaaatctcttcacaaccggagagccaatctcctcactgtgccacgaatctttagagacgccaagatcaaaaactagccctctcttaaagagatcgatgaatcttgacctgcttctctactttttgtggtggaacatcttgtgattgtgagcgnnnnnnnnnnnnnnnnnnnnnnnnnnnnngtagggaatcgaagtgagagagttgataatcgcctgtaaggctgaactgttctcgaggcagtgacaatggagggatttacagcagtagcttccatg

SEQ ID NO: 35659 - DNA, 3544 bp, Arabidopsis thaliana landsberg
tatccttgtgccatacgatctcttccaagatgttacgaggcgtgtttccctcgttctgaagccggaactcaaaaggtccaacgtaatgcaatggaggtccagtaggtggtcttctccttatccttataccttgactctcaactacttcattctggtacattcccacttcttgctcacttactttagcctctaatgctgaatcagaaccttctgtgattccagactaacaataaaacaaaaagctacttagttctcatttctcaacatgactacataatttcttcaaacatcacagattcataaagtgcacaaagtctacaatttttcaacaagcaacacaaaaacgattccaggatactagagaggacctacctaacatcgattccaaactcctgaagctgaaaagctattgataccaactctcgaatcatagattttcatcaattttgagaatcaatgaatcagcactgaaatttacatattgtatacaattctgaggataagatagaaacaagaagattgaattggatgaaaaagtgaaaccttttgagcacgaagaggagcataagaagaaggtctggtaagtgtattgtggaggttaaacggagagagacgtcgttgagtggcggaggaagggaagggctgaagagaaagcagtgcagcttccatttttttttttggtttgagtcttcttcttcgctctctgtctctcgccgggaatgctatttgtggagtggaggagagacttctgtgcggcggataatcacaaaagtgggtcctacttacacgttatttccaaacggccaaactctcttatgaagatatatatttttttttttaaacggatcaggcctaagcccattaatccctgaagttgagctcttaccagtgggaaaatgagtcaaatgacggacagacaatacaattgcataatccttaaatcatgtataagtttttttttttaaaaaatttggtgatttgagggggacaaatgttctcctacttcactgaaaaaactaaaaataaattacaattttaaacatgtttcgggtatatcgatcctctagaatcattcaacaaaatcgaattaatataatatgggatagaattagaaaaaaaaagttttaaagcaacaaaaaaaagtatattttgctaactcatttataaaactgttagtttttctatagatatataaaatacagactatccagtccttcacgatagagccatactataatcatgttaggaaagacaatgaatatatgagtcgtctaatccatgttttgagaaaaccaattataatttttgagtcgatctcaaactcaattcccgcactataaacatcgcaaactaatgattaagagataatcaaaaaatatatatcgaagatgtttcttattttcggtaaaatctttttattggtagtcgtacttgtaactcgatgttggtcagctattgagtattggagtttacatatgtgtatatacgagaaaaaactcaaaatttgaaggactacaatatgaacaatgctcgattaaaattcacaacccataaggccataagtaaacaagcgctttgtaaagtcatccaaacaattgtgaagcaaatgcaatgtgtacaattttgataaataaaccaacgtatcctagtacgtattcacttattatagctaaatgacacatgttcacatggaagttaattattgatatcttatagtagagaacgtacgtagttaattaagcagaaacataacactataagcacatttatagtctaaaacatgtagaataacaaactctttgtaacaactaacaaagtctcaaaatgtttatggcacaattattttgtgggaacaatgatccctgagtctgcgagaaggcgggatgaggggagcgaagataaacatctgagggatgcattcagtatcgagacctataaaagcatggcagcaagaaggacctacattcccgaactgtccatttgttatcgatcggaaaatttccgggacacagtcgggaataacttctagtgatgaccaacaatctagttgggaaggttgtggtgatggcaatggttgagaagtagcgaacactacgatgcatacaactggaagaaggaagaagaacttgttgctccacattttgattagagaattggaatgatttattgagttttatcttgatatgaatataatagtagtcagtgattggatttatataagatgaaaaaatgttaatattttaagttgcgtattgtgaaatttttcattgtgaggaattatggaggcacttttgggatgaccccaaataaaggtgacagtttgttaagttttttttttttttgatgaattacaagataagctagattaatattgttttctacacgttgttttattctattgtattataagtgaaataagtaaatgatatattttatgagaaatttcactttccagaatttcttgtaggattaggtaacttggaaaagtactaaaaacttagcacaaggcagaagggggatatagtggaatgggttctctttgggtcatatattagtatagagaaggcccatcaagatattaatcattaaggaggcccatccgactgttgcgtgttataaaaggagaagaacctagttctcaagggatagagattttgtttgacctagttctctccgttcttcgtaccgtgttctcaaagtatagagattttgatttacatagttcgctcggttcctcggacctagatctttcgggttcggattgttacttcttcgagtttgaattgttctgaacgtcgaaacccttatttcgatggggactccggaatttccagatctagggaaacactgctccgtcgatgtttgcacgcagatcgatttcttgcccttcacatgtgatcgctgccttcaggtctccctttctccttctccgttttctttcgataccattccaatgccatgatttttctgtatagacaatcatcgtggcttcttctaaatctctggtcaattatatgatttatacatgatttcgtctctttttatgttcaaattcagtagttgatttgaatctagactaatcgtcatttcgaagaatttgatgctaaacgatttgaaaagattcattttgttttatctgaatccggagaggaagcgtatatcaaatcttttgaattttttttataaatttattgaaggtgttttgtctggatcaccgtagctatatgaaacacgattgtccaaaaggaaacagaggagatgtcactgtggttatttgtccattatgtgctaaaggagttagattaaaccctgatgaagatccaaacattacctgggagaaacatgttaatacagattgtgatccatcgaactacgaaaaagctgtcaagaagaagaaatgtcctgttcctagatgcagagaactcttgacattctccaatactattaaatgtcgagattgtagcatcgatcattgtttgaaacatcggtttggacctgatcatagttgttctggacccaagaatcctgaatcgagtgtctcctc

SEQ ID NO: 35660 - DNA, 1918 bp, Arabidopsis thaliana landsberg
agcatagtatggaatagaagtcagaagcggtgcaggtgatgatactgatgagtttgtcaaagacaaggcatgaacagctgctgcaagcaattgtgtggtaccagatccaaagattacgaatctgttatctgtaactgcatttcccactacactatgaagttttctaatgaccttctcgagctctcgagacacatatgtcccatcttcataaatataactcatcctgtgccatcccgagaccaaaaccgcgcttctctctgcttgtcgcatccagaaaggctccaagaacaaagggtctcctcttcaaaatccacaaaaacaacaataacatttttattccaaagtttacagattggtttggtcattatgatcaagataaaaagttgttgcatacgagttagcatcgacaggacaatctttgagaagaacagagcaatcttttcctatgtagcaattgttgcactcacaaggaggtttctggccgtcaaggacaccaagaccatccacaaaagctctgccgtggcctgagcatgaaaaagaggctacagtttctgcttccgctgcagctctgttggtccacgttggattccatgtgggtgaactataataaagaatatgaatggtgaatacgagattcaagatgattgacactgtaagaagaagtagcttcttttgcatcatctttactttacctacaaaaacactttaagattgtaacttagtggcaaaaagatggagggcccatcgataggtgaattattgtacgactattcaaaaagttgacatgtgacaatgagggaagaacaagaacttagtttaaatccaatacgtatttgaataaaattacatgtttgttcaatagccttacctatttcttagcaactaatatatttgttttttatgcatatttctgatgagatttggtctactctgaaagacaaaaaaaaaaaaatgttatcattcttttgttgcttgaaaatttaatctcacgttgaccatgtagtatgtaatttaggcgtgggcattcgggtacccgttcaggttcggttcttttttttcgggtatcgggtctattcgagtaggaggttgagaactattcgggtattctaaaaattcggttcggtttcggttcgggttcgggtcggttcggttattttagtaaaaatataaaaataatcaaaaatacccaaaatatttttgggttcgggttggattcgggtattttactcatatatactcaaatctacccgaaatacccaattacccataaatatattggttactttttatacaaatataaccaaatgtaaccaaaatacttaaattacctaaaagaaaactataacatttgttacttttatcccaaatatatccaaatgtatatgaattactaaaaaaatctagtatattcggatttataattttaattttaggtgtttaaggtattacaaatatatatataactaatatttttaggttacatttgtatttgggtacccacgggtattacattcggttcgggttcggttcaggttttttcgggtagtgaggtcgaggacccattcaggtaaaagaatgatcaaggtactcaatcaatcgtatccaaaagaattttttcgaggaaaagaaaaattctagggaaagccataagtaagcatagggacttgaaggaatgcaaaagtccatggaaaacgagctaagtattttcacaaagtattgaccagagccattagatgtctagcaagaatttccaaaattcagataattgtctaacaacagggaaacagataggaaagaagaaaatgaagattttaggagaataagacatatgagattatcaaaaagaatcagtgaaccactcctgctcgctcttggccttggctacttaggtttagggtcaagatatttttgacgaata

SEQ ID NO: 35661 - DNA, 2582 bp, Arabidopsis thaliana landsberg
gtacatgtgtgacacgaacgacttcaccgaatccggcaccatatttgggtcgtacccactctccctctcccccggaccttcctcatactcattgctgctcgccattctcgccggatcaattcttagcggccgcaacaatgttagctcttaactcactaccaccgcctagggtttccttattaccaccggttctatcatccggtttcgtttccttattaccaccggttctatcatccggttatgtttttttataaagtcattttaataaaactttctatggttcggaaaaaaaaaacttcacataatcatcgctattctctctctctctctctctctctctctctctcgctctcatatttgcaggtaaagcttcgttgattcgtcctctttatgttcaattatagtttcgcatccctcctatgtctttctttctagatcttaaagcagagtcattgcttaaccctaattatcactgttcttgtataaaacacttttcacctaatcattgagattgttacgggatctgataattgcgtctgtgaattacaagaaattagggtttatttcttcttgattttagattgatctttttgcaggttgacaattcgttctctttgggaaattagagatgcaggtaaattgcttaattttttttttgttttgttgcaaattctctgtgtatgtttatgatttgatttgatttgattgatgtaataggcatcaagagcgcgactgtttaaagaatacaaagaggtacagcgagagaaagtagcagatcctgatattcaattgatctgtgacgataccaacatattcaaatggaccgctcttatcaaaggaccttcggagactccttacgaaggcggtgtttttcagcttgctttttctgttcctgaaccttatcctttgcaacctcctcaagttcgattcttgaccaagatattccatcctaatgttcatttcaaggtttgcatctctttttataacaaccttctcctgtgataaaaggaaacgcaggttttttagttagtacttgggaattttgtagacaggagaaatatgtctcgacattctgaagaatgcttggagtcctgcttggacgcttcagtctgtgtgtagagctatcatagcattgatggctcatcctgagccggacagtcctcttaactgcgactcaggtacaaaatgctagtttagtgttttcaaaaatgtaaccatgggcgttcgggtattcgattcggttcccgttcggttctagtttggttccgattctttctgttctcgattttaggatccatataggaaccgaaacagtttcagttcggttcaggttcgggttcggttctgaagtttaggatccattagaatattttatttcgaatatttcagatattttttgtctttttttccggatattttggtgtttttatatatttttccttatttgggtatttttgattattcaaactaaaaataactaatatctttggatatataatcatatttcggatacgcaaaatattttggttcggttcgggttcagttctaattactttggttctagaatttaggatctatttgagtagtttaccatttcgggtcggattcgggttgcttcagttcggattcggttctttcagtttgattattatgcccatgcctagtttttatagtaagcaactgttttttttttctactgacgcttttgttgtggttgctatggaaaaaagggaatcttctaagatctggtgatgtgagagggttcaattcaatggcacaaatgtatacacgcctcgccgctatgcctaagaaaggatgatgatgatgatgatcctcttgctttttttttgtttttttttttgaaatttgtaatgatattgatttgcgagagtgaatacattattaacgagaagaagatgattcttctttattagttcacaatattacaatctgtcaagttgtcatatcttcttgtttaaggaatttgtcaaaccagtctgatgattctttgatcatgaaactcgtcgcttcgtgtccaactccatcttctgctttgaactgctctctcgaaacatcaaaagtttttctttttcaattctctatctggttgcaatagtgtttaaaggttagatcagtgatttaccttgaagtttccaggagaagctgtttccttatacgccttttcagctctctttaacgcaagttctagtccgccaagaggacatcgaggatcatttgcgcctgcatatgaaatccgagaaaacttgtaagtttgttggtagttagtgagatcatacatatatattgattgtgctcaccgttaaggatgtaaagaggccgtggagcaatcactggtaatgagtacggtgaatcaaacttcgaagctaggccaggagctattctgttccacaccttctcgactagttctttgtcgattatgttctttccgagatcaatccttgcttctggaaccatagaagaagaaaaaaagcaaaggaattaattataatcctcatacttattatattgaatcatataatttgtatgtaattcaaaatctgaccttcaaataaaggtttgat

SEQ ID NO: 35662 - DNA, 868 bp, Arabidopsis thaliana landsberg
  unsure (1)..(868): unsure at all n locations
agatggattaaaaaaatcaaatatacccgagcttccagagttgctctaagtaaattgagaacgcaagccatgaccaatctggggaatatgaaaaaaactcaaatatttatcatttacatacaatgcacactaaatacatatgaagattttaactagtttagtataagataaaaaacacaattttccatgattatttcattaaaaatcttaaaatttgctaaaaacaatcctgatactttgcattattatcattcatattacgttgttttacttttcaaggaactgttttatctaaacatgtataaggttatcaaatgattaacgtcaaatctgaaacaataatgtaaccaatatggaatttcgccataacgtggatacttggcagtggttacttggcttttcctttattttcttttggacggaagcggtggttactttgtcacacatttaaaaaaacacgtgtttctcacttttttctattcccgtcacaaacaattttaagaaagatcgatnnnnnnnnnnnnnnnnnnnnnnnnnnnnnnnnnnggtcttcatagtaacgctacaacatcaaatatgtggttgctctgacatcagtcgggaaaataaggatatggcgccattggccacatctattggggtcccaacttcctttcacaaaaaaattaaattgggtgtcccaacttttatctttgatatagtgacatgagtatcgggagcattggacaatggataaaatgagaactaaaaaaattctggttaatttttgatcattgttatttaaaaggttattttatctataatccacccatattgatcagttttatttaaatttgaatagctaccgctcctcgagagagatcctcat

SEQ ID NO: 35663 - DNA, 1391 bp, Arabidopsis thaliana landsberg
  unsure (1)..(1391): unsure at all n locations
agggctggtacttatctaatacaaactaaaatatttaaaataccacaatcatttttataattacagaaaataattataaccgcagatatggtatacttttcatactaactttaaatttcttaaataaaaaaaccaaaataattacagaatatttaccatctaaacaaaaacaaaaatgctaaaaatatatataaaaccccccaccaattcagttaaataaatttaccacccatcatcccatataataaaccagacttatcaatctttagaaaaaaataaacctcaaatgctaatatatagagtgtacgaagttccaaatattttaaaatctaactaaaacaaaatataatacattcctatataattctttaataattaacgaaaactgacaaaaaaaaaacattaattgaaggtcaaaattattatattaattaatattctgcatagacaaatgccaaaacgaaaaattaaattattattaaattatcataaacttcagcaggtacaatggcccaattactaattaaaaacactggtacaaataaaaaacaaatccacatctataacanaaactgtaagctcaaatctacataaaatagataagacgggcctactatactaaaacctgaaccctaagtcgtcccatcccttaccatcatctctatctttttttagttgtatcgcttcaggttactccaataaataaaaaccaaaacgccactgctaccgaaactactccactacctcatcttcactcccccatattcacgttcaattcacattaaaaaaaaataatggccactaccattcccatctatttaggtttcactataaaaccaaatcttcgagaggataaaaaaaaacagacttcttattacaatccaaacatggcaccacataaagctcaacagtctctccagccatacacctttcagaattttgatgatattgatggagatttctgtcaaaaagaagtcttactccgactaattcatatctgggaaacccggaatatcaaaaaggcagcatattgatgggttttgattgactctgacgtgtgtttattgtatgctgacatatgcaaaccatcatgacatggcaaacagcggtccaaggattcatatttgcaaatcggctataccaagagggtcttaagtgcagctccatttacaaactcaaaaatgtgaaatggtgtaatacttcaaatgctatcaaatatctcttcaaatatttcataaaagaagtgttgtagttcaacaatttcaatcgacaaaggcaaaaccaccacctccaatactcaagatacaacaagggttgaaaaggaaaggattgtagttcaagagttcagtatttttacatttctgcttgttagctatgtggctatacacaaa

SEQ ID NO: 35664 - DNA, 2081 bp, Arabidopsis thaliana landsberg
  unsure (1)..(2081): unsure at all n locations
aggtcctgtgaaaccctagacaaatcgcaggtaagttcgactgtagaattacacactgatatctcaatttatgggggattgggtgcttttgaattgagaccatcgaatcccattgtttctctgatgcttttttaatctcacaaaattgttaattttgatgatctttgagcagagatgcaagattcaaagattccacctttctctgaagcaaaaagaatgaagattcctactccaaaacaacccttgactcaactaccaccacgtatcgggaaaaaagtttcaaatcggagcaaatcgaaccaggttcatgcgatttcacatcaacttgagatgtctccaaattcagattcatctccaggaaacgagtacagagcactgagacgcaagtatttgctgctagaggaagatagtttcgcgttggagagagagttaaaggaagcagaggatgaggttaaagcacttgaagatgagaaacttgagctcttggacaaactcgttgttatggaaggtttagttgatccttgattctatagcttagcacttgttttatttgccacattcatatgtaaaaaatcgccttatctagtaacattgtttctgcttatataacttataagcttttgttgtgtgttgagagaattggagatggtaaagaaaactgttgtgttcacttgttgtgtctttcgagttaatacaatggtttgggagtaaagacttaaacttgctacagtttttactagattctagtgctaaatttaaccaaaactgtgaccaaatgtcgtttatttgcaccacgtgtccttcatccacaacagaatgatgatggattagatatttctattcaaaaactataacgtgtggctgcaaatcgattcaccgcttcagactctgttttagaccaaagtcgagtgagtgctttcatcttcttcttaagcatctatggccgcgtctctaacatctcttccgaccggtttttgtcttagccatggtgatgaatgttgcaaccgttcacctaccaaatcaccatttccaggccatcatcctctggctgggaggaggaagggtcacttgctccattacgaacgtagtacagtgaggagattggttgtgacggcggcgacggagggatctaaaaaatctaaagaaagtgaaccgtcttgggcgaatcctgactcagatgagccacctccttgggctagaaacgaaggtcgttcttctacgtcccaagagagctttgaggttcctttctttgtttatctgctagcttccgcgattactgccattgctgctgtatgcttcttcttctctctctttcactccttttgttgtttgcattgctgattctcatatcaaagatgttatcttaattatgcatcgtttggtcactgtagattggttctgttttcgagtacacaagcaagaatccagttttcgggatcttggaatctgacagcatcttttatactcctgtgcttggattctttgctcttactggaatccccacttctgtgagttccttgcctctctcttttcggatttatccatttgatctgtttcagctgaaaaaatggtttttttgcgttcaggtgttcctatggttcaaatccgttgaagctgctaataaggaagctcaagaacaagataaaagagatggctttctttaaaatccttttgtgtgattctgcaactcatacagtgatgattgttgtctccacatatactttgaatataattctgcatttacaaaggagcttgcttctgttcactgtttatcacccgctagattttgtttgtaatttcaacaatatgccatgttccaacgagtaagtgcctgaaattcgatgatcagctgtcctctcttttatttgcccctgtgaaagatatgaatccacaaagaattcgatatgccnnnnnnnnnnnnnnnnnnnnnaagctgatggtaatgtcaccatttgttcaatgagttgatattcagatcaacaatttgttgtggaaagacattgcctgctttcatttgttggtaggagattggagtcaaaatatcagttgaaagttaattccttggcgcttagagattgtgc

SEQ ID NO: 35665 - DNA, 1719 bp, Arabidopsis thaliana landsberg
ggttaaaaaaaggaccaccgaaattttgaaacacatccaactcattttcatttgtctgatacttgaaaccacttataaattttggttttatatgactctagcatcatcacaattatcttgcctacatttagatgtagatttgttaatttactctgtcagagagaaaaaaaacataatgcagcaaaataagatatctgatcaagatctgcgcacaacaatgtattttgatttattttgatgaatgaattgagtgacacatgcatgaatatgaatggtgaatctaaaacttattcgttttttaatttaacaagttcaatatggaacgtccattaatagtattttttaatgaacggccacaaattagttttaatatatcttgactttttgttttccccaatttatgtagcaaaaaagagaaaataaaaatttctttaaccaccatcatattattgcaagtcatgtgaaaaccagtctctcgtcacttgtacattatcaagaaaatagctattaaaatccatttgttctctttatgttatgaattattgagttcacaaaaaaaaaataaaaaaataaatacaaaatgtaactttgtaaatatatttttttttactatctaaattaatattgctatgttttcagaaaaactattgtgataactaaataaattatacacacatacactgatacacatagacaatatatagacagacacacaattaaaacacacgtattgaattataatttgcttcgacgggctaactagtctcgtgtctatgcgttgcacatagtatacgtatatgcatacaattatatatagatagtacactaacacctaaactctctttcatattcaataattctaattttgaacccaaaaagacaaaaaacagaacaagaaaaagaatgtcgaacagggtccatgaaaggagcatgggaatggaggaagaaggctctactaaaaacatgaagacaaaggttcttgaacttccaacaaagatcaagaagattctaaagaatatatggaaagttggaaaagatgatccaaggagagtgaaacatgctttgaaagtaggagtttcgttaacacttgtgtctttattgtatctcatggagcctctcttcaaaggcattggaaacagtgctatttgggcagtcatgaccgttgttgtcgtcctagagttctctgccggtaattataacatttaattcaacttgtaggtttttttttttttttaatttggattcaatcaagaatccatgtgttgtataatattctcatgatccatttgcgagaaattcctagttcatagactagtttatatcgggtttagtctgtcgtttagatagtgtaaataaaaaaaaggaacgcatgagaagattatttgctcataccaatagctaacaagatgaaagcgtaagcatcctgtgagcaaactaaaggcatctaaagagacctgaactagagcgagataaacctgccagtgcggccgtccttcacatgggcctaaatcttacgtttcagggccactggcaccttagatcacaggcaagtttcatacaattcgcggctaaagagtaaaactttatgttgcaaggtaccagaactggcgccacagagtcaagtagaagtgtgaatacaatcctaatgattgcacactcaatccgcgctggaacaaatgaaaagaatgcgaaacctaacacttgactacaccatgaaac

SEQ ID NO: 35666 - DNA, 1368 bp, Arabidopsis thaliana landsberg
  unsure (1)..(1368): unsure at all n locations
agagaaagaagagaaatgttcttaaataagaactttgggtatattaacttgaactttgggtatattacactttgtctttttttaattggttcattttttgcttttaagccaaaaaattaatatataattaaactagatttaaatattaatactttaaagtttagatatttctttgggtatgtaaaaacaactgaaagttttctatacgtagtctaaaatctttaatttccctatttacagcttataattagctggcaatgcaatgaaatattctaacccaataaaagaaaaagtattctccaaaaggtataatatatgcatgatttaacaaattatctctaaactaatttattactgagccaaaagaggaaagaaatccatctattaatgtataaaacagttattttatccaaatttccttttaattagaatcaacttaatgattaaaaaaaatcaggtggacctgcaggccatgacaaatgttcttttaatatatttattaaaaaagttcatataaccaaatctgagatttaaaaaaatatatttttctctaatactctactattatatattttcatttgttattattgtaagtatcaaatatttttactaaattaatgaatataaattttaatgatattttattatcttattatattggnttacaaaccttcttggtatgttctcctttaatgtatataggtagtttacagatttttttagaatagaacacatatttcgtgagattcaatgtacattgttgtaaaaactttcaagcgttctatttatttcgtttgactcatgttatattgttttcggggtttccgggataaacaactcttttgagcttttatatattcatgattttacttttaaattgaagatggatactctatttaaaaagaagaagaaaaaacacttcaaacactaaatttcatagtttataaacaaaactttaaattactcttaaaagaaaagtgagagtaatataggaagataaactattcttagtaaaaagaaaagaaaatctattcttagacatagctttaattagtggcctcgtcaattaatgagacagtaaacacaaaacaaatctaatgagtccagcaacgtgataagccacgtactgagtaaaagcacaattttcatttctatataaacaagacagtcttgggccaagaaactaaacaaacacaaacaccaaagaaaagaaaaataaagataatgaggacgaagactaagttatcactcatacctgatagacactttcggagagccacattcaggaagaggaatgcagggataaggaagaaacttcacgagctgacaactctctgtgacatcaaagcatgtgcggttatctacagt

SEQ ID NO: 35667 - DNA, 6733 bp, Arabidopsis thaliana landsberg
  unsure (1)..(6733): unsure at all n locations
catacacaatatatatacacgatatatatgtttctctgaaataatgtgtttctcagaaatagcacgaaatatttataaaaagcatgcaattctcttatagatcgcgaagtttaaaaaaacatatagaattgttacaatattacatgggtttttattggataacatgacaaatatttatttatttcatgagtttttattggatagcatgacaaatattaatatatcagtgttaataacatgttttgttcttaaaatacatgcattttaaaatcagacatttgttttaaaatcaaatctaatctcttatatcacaacgacattgacggaaaattcaggtaaaaagagaaaataaagaatgagagatagagagatttctatggaaaaagaaagagagaacatgtgggtgaacaaaataaaaagatatgatgatatattttatgagaggtggtgaagattattttaggagagggagagagaaatagaaaaagaaaatgacatggtgaatctgaagaagatgaattgtgttaaagatgaagagagaaagagaattccatggctaaagtctcgtaaagaagatgaaaaagaaacaaaagaaggaagaagaaagagaaaggataaaatagactaaatattgccaaaatttctgtagccgacaagtactatttagtccaaggttattttgtgtatttttttcaagtcaaaggttatttcttacatatactctagtttatatagtagtggataaaactagtcaacggatgatatgaaaaaataagtgaatttaagatcaaactcataccaaaaacgtcatgtttatcattttttgttgttgttttttccacacaggtttatcatccttatcctatcagcgaataatagaagaaaaagtacaaattctctaataaagcggtaaaagcgtttaagacgatgaagaagaaaaaggaaacgcctccaaatcaccattattgtccgaatcttcttcgcgtctctcaccaacaccacttgtcctaccttcttcttcacaccaaatgattctcccgtataatattcatcaaacccagatcatgttttcatcatcaatcatctcttaaactcctctatagatctcaccgcatgacgttccgaagtttactccaggaaatgcggtctaggccacaccgtgtagttcacgccgccgcctcaaccgctaatagttcagaccctttcagctggtcggnnnnnnnnnnnnnnnnnnnnnnnnnaatcctgattagggttgagactgttgacggcggcgattggccgtcgcggcgaaacgtggtggcttgtgccggcgtttgtcgtagctggaggattctcaccaaggagattgtagctgttcctgaattctcctctaaattgactttccctatctccctcaagcaggttctctgtaaattttgatttttgagtataaagtgatcgaattgaaacataaagttagctcctttacttcatctcataacatatgacaattcagtagcgtttgcggtcgcgttttaagtgttcttgtgctcagctcaacaaaagcttttagtctctttgatcattgatatatagataaacagtttcttggttttgtaagctgaagtattggtacttttgaatgtattatatgcagtctggtccaagagattctctagttcaatgctttataaaacgtaatcgaaatactcaatcgtatcatctctatctcggattaactacctgtaagtcatctctgttcttcttctagatttatcaagaaagagattacttcgtttctgagttcggaaattgttaacaagagtctcttgtctaattttctgacagctttgacggataacgggaagtttcttcttgctgcttctaagctgaagcgcgcaacttgcactgattacatcatctctttgcgttcagacgatatctcaaagagaagcaacgcgtatcttgggagaatgaggtttgcatataaagttatcttctttcgatatgtaagtatgcatgtttccaattttcttattgttatttgcaagatcgaacttccttggaacaaaattcacggtctttgatggtagtcagaccggagcagcgaagatgcagaagagccgctcttctaatttcatcaaagtttcacctagagttcctcagggaagttaccccatcgctcacatttcatacgagttaaacgtcttaggctctcggtaaacagtttttacattcaagtatgataatgcttcttctagtcttttgaccattctgattttaacagtcttttgagggtattaataacaggggaccgagaagaatgcgttgcatcatggatacaatacctatgagcatcgtggagtcgcgaggagtagtagcttcaacatccataagctctttttccagtcggtcatcaccagtctttaggtctcactcaaaaccattgcgcagtaatagtgcatcatgtagcgactcaggcaacaacctgggagatccaccattggtgctgagcaacaaagctccacggtggcatgagcagttacgttgctggtgcttaaatttccatggtcgagtcacagtggcttcggttaagaactttcagcttgtggcagttagtgactgtgaagcagggcagacatctgagaggatcatactccagtttgggaaagttgggaaggacatgtttaccatggattatggatatccgatttctgcgtttcaagcgtttgctatctgcctgagcagttttgaaaccagaattgcctgtgaataatgaagagactaaccttaaatcacctccgtgtgctcgttgttgtggtctgtagatggtgtagtacttgtccaaaatctcaggaacgttaatagctttctctggattctttctgacaattcaaatctatctgttgtatttatttgtctttcatgcaaagaagcgtaccagaaataggctacgattacgtttttttctgaaatttacaaacaaaattaatttactttgctacaggatttagttcacaggaagagggaaggtttgttttttctttatatggaaatattatctacagtgagtcaaaaactccttggctgcagcattctcctcttcttcttggctgcagcattctcctcttcttcttcctctgctcgaagatcatcttctggtagcttaaactgactaaggttccggacaaactctgtgacggcatggaaatgatctggggaaaagaaaagtgctctcccattctctggtaagtgaacagatctatcgctgtattttcgtcctttaggttctctgtgatcctctcaaaaccgccaaggtttggttcggatgagttttgtcctgagacgatgactccgtgtttcttgcaacaagtcttgatgtgagcaagcaatgtctcagggctcgagagagatttcagtgattggtactcctctgataaatccatctctgaatattgagttttcttgaatcttaatttgttgtatatgaagaccgaattttggataaagaagttacatgttagtatattacgcgacaagagatacacgaatgcaacttcgtactgtatatagaaacgcatgcttttacattaatataacataaacaaaacaaatcaagacacagacaaacacgtgtgaacaaatacacagtacagggaaaggatggatttataagcttttgttcatgttctcttggagagtgctgaccagatggataaaactagaagaagaagtgaagcaaatagagataaggcaagcgaagttgcgatgtaacgacaaaacttgtcgtagacattacagatcttgttccacccaacttcttcgtttcctttcaacgctatgtacgcaactcctcccgccgttcccgttgcagacgccaaaatccccagcatcacctgttcatatatacatattccggaattattacttaaaacaccctaattaacatggtatatggaagtttcaaagttccttgtaaaacaagttaccatgtctaacgaggctaggtaaatggagaactgtgcagtgaactcaggtttcaagagtagagagatggagacaagtgttgatatgagcgcatagaaactagctaccacgagagcaaccacgaagtatctgcatagatatatagccaatttaacacattaagtttaaactagaaaacattccatgattatgatcaaacatggaggaatttaattaattaaagagacaaacatgaaagcgggcgagtcattgaactcggcggagacaggagccggagacgaaactccagggagctgagtcatctctgtctggtcgctagtcaccattactataagagcagtcagagtggcggagaaaagcagaactcttgttataatgtctattttacgacaatctaggaaactggcggctgatgagggtggtggtggtggtggtgtagccgacgcgggaatcggttcagatttgccagtttcagggtcagggttctcagtagacgccatcagatgattctataactcttttgtggattaggttgtggttaagtttggactgtgagttatgaagttggccgctacatgagattatttgtgagtatatatatatagatagtcccggtgatgagttgtagttattacccacacgccaagaaacaaatttatatttatttacactattcactaatgtatatatacaggaacatgaatatcaattcatttaatttctagcttgcatttttcattgtttaaaatttcgaaatagtttttggaaaattcactagatgttgtagttttatttcaacgttaacatataatgtttgttacaacaaattttgcatgcatatctatttttgattaatagaaaaattaatatatttctataggtataagttatggataatgtagatatatacaatgggaatgtgttaggccaaccccgggaaggttggtgaggaaattgggcgacggtaatcaaaaacaaaatacaaaaaaggagagtaaagaacagtaggagtggttaaccaatcatctgcatgaaaaaggtaattttatacatgctcttaggtatcactttgctttctgcttgtggctgcaaatcatgtaaatggatatcttattttatgtaaaaacattaaactgcaagaaacaaatgtcccagtagcatgaccacttcagcacttctcaaacatattataatgttttaacatggataaagctatttcagatactaatccagtcgaaatagagtagttttgtcttagcaaaatcaccaaactttatctcttgataccaatacagagtgactgcacaagtctgagaacaacacaaaaaaagtaagacctaacagtaataatatatatgaactcatcatgattttatttcatatcttaatgatacctaactggttttagtaaatccaaatatataaaattagagatagctttaacaaattgggggcgatgatcaatcacaaagattaaaaatagtgtaactggagaatctttctcgagcagctccagcatagtaataagttggggaaaatatcgggcttgaaagtgggtcttatgggtcagtcaggcctaactatgattaaacaaagcccaaatcgcgaatgttccaaaacaactctcttgctcaggtggcgggtaattaattactaattccccgttcgatgaagcgactagttacatcgtagccatatatttattcannnnnnnnnnnnnnnnnnnnnnnnnnnnaagcttcggtcgttttgcaatttgtatctaaagtttcactttttttttaaaatctttattttactttctcacaagcgaagcgaaccctcgatctcaaggcgaaagcagatttcgtagcttccatggcgagaaattcgaattccgatgaggctttctcgtcagaggaggaagaagagcgggttaaggataatgaagaagaagatgaggaggagctcgaggctgttgctcgttcttctggctccgacgatgacgaagtagccgccgccgacgaatcaccagtctccgacggagaggctgctcccgtagaagatgattacgaggtagctgcaggctaatttcgttttgatggctgtgatttttgaaatctcagtgaactgcatcttttttgtacttggaaagttgaaatttcatttaatgcaatggattcggcgttcgcgtcttccttcgtttgttagttttagtcgaatttttgttgagtgaaagttcattgaatgtctgcgcatggtggctcattgtggtataagcaggacgaagaagatgaggaaaaagctgaaatcagcaaacgtgagaaagccagacttaaagagatgcagaagttgaagaagcagaagattcaagagatgctggagtcgcagaatgcttccattgacgcggatatggtgcgttgtttgaactatatatttcaggtttttagctacttttcgttctcgtgcttttaagttctgacgattctgaatcattccatgtgttttagaacaataagggaaaagggagactgaagtatcttctgcagcaaactgagttatttgcccactttgctaaaagtgatggatcttcttctcagaagaaggcaaaaggaaggtgtgttagatgcactttttcccttaaaatatcggtcatcattgcttctagctccagagtaaatatgatgagccggccctgattatgtcggtttaacttctaccttaggggacgtcatgcttccaaatactgaagagaggaagacgaaagtttttaaggaagagagat

SEQ ID NO: 35668 - DNA, 1725 bp, Arabidopsis thaliana landsberg
tgggactctccattttcgtattcggtttcttgcccgtcaagccgtttctctccggtgtcaggtactactaaatcaatagcatttgaagtcgaagaagaagaatctacgctctattgatttgtttatttgaaatggcagtggctcggagagctatcgacatccattctgtgattcttctctgatttcgaacgaatcggagcttcatcatccagcgaaactgagattgctgtaccaggtatttgtctcttttgtgaatccaaaaacaaatgtgtaaagttcccttttgagtttgatagtggtgaatttgtaggagttatctggaatctcttccaaatatgatcgactgattttaatggtatgttgcactttgttaaaattttgattttgatctttgtgagagtgtttttgaggatgttaaagcgatgctagtttaggttattgatgggctacctgcggagttcgttcttgggaaagatggtaagcctccagagaaggttgtcaaagagtctatgccttataatcagtcactgttagctaatggagatgctattggtttccatgctaaagcagctcctccgcctgttaccatgctgaggttataggtgtgtgaatagctgtgattaagtggatgatcacagtttaaattcctattatttgcagagttagttgatagaattcattgtttttttcagtgcaatgagttatatggggccattggtggcttcttggatgttgcttttaattttaacacacaagctctcttagatgataatattcttggtaactattagttttcaacaatgagaaatttttcatgcttgcaaacattgaaagaaaagctatgtgacattggtccaaatttaccaggtcagtttttcaggattggttggaaaatggtgatgctcggtgatgagacgtggctcaagttatttccagggctatttatgagacatgacggtgttagcagtttctttgtgagttaatgtgatgtttggttttgttgattgcttttcttatcgacatcatggtcatctgaacaaaaaatgtttttttggacaggtcaaagatacagtacaggtagacagaaatgtttctcgacacttgcccgatgagctaaacagtgatgattggaatctcttggttagtttttactttttcttttattccccagtattggcgtctggttcatttaacgccaatggattgttctctgccttaaaatatatactgacttaaacaaaaattcctcttgtatatcaattgagcttttctgtgctttattcttactagatctaccccttatcagatccttcattaccttggtttagatcacgttggacatactggcggccgtaacaggtctttgttagtttcataactcatttgtgagtagaaaggttactagttgcatggcttattcatcttattatttgtttctctatactagccccttgatgcctgcaaaacttaaagaaatggatgatatagttagaacaatgcatttaagagccatgatggatcgcagccatgatcaaggacagactcttctggtcagtgacttttcgtatttgaaggtccatttgactttcatatgtcaagagtcaatcttatttttgttacatatacagataatagtcagtgatcatggcatgactgagaatggaaatcacggagggtcgtcatatgaagaaactgactccttaatgctctatattggcttgaata

SEQ ID NO: 35669 - DNA, 904 bp, Arabidopsis thaliana landsberg
tctaacattaaaaacttatggtgaaaaaatattttttaaattatttttttgatttggggttcaaaaatattataaataaaaattccataatttctaacgaacatttgctgaacaaaaatctattacttattgaaccaaaaaaaaaatatgctatggaaccatccactccaactatggaagctaagccatgagagcggtgcgttgtataaccacacacgtctttgtagacatgaccaaaaaccaccgcgactatctcatcctcgtcaataaagaaacttccacctgtaaccgcaaattgaaagccaaagccaaagcaagtgagtgttctcattcactgttaagaacgacctccacgacaccgcgttgggctcaatcttagtagttatccgtatctcccacatcgatgtgtcccatcgctgaaataaaaccgcaagctgctcctctctaacactagatagagtggtggtatcttcagaaacagcaaactcaaacggtagaggcaaaagcggcccaaatgtctcgcttgtgaaatcaaaacagagtaagaaaaaatggtctgtgtccattgtttcggtataattctctctagcaaaccagtaggcatttcccttgagagacacgccatggagcatttgccataagtgccactccggagttacatcaagatccctccataagtcagagttaaaatcgtagattttgaactcatcaaaaaagggatccaaacaagtaatacccctcaagattttgtgggatttgcggctcttgtcgtatccgagagcatacgaatagctatcgaatttgttgaattgatgtgtgggctcgaataaccgggtatgcccacaataaaggttccaaacaacgagcctagtcttggattcggtgatgctgatgcataacgata

SEQ ID NO: 35670 - DNA, 3843 bp, Arabidopsis thaliana landsberg
tgtctcaaacttaaaaatggtataaatactcgacattgatacaaaaaaaaaaaaaaaaaaaggtaaccaaagcctagacgaaccctttttcataattgttgtgttggtatatcactctctaaaaccagggtgtaaagttatggtgccgttttgtggggtgggtcgagattccactgaggttaaaatcatatggtctgtgttggcaaaaggtgacacgtgaatgggtggcgcgcgtgactaaccgacccgatccctccgacaaacgtatcgtcaccgtccaatccatctcagcatatagccgtttgttcgctcaaccactcacataatgccacgtttgttgtccccaccaatcatttgcattttctcttcatatccaaaatttcatatcttttgcgaaaattgctgacaattagactgaaaacgaaaatataacaaaacaataaatcccaataaaaatgacaaattgtgacaaccaaacaaaagacaggagatgcagctccatggttatcgttttgccatgtggcaaaccttatcgttttggctacgttggtcggcttagacgaatattccacgtcagccaactcttttttctcatgtttttcgaagtgaattttagataataaaagcacagaaatgtgaattttctggttctggttgtgttgttaattgttattagtacgtttatttatatattttacactttcttctattcatagaaaactagtcttaaccttatctaaatattctagacaaatcgagttacatatagtatgacgtcgttatgcataaattttgtcctttttagtcactccaattgaaagaattagtccagaatgtactacagcaagatcaacaaacatatattgatttatctgtcttcataattaataatttaatatgcattcaaatgataatcaattggatatatactttacatgatatttacagatcaaaaatttctatattgtaatttccgattacttaaatgagtaaaatataaaagtcatatgaagtccaaattttattgtaccggaaaggacaaataaattcatataaagtcatgttctattgaatctcttctagtcctccatacgtatttgaactgcggatataaagtatgttagttttttatttcactatggtagatttttaaaacgtaattaaaacaggtttaactatgagaacatcgtagatccgaccaaaatttatcgcatagtttgaaaaaaagataagatactactattaagtatatatattttatgttttgttttgtttaaataaggaggtagacattattaatagttgtttagcacacgaacaagaagttactagtataatttctcaacgtttattttgttgatggggtgctcgttggtcaaatttagcggcctgacaagctcagtcgacagtaatgtgcctttttgggtgtacactgatgtctcacctacaatgtttttggtcgagttacgtataaaagctcttgtcctaatcaatttgtcttgcatacgttttttacaggaatgcattcacttagttaattagcctttccttttagcccatcacccatattatttagtgcattttctttttgtttgatcatcgctggcatggcaacaataacaaatggaatcaggggataactaaacgctaaaattctatgcaacttgaaaatctgattaaaaaaattaaagcaagagttatttttcatcaccatcgttttgtcgttaaatatgacagaaaatttcgttcttgacgtatcattttcattttattttcacaatgtccattctatttttgtgttggaccatttttccatgtgaacgagtggtttccaaaacagtatataaaatttctatgattgatcttatacaattcgattggattttttttatttttttttaccaaacactagccagcaagagagcccacaaggcccaagaaccatgaaccgttgccaaacttagcaagtgctccaaattactttgagcacttggcagacgttacttgatatcaggcaaaaacctttcttttagtattttaacacatagaatcttcaagaaatgaagagagacgagtaattatgatgaaacaatcataaatcttccttgccgttcaatatgaatgaaatcgttttgagtgtcaagttcgatgtttacatgaatttgaagatacacatctttcagtatatttttatttgtgcatatattaatcaatcaacatactggtggaaaaaataatcaagaactccaagaccttatgttcatatactttaaaacaaacatgagacagttatttcagcaaaagaaaataatttctactaagcaaagaaatttgtgaagaatgataatcttttttcaaaataaatagtgttcaagtaaccttcagaacaagtgccaaagactatgtatgaaatcaaatggccactctccattacatgagatgcaaaatccttaccatttaccattaacagtcatgaaatttgtatctaaagaacttcacaaaaagaatggaatagatagtctcggttgtttgtgcagtgatcaaaattgaatcaaagatcatgaaattctcatcttttaaccctcaaaatgcaataccatttacacctatcaccactaatcaagtaaacaagcacattccatacataccaagttcccaaacatttagcaaacatagaacaacaccaatgcagtttcagattctcatcaccataatcaaacaaagagctcaacaaaagcagaaattaaacagtgatgatagagaaccattggggttttgaaacagagaataataagaatccaaaacttgagagtcattctaagtgaaacatcatagcagctaagttcccaaacaaaaacaaaatatggtaaaacgagaaagataacaacagaagcatttcaaattcccataagaagaaaaaaaaaactccattgttccttaattctcaggaatctcaatctcaccttcttgaatctcctgctgaagatccttagggtctttcccatcaacagtgcatcccacagagacacacgttccaagaatctccctcacagtcccactcagctccttagcaatagatctaggcctcataatcctagcaatctcagtcacatcatcgaaagagatgttaccgttatgcttaatgttcttcaccttcttacggtctctctctggctccttcaacgccttgatgacgagagctgcagcagatggaaccacggttaccttagcttgacgattctgaaccgtcagcttcacggtgacacgaagtcctttccattctttggccgtctctttcgcgatgtcttctccgatcttctttggtgcgagaccgagaggaccgatctttggagctagagaactggcggctcccacttctcctccggttacacggacgtacacatcgacgatctggctcgggtccaacttcggcggcatggctctgtgttttggagtttcgcttgatcaaaaagtggcaaacgaaaaggaggcagctgcgaaatgagcttttggggttttttggaagatgaggaacgtattaagtggtcgagattagggtttcttttgttccgatgctaaattactaacttatcctttcatttcgaacggcccaacccaatattatatgggcttagtaactttactaatgtagaccattgaagcccgtgtataatcttcggtacaatcaagtctcggttctattactggtttgatcgcaaatatttggtttagttaaaccgtttctacttctcatcaaccaaagttactgttaggaggaggagagccgaaggagttgaatctcgagccaaaatcaaaatccaagctttttctagggttttaagg

SEQ ID NO: 35671 - DNA, 1521 bp, Arabidopsis thaliana landsberg
ttcctttccgaatctacaaacctgaacaatggaatatatgataggatgagaaggtacttgtttgaaatacctagttattcaatattacttgtttaggcttcactttctaattagtttgctcgacgtacgtcggtttaaagtttatttcctccaaactaaaaggtttcacacacacgaacacaactatatgcacatgtgcgtacggcttacgttatgtatcaatacatactagttaaaaaaaaaaaaactagtaatacactgtaccgtctattaaacgagtctcaacaaaattaagaattggttgtaagaatattcttttgccataaaaacgtatttttaatcacgtgaatggtgccgatctagttgctagcggcgtctttttttccaatcctttgatctaatattagaaatagtcaaaaatatttcttaaaatgaggaaaaactaaacctgaataagatccattaataactgatttccaatttgtataaaaatagcttttctagaaatcacctacttttcgccgcatttcaatttctttgtgtgtatattgacatgttcaatgagattttcaaatttagttaagaaaatccaaaaacattcataaatattttcttaagaagagaaatttgactttttaatatcttaagaaaattatctagatatattagtgtaatggatttgatttatctaaaatcacacacgtctatgagttccgtaccaatatagctaaaacttaattaaatcaatagacatagagcatggagttgaaatatataaaacaaaagcaatatggagtcttttagttttcatttgaaacaccacgcagttttatcattactcgaatcataaaacagcagcatgtttgttaagacaatagaaagaccaaatgtaaacgtgcaaatctctacacatgtctattagattatgggacccatgttcctcctataatgtcaggtggcagacacatgacgcagactctgacgctttttaacaaaaccaaaagtctccacgaaacttcctacaagattcttctatcttaaacctaaatatacatttatataatctatataattgataaatgataaaatacaatttggagagatatttgagtcgacgccaaaaccctttttgtaggcgaatcatctggaccggtaagagactctctcatcgataataaccacataatttaatcaaactctttctctctctttctaagatcttttgctttgctcttttcctttttgatcttcctatatatggagaagcaccaaaacggtacttactatacgatactgtacggatccatcaaactggattaattatcaaaacgtacatttttatcttacctggcaagttacattcctagggttttggagaatccaatcaacaacaaagaaaataatcatcgttacaataatcagtatcacgcacagacttagatgttccggtttccagtgagtctaggcggttcacgtgacgaagaccgccacgatcagatcacaaccgtggatgaccatcgt

SEQ ID NO: 35672 - DNA, 3267 bp, Arabidopsis thaliana landsberg
  unsure (1)..(3267): unsure at all n locations
acatttgatgtgtgtttctgtctaaacaggtagcgcatgtatataagaagtaattagtttcgcctacaagatatgcgatatcgggcctaataaatatcataaaatgcatgatattttatttgaataggtatggtttcatctaaaggatacaagccacatggaaccatttgtctcaaacgatttccttattcatcttcctctaatcgagacatggaaagatacctaccttatcatttcttattttcggtttaaatatttctcatccggctttcacaatatctatatgacgttatggttaaacacatatgcttcttaattatcaacctatgtacctaacaaaagaaatataaatagcagaatcacttggaataatcattttcgaaatagaagatctgatctacttattgtcatgggaatggtatggtcgggatggggatatttgtagtgcctccaactacatcttgatttgtctttcaaggcgaataaaaagatcccacaagccttgatcgtgatcgatgagtaaaatattattatagtctcacgtatgccactttgcattccccacacgatactaatagcatgaggttaacctaagaagtagaatatatcaacatattttcaacgattaatttctgataaaattttaacaattaaattccaacaattaaatcatcagaagttttcaaaaatttataaggaaagttatcaataaattttcaacaataaattatcattaaatttttatgaaattccaacaaataaggcgtcagaaatttctcaaacgttttcaagaaaacgtttcaacaaagttgcaataaatatgttattaatagtttttcataaacaaacattgagaattgttgaatatttgtggcaaattatcaatgacattccaacaaaatatatgttggaacaattcgttaaaaacttcaccgtaaattccaacaaatgtcaaaccaaaaaattatcagaactatccaacaaattggtcatataattattcaatggaaatgtttccaataattcgtgataaatgcagatttccaacgatcatattccaacaaatatatgttctattgaaaatttattggaaacatataattcttacaaattaaccgcatagatatatgttttaattaagcctttttcttgtagatggaagtgaaaatatttttcaccacatccatcattttcttgatatattgtatataaatatgtacattagatttctaattactttatcaacttttgtgaaatccataaaattttcttaaaattaaattatgatgatattgtaaacttgattagttcttttaatgttaagtttctactagtactgacggaaagggttgaactcacattgatgggaagggaagatcgtcaaagattgtcatcatgatcaaatcgcaactatatatattcagccgtaaatgtcaagaaaacattgtagtaaacaatagtttatgccccagagccacaggccaaagttgaaattttcttgtaatgatgatgatgatgatgcattttaaacatattggacagtgggtccatttcttccactactctaatcactaagaagtttagtaaacttaattatttgatatatttaagttttaaattagttacacagttnattccatagtattttgatatttttctaataactaaaaccataattttaaaaatgaacttctctataagaattcattgtttctcttttttacacaaaagttgatttaagatttttttttactttttattagaaagatttatatttattggatattgatattgaagtctagtttctaacaaaaattaatgtagaaatagttgattaatattggataatatttttctagtttctctttcatgattcttttaaaaatgaacgagacattataagtacctcctcgctccccacctagttaatttaactttgtgccaactcctaaagccaaacttatatcttcctttgtttgacataatacaagaaaaaaagaaagagctatggatgttcatgatctatctgaagaagccaaaagaggagtaatacacacgtcggaggaatcattggacgatctttgtgttgattttcgaggtcggccatgcaggccaagcaagcatggtggtacaagagctgccctctttgttctaggtatccttgtccttctctcgtaaacattaactatgtatatatcggctagaccaatatatatgctgcttatggccgaattagtccatgttatgcattttgaagccatgtagttaaattgattggttgtgcatacatatatctatgttcaggcttccaagctttcgaaatgatggcgatcgcagctgttggaaacaacttgatcacatacgtattcaatgagatgcatttccctttgtcaaaatccgcaaacctcgttactaacttcataggaacggtgtttctcctctcgcttcttggtggcttcctctctgattcataccttggaagctttcgtaccatgctcgtttttggcgtcatcgaaatctctgtatgttcctctacctctctacctctcttttctcctttctattttagatgctcttgaatattatacttcacttttcatctctaactagtaacttgtgaataaaacgggatatttaaagtatattatagacaaaagttcaaaactttaacagaaagttgtaattaaagtgagttatgaattaaatctttcggttctttggaaaagcaaatgggttatataatttgttagtatagtgttcttttttgagcgtggttaacgccacgcaatagtatagtaacgaaatttacggcttcataatacatacacctgacttttaattccttggttataggtaaaaatattagtgaccaaagactaaaataatgtggtcgacaaaactaggagaagttttggctgacaaatgtttttgtaaattgataaaacagggtttcatattattgtcagtccaagctcatctcccagagctaagaccaccagaatgcaacatgaagagcaccacaatacattgcgtagaggcaaatggttacaaggcagccactctctacaccgcactctgtttagtggccttagggagcggctgcctcaaaccgaacatcatctctcacggtgcaaaccagtttcaaaggaaagatttgaggaagctctcgagtttcttcaatgcggcttacttcgccttctcaatgggtcagcttattgcactcacactcttagtttgggtgcaaacgcattctggtatggacgttgg

SEQ ID NO: 35673 - DNA, 2502 bp, Arabidopsis thaliana landsberg
aaacttcacttgtgagtcaacctgagatagagccgatttgaactcttcgatcttcagttcaatgttattcttagatacatcatcagtttcggcttctttaagaagatctgcaatgccacgcatacgtttactcttcaagtagagctccacttgagggtatctaacacaaatgtcatccattgcttcttggaactctttgagagtcagtgtcccagacttgtctttgtctgctttgctaaaaatagcagaaacatcttcctgcaacaagaaaccactaataattttgttttataatccaaaaacattattccagagtttgggaagcaatagaagcgtcaaattaccatgactttgcgctggttaatggttgcgcaatcaccaagggcatatatattatcagttccttctacgcgaagccattcatcagttgccagagctcgtctattaccctgaaattacaaagacaatttcttagagcgagttgttgaaacttgtttgctaggagatgttgaaaattgtaaagagtgagttttaaatctaaagcgcattactttacctgaccaatttgtttcataaaatcttttatcacaggacgagttccaataccaggtgaccagacaatcattccataaggaatcgaggaaacctctcctgctttggttttagcagatatatctttctcattcactttagttaccatcgagccaagtttcacatcaattccatctctgctaaacttttcttcggcaaactcagtgattctcttgtcaaacctgtgaaagaaaagctttccatgaattagtaacgaggtttttatggaaacctgaaacttctaatcgtctgaccaaaaattatagggagacgattgatcaagaattttagagtaaagaaatttcacatggtcaggatgtggtctgcggcctccagaagcgtgattcgcactgaacccttggctctaggatagagactgactagatcctcagtaacaaaatcatgtagctcagcggcaaactcaacacctgttggcccaccaccaacaaccacaaaatgcaggattctctttctctcttcatcgcttagttctggtagacttgccttctcaaaggaatcaattacagttttacggattctctgagcatcttcaacctcctataagcacataatgaaaccaattaaagccacagaaagttaacatcctacaaatgatcactctactttcacatgcttttcagctgtaaactatcaatgcataccaagtagagcaggaaaaggaattaagagccaagagaacatactttcagaaaatgacagttctcctccactccgggtatgttaaaggtgttagactgagctccagtagcaattacaaggtagtcatagtcaacagaaaattctttctttccatttgaactaaggccttgtttggatcggcagtaaaccttcttgctagctggatcaattttgaaacattctgcctccaagtaagaagtatcaacattcttctatttgtcaaggcaggaaaacgaatgtgcattagctattttttcaaccaaaatttccatttagagttagccatatttacagcagaattacctttcttccaatgtttcgaataggctcaacaacactacgagcttcaacagttccacaagtaacactaggtagtaaaggagtgaaagcaaagtagttccgaggcgatataatctgaacctcatattgagaattgttcaaattcttcaagaaactagttccagcccatccagttccgagcagcaccaccttcttcttcttggttccagtttcaacaacagcaccaccatttgctccatatgatgcgtttgcctcagaatacgctattagtccaccaccactataacaatacacagaatctcacatcagtcaacacagatcacaacaatacaatcaaataatcagagatccaggactctaagatccaggacatataagcaaaaacagtaaaacgaaatttgcaaaatccagatgattgagtttcatcgaatcagattcgttaagaatatgaaacgcgttcttcctgaaataaactgggagattcagaattcaacaaaagcaagtgttgcgtaaatgatacaacctaaagaatctactcaacagatatttttccctggagaatttgttgttcgtacgtttccaggtagagaattgaaaggtttcaacaacagagaaacaagaaaaaaacagagagctacgagaatcgtttttgaagaagatgaagacctgatcgtggagacgacgagaatcctggtgagagaaggatgatctttaaaagctttagagaatctctcgaagacactgaaatttctcattttcgctcttggttcgattcaatcgctgagaagaagaagaagaagaatttttcacacagtaacgccaagaaacctggagaaattttaatctaaggaggaaaagagagaaagatctagagggggccaggagatgattgtgacggtggagaagtggcgt

SEQ ID NO: 35674 - DNA, 1312 bp, Arabidopsis thaliana landsberg
tcactgggtgagtcgtattcaacttgatccgaaccactaaattttttatgatcgaacaatataaactggtggagcttcgacaggatccgacatcattttgttgcacccaccatgaaattttactcaaaaatacgatatatatttatttagaagatggtttcctgagtattgatgggttggattattatatattagtcatctctacatatgtgcaaccttttatataattgcctttactaactacattatcacctaacctgatatcaagagatcgaatcataatcgtggtacctaaaagtgacaatacataaaagatatctatctctttctctaatagccatgttcattgcgaagataagcaaacttttatctaaatcttatgcaatagatcttttgtgctggagatttcatattttatggtattacaaaaaactgattgtcatttttctaatatggctattttcaggctatataaattggagagttctaaaattctatttttaagatagaaaacaaaagactaacaaagataagaagcattcatctattatgccaaatgccaatactattctatgtcctttttctttttagaaatatattgtcccattcatatattgttggtagaatgtaatcagacaaaacctaatattgtttcaaaataattctttgctaggtgagctctttacatactgttgatgttaggtcaatcagaaatactaatgaagtagcataagatgctgagaaccttgaaaggcaattttatttctcatggagctattaaaaccataggatcaacactttatgaccaactttgtctcttgaagtaacaaaatattctacgacaaatttagccgtttgtgtaacttttatcttattctattcattagtcctgttctaagatcaatgtttcttaccaacattacacaaccaatcttcggctatagagatgggtgcctaattttctaagcaattcagataaacaaaatcttaaataattacacatgacatatgctgaaaatgcgaaactatatgttgaagtgcgtaggatcaattcacaaagaatgaatgatgcacaatgaacctatctatagagaagagcatgacgctctaaaataaaataaagacgagattatgttgttagggttatgccttgagtatgtacgaacgattaatctgaaggcagttcgttaacaacgattaacgatcagattggtcactgaccaatgaacgttggatatatatggaatctctaggctcatcgatcaagctaattaatacaagaaatcattatggaatgaaaagctatcgttat

SEQ ID NO: 35675 - DNA, 5264 bp, Arabidopsis thaliana landsberg
aacagactctgttactcttttatataatagtcaaaccctccactgcagttagagtctttgacttctcttcttcaatttccggtttaatcagaaacctccttgttagatatgacttgaatagattgggcccatgactttaggcccaatcagtttagggttaattagggtttcttttgtataagtactcttcttaacctagcctccctgtattctcctgtaataaaatctgtctctttgcccgtggatgtagccaacagaaagtgttggtgaaccacgttaaatttgtgtcgtgtttatcgttcgtttatgcaatctcgcttgcacctgttctaacaaactggtattagagcacaaggttctttgttctgcgtccgtcgtgcgaatttcgtgcagttttcagttccgtgcaaaattcgtgtcagagcacaaggttttctttctgcgtttcgtacgatttttgggttgaagaaagttcgcgcagatctgtgtagaagaaggttcgtgcaaaatccttgcagaagaagttttgtgcagaatcaggttttgggatttctgcgtatgtaatctggtgagaagatgtgtgagataaaagagaagatcgacaagcttttttgggagaagcagtttcagttttgggtccaaggaagggcatctggtccagtggacatctggctcagtgggtgttttggtccggtggaccttcatgcctatgataggcagcaaatccatgttgagcatttggcccgtgttagatagattgcccctgttgggcatcttgtctgtattggatatctggcccttatggggcatctggtctgtcttggacatgtggcatatgttgggcatctggtctcatatgtatcaggcacctgaatcagttacagatgatcaagcctctgatctggaagctagtggcagcaatggactaggatagagaaagaagaacgtaaacataaagctgttttctatgagtcctaagttaggtgatatctgtaattactggaagtactattgttttgagaaaccaatatgattttgttgttgtaacagaagatgacaccaactctgaagtggattttgctccagttaacgatggaaacacacatatgtctaatgtgtgggttcttgatattggagtgttttaccatatgtgtccaaggagagagtggttctcaatatatatagaggtagaagacggttgcgtgaagatcgcacacagttttataagctatgttgttaaaatcagcttaataaagatcaggacacatgatgataacctctacacattgaacggtgttaaacatgttctgtcagtggagaataatttgatatcagtgagtctgtttgatagcagaggtttcaaattttctgttggaggcagaattcagaaagtctgtgaaggttctgatgtgaatctggagggtgtcaaacgtggtaccttgtacatcatacaagggttcacaattacaggtttaacaaacagtgcatctgaagagttttacaagaatatgactgagcttggtcatatgagtgaaagaggggtgcaaattctgtgtggccagaagaggctgcagatatccaatggtctgaaaaattattcatcagagttcatgatgttgtgtaaggatgaagaggtttctcgacatcacacagtcagagatacaccagaacagggttgtgtagctgaacatgtgaatcagacattgttggagagagcagggtgtatgttttcaagtgctggtttggaaagaaggttttgggctgcaacagccatagagagtgatagttttgtcaaacaggtggagctgaaagttgatcaacaagatgacttgaagcagcaacacgaagaaaatcaagaactatacacagaagtttgtctgacataaactatccaaacagaatctacaccatcagagagtataccatacagtatcgttctaaaccgaacgaggaggatagatgttcgaccacctcagagatacgatttagaagatacagttgagtatgcattacagtttggaaaagaggtggatactaacgtgtcatgaagtcatcacaagctgttagtcgccaaggagggtgatttggtccctgaagggacatcaggcctctgagaggcatcaggctcctgacggagcagcaggtccctgaagggacgtcatgcctctgagaggcatcaggctcttaacgaagcagcaagtccctcgagggacgttaggcctctaagaggcatcaggctcctgacggagcagcaggcctctgagagttattggatccctgatgggatagcaggtctcaagcgagacatcagtcttttaaaagaggcatcagacccctgatggtggagacatctccgtacaagacatcaggtctctaaaagtgaatctggctctttactgagcatcttgcccattggggcattctagcctatgaacaggcatctggctcaggatggagaaatctggcttgtgacaaagcatctggtctctgaaagacattatggctgtttgagaagcaacaggctcctaactggagcaatctggcctctaagaggcattttggttgctgaagcagaaggcacatgactgaagcaagaagcagcacactcttcatatatggagctagaaagcaactctctaggcaaccgtgatgctgtcaacaacagaagcagagtacatggctttgacagacgctgctaaagagggtatttggctgaaaggattggtcaatgatatgggtttgcattaagatcaggctacaatgtactgtgacagtttgagtgcgatttgtttagccaaggatcaggtccatcatgagaggaccaagcatattgatgtgagatatcattttctgagaaatgagaagaggattcaaatgaagaaggtagggactgctgataaccctatagatatgttcactaagtcggttcctcagatcaagttcaaacattgtttagacttgctgaatatcttaagctgttaatcgccctgaagggcgaacaggcccctgatggggcagtaggtccctggagggacatctaacctctgaagaggcatcaggctccttatggagtatcttgccccagtggggcgttctggcttctgatgaagcattctggtcctgacgggcgttctggcttcagatgaagcattttggccctgacaggcgttctggcttctaatgaagcattctggccctgacagacgttctggcttctgatgaagcattctggccctgacagacattctggcttctgatgaagcattctggccctgatagactttctggcttctgatgaagcattctggtcctagcaggcgttctggcttctgatgaagcattctggccatgacgggcgttctggcttttttgacgaaacgttttggtctctgaagagacattgagttcctgatggaacatctggtcacagtggggcattctggtctatgatgagacaatctggccctagaagggtgttttggctcctgatggagcagtttggctggataatgcatctgactttctgatgaagtatctggcatgtcaaagaatttgacttttaaaaaggcaccaagcttccgatgaagcagtttggcttgacatgcattttgcttctgaagaagcacttgtccttgttagactatttggccttcaaagcggcattgagctcttggaggagcattctggctcttgacagagcatccgactcggtagagcatctggctcaacagagcatctggctctacagcgcatctagcttctgatgaagcgtttggcttgacagagcaacagacatctggctcagtggagcatctggcttcttgttttaagcatctggctcagtggagtatccggcttctgtagaaggatctggatcagtagagcattcggcctctatagaagcatctggctcagttgtgcatccgacttctgtagaagcatctggctcagtggagcatccgacttctgaagaagcatctggcctctgacgaggcatcaggctctagatggagcagtctaactcgacagaacatctggcttctgaagaagcatctggctcagcgaagcatctgtcttgacgaagcagttggcttgcaggagcatctggttcctgatgggacatctgaggcaaaggagaattcttgtatgtgtgtctgctacatttggttggtacttctggcattgtgttaatgtatctggtacaacagtctggtagctgaatcttgtacatctgtctgatgaggaagtctcgtacaacactgtgagcagtgtgtcaagtacatctgtttggaggattcaagtcaaggtggagatttgttagatatgacttgaattggattgggcccttaactttaggcccaatcagtttagggttaattagggtttcttttgtataagtactcttcttaacctaacctccatgtattttgtactctgttttctcaagcaataaaatctgtctctttgcccgtggacgtagccaacaacaagtgttggtgaaccacgttaaatctgtgttgtgttctttacgtttttgttatcttgatcacatctgttataacaactaatttttgtttttaattattaatttagatcaaaatatattttgatttctagcacacccaaaaccatattttaaatgtaatgttaattttgttttagtcaagatatttcaaaaaatgaaattcttgatcaaaaaaaattaatttgaatataatttattcccttatttcaattctttcatttggataatgtggtaaattaaatattttaacatatattgtgctaaatatcatttttgtcaatataaaaataatcattttcaaaattcaatatctgaaaaaattgccgctttatgcgtttattatcttaaaaacaatattctacccacaacattggttaaatcttaaaactagttgaaatatatattaaaaacaaaaaaaaatataacatattcaccaactacattttaaaaagaatttggattttaggggggagggtgtattggatcttacgttttgaatgatttgagttttagtgagtttttgtatgattttagggaagttgatgtgatttattgtaaaatcttttcaaatttcatctaaaactgtaggatttggatttctatattttagactaaagtagtcttctcaaatcctctcaaatccttcataattaataagaaccacaaactattggattttaaagtagatttttaaatctttaattcaataacactagattttattaaagtttttaaaatt

SEQ ID NO: 35676 - DNA, 3708 bp, Arabidopsis thaliana landsberg
ggatgacggagaataagaaaagagaactaataacttgtttttgaaatctcctctcttctctaagggacagagtcaaaattaatccaaaactaaaacttaatcgaactatatgcaaatcctatactcatcgagaaagcagttacaactcaaggagtgatatgagcagcggaatccatacctctgcgctagaggatctaatgtagaagaagcctttaggttgcaccttctatacatgaacaaggaaatgtttaattgattcttttattctatccagtagagaatcagaaagaggagacaaacgcaagattttctcttgacaaggaacagtgatggttgtatttaaagctgcaagttgtatgcatgatctccaccaacaagtaaaatgaggtccgtctaaacggttttaagatgaaagatgagtcttttgtacaaactactttgccacagaatcatctaaacggtgcataatagtaagacaccgaaaagtaaactacataagcaatgagactgacctgctatgacaaacaaaaagttgatttctttctccagttgtatgtatgttgtaaagtattgggagatatctgagatcgacccaaaccaaatcgactcggttagggacgatctcatcgatctcccaatataaagagagcagaaaggatgtatacgatatacaaaacttggaacatgccctttatttcgacaaggaagctagcttcaataacctgaaatactcaattcccatggaattcaaggctcacggacacatttctcagcgatatttaatttgtattctttgcgccggtagaagatgaacgaagaagacgatgacgacggcaaagttccgagtggcaaattcgttattacagttgcacaagaaaaggccaaaatcctaaaaggcttatttgtttccttttgggcccaactaacattattgggctccaaattacaatcttgagcccaaaataattaattactttttaccatattaaaatttttatttgcctgcagttgctttctttaacgtttcgattgagcactgtaaaactaaactttgcttctgtctgtggtggacaaagtcgtcggaaaattccaatcttgtttaccagaaagaaaacaaaaccggtacaatcacattgagacaaaaacaattactactgtgtatttttgggacctgctatggttttttttttcttttcaatttaataaaagaacacatactctttgggaacttgtcgtaactccgaatctcaatgtcactcgtcagccattgctgtccacaaacgtttagagaaaataaatctcctttattttaggtaaatgtcatagttaaaatctattaaaaccattgtaaagagtggtttctctgttttcacgaaaacaatgaaatattgttttgaatgataacacacttcaggtaacaaatgatgtaacatttgaacaaacccacttaattcaaaaactagtttatgtcgttgcatcaaaaagtaaagcgtgttgttcaaatgtatccactaatcagaactctaatatatccaaaccaaataaagaagaataaataaaagttgacattgaagctatttctcgattcgaagggaatccaaagaaatgacggaagcagccaaatattaccacccaaggtaaaagaaaacaaatggggcacacgtgttttcaccattttcaatcttttaggtctatccatttaattttaatattttcactaattaagagtcttttatgttcgtcctacaaataccagaggtcagacccattatgggatgtgctgtacacttcttccttttgattctctctgccactctcatgtgacacaattataccattttttctttgatattttgtacaaaaaacataacattattttctctctattttcattaactcatttctgtattcttcattaactataagaaagtacagaaataaatataatacgcattaaaatgaagaaataataaaacgagagaaaaggtttaaggaaagggaaagggttagtgtagtgttgacaacgccactcttgactctctttctcttcttcttctcgagatcctgaaaatgtgactgacagattcttcaacttcactctcttcttcttccattcactgaactcaattcaccccctttgagctatgacccaccaaacccatcagcgtcgtcgccgtcgtcactccgccgtctgtcaccgtcatccttcttccaaacccaccactggtttttgtgccacctgtctccgtgaacgtctctctaccatcgaagctctatcttcctctgtctcagcttccactgagctccgccgtgttcgctcctactctgttcgtgacgcatccgcttctgttttggaccagccacgacgcagatcgtgtgatgttaggtctaatcacgacgacgatgatgatgatgagctgctaaagagctcgattcgattccccattgtaccggatttgatagaggatgaagaagaagaagaagaggaagatgatgagggtaagaagctcgttgaagaagaaatcgaagatggagagcagaagacgatgaaggagttaatagatctggaatcgagaaatcaacaactgaagaacaacggcaaagattcggtttttagcagaacactcaggaagttttcactcaaacatcatcgaaaaattccagattccgggaacagtcttggtcgtcgttcatgtgatgtagatcctaggttgtctcttgacgcaggtcgagtctctttcgacgagcctagagcttcatgggatggatgtttgattggaaagacatatccaaagctgatacctttgtcctctgtgactgaagacgttaaagcctcgccggagaagataaccggtgagaaggtagaggaagatgagaagaacaatccaggtgggacagctcaaacgagggattactacttggattcacgaaggagaagaagctttgatcgatcatcgagacatggtttgcttgaagttgatgaattgaaagctatttctaatgctaaggtatcacctgaaactgttggtttgtttcatggagcgaagttgcttgttactgagagggaacttagggattcgaattggtattctattaagaattacaaaccggagagcttggagttaggttctaaaggtgttggttgtgttgctgctggtgaggtgaagaagcaggatggttttgggttgaagaagagcggaaagaaatggtctaaaggatggaacttttggggattgattcagaggaaaactgatgtggcgaagagcgaactataaaccacgcaaagtttgaaacttggaggaaatactatggagggttctcttgctgagtctgtgttgaagcttaggagagtggctaaaggagaaaccaatggtgatgtcagtgagaaactcataagaagttacagcgttagtgcgagaaagtcttgtgatggtatgttacgtggtgcttctattgttaatggctttgaaggtggaagaagctcttgtgatggtctatttcatggctctataactggtgttgagactggaagaagaagcttgtgtgaagacggaatgtttcatggcgttgaaggcaaacggaatcatcttctccagagtgatgacaagcttggtacttactcgcctgacaccctcagaaatggtatggttagattctacttaaaagccaataaacagccatatgacaagcaagtccggtaaaagtagg

SEQ ID NO: 35677 - DNA, 1530 bp, Arabidopsis thaliana landsberg
ggagcaagcgtgattggtggtgacgatgaggaacaaatcgtgggcattgatggagctttatctctagatgcattctctggattaaatggtggatcaaggatttcgagcaagcaatcctccttagcaatcaatgctaatttaattacgtcgaataaggaaagtttatttcctttgaatttctctttgattccttttgatattccggccaaagatgttttgcaagcttcttcttcatttggagggtttgaaatctccaacataaacgatccaaggttgatggatgattcactttccttgcttggttcgacgtgtagtagttcaggaagtccttcagcaagtctttcaggaagttcgtcagaaagtccatcaatcagtacatcagcaaatgtgatgtccgcatcatactctccttcttgagaaagttttgtcctcaaaactaatgtcatttcttttttttttttttaaatcacagatcaagaaaaaaaaattttaatcaaagaaaacaaaacataggcataagctatggatgatataggagctttgagctctgataccaaatgatgcaagactcgggggggagtctcacaccgtgatagatatggcggcttcacatgctggcgatcgcttttcttttgtgaagctaagatggcctagggtggtgatctgacacgctggcgatcgcttctctcgtgtgggatcaattcaagggcaaataatggatagaagggtgattgactcgctcaatcagtggaataattgattcactcgatcaatgaacgaatgaaggatgttgaatcactcaacaaacttaatccgcatatcttgaagtacttagtgactcactcacaaagaactacagaacgatgacaaagactcaaactttgacaagaaaaagtttctattactttaaaatgatcaagggtgttttacaatgaatgagaaattgataataggtttttagtcaattaatcctaaaacactatcttgtcgttgtagtattttaggtgtcaatccaaatgggtgtgatgcaaagagatgagatatgatcagaagttgctaagtcaagccaaacagtatttggttggttttctaacagtcctagtgtttgatacagaaaacagtaaaaaatcacagaaatgactgatatactcgatcgcggggtcgactgccagaagggaccctgtgatcgagtacaacaggatgatagagagtaaaaatgcaaaaatggaccagtttactctatcacacagtctcaccgccagtagcagggtgtgatcgagtagaatggttgaaaataggaaaaatactaatagcaagtgaatgaagcaggtaagtaaacagagaaatcaattggatgagaaactcctaaggatggggtaatcgaatagtgtggtctccctaatcgattcagttgattaacaaatctcaattaagctattcctagacaagaagttcaacaccagattaattcactcatgtgatagaaatcctcaagcatagctagacactgacctaattcccattacaatc

SEQ ID NO: 35678 - DNA, 2449 bp, Arabidopsis thaliana landsberg
  unsure (1)..(2449): unsure at all n locations
atgcctaacatcaccaccaaacaataactcaaacctccccaagaaaaatgaataaatttattaaattagagaacttctaagaggtttatgcttcttccttttcttttttttgggttttagttttggaattgacaccgtaggttcctgtcagaataatataaacactaattgtacacaatgcttttaaaaagcacccccaactccgaaaaaaattgtcatccctttttttagttgttctgttccgtctgcttctttcttcatcagactcttttaaagtcatttcgtctcgccagcacaagctataaccggaacttcccaaccattcagagtcttttatgctaaacaaaatagttttaaagatctttcactcacccgcctgttgcttctgatccacgggtttgacctgaaccgcagaggaaacagcgtgaacattagtgaaccctggaggcccaagctgatgttgttgagttttacccataccaccacctcctttcatgttattcgctgcagatgcagccgctatggctttcgctggatctgaagtggcggtgacagctcccgtgactggaacagcaggtgctgaacctgactgttgctggtgtctttggatgtaatacccaccagaaggagatatggtgatctgttgctgttgatgttgatgttgagcttgcatataaggattagagaagaatagctgtgcttgcggctgcagcccatgctttggcaactgctgctgttgttgcgacttggatccagagctcgtggtcgggtttccgagaacagaaggaccattattccttccaccagcagatgacgccgcagatgcaggctgtaagttcttggacggctgagatgcggagtgagtagttgtggaagcttgtccacctttgtttgccgccgaggaagcagaagcagttgttcttgggcttccgctggcatttttggagacagacgacgtcgaaggcgacccaactaacattggtggagacggagcctggtggttggttcctccttgtacctgctgcattggtgaaccagaagtcattggttttgagtttgctgcaaaagatatctgcgattgctggggacggctttgctgtttatgcgggatgtttcttagcgaagatgcagcagcaactgatgttgatggcgacaacatcgaaggagactgagcttgggtagtatttgttgtcctgggtgaattgtttttccactgctgagactgaacctgattgctactcgactggacaaggttttgagggaaccctgaattagcatttgcaaacttggtggttcccgcaggtgatgtggtcatattgtgatcagggaaaccactcccgttactcaccacgggccctttggttctggcagcagaagcagccactgaagttgcataccgttgctgcttctggaggtacatggtggtataaggttgctgcgattgactccgttgcatatgctgttgctgctgttgttgtagtagttgttgatgatgagacgtgggtaaagaacccgaactctgtggcagagcagaaccaaggttgagtaaacgggatgagctatcaacgatgctaccactcgtgacagcagaaacagatgcatcagctaaatcctgtttgttagagaaagcaatagactgcccaccattcccaccactcgttttccctattgcccctcctcctgacttcctttgttcctcaggggtattattagcagtagcagcaccaccaatagacccagattttccatcttctagtgaagcaccgtagttcattttttgttgagctgcttgagcagccatcatctgataaccttgccttgctgcttcgggcatgctgtggaacatagcgtgattctgagcaattgatgacatgtttagggtaggagcagtgttagccccattgaacgtcgcaaaagtcatagcataacccggtgactggaaggattctacaccagcctttgaaacctgctgctgtgatttcttttcaccatgactgctcgaagatccaaccaccccaccaccagggccaggggaactcatcaaacccaagttagttggttgcatttgcataccatagttctggccataggnnnnnnnnnnnnnnnnnnnnnnnnnnnnngcagttgatgggctatcttcccctacagtctcactatgttgagtagcattttctctgggttgctgcctctgctgaaaattcaaaggctgcgattgcactttatgagttggaaatccttgagagttccatgattaatcggtggcctcaactgttggttctgcagatgcttttgagctgctgaggaaccagtggaagcactcccattctggttgttaggagcatggctctggagcatttgaccagttagctgctgctgatgctgctgtttgtggctgatgatgtggaggctggatcatttgggaggaatagaatgaacaattaaaaatggc

SEQ ID NO: 35679 - DNA, 7199 bp, Arabidopsis thaliana landsberg
tgaagaagagaatgagcaaactaatgagcaagatgagaatgaaagtaaacgaactgaagaagaatcagagagtagtagccaaatcttgggcttcgattacaaatttgataacactagattttaaccattttaaacccttgtttttcatgcatttatcttagtttcatgtctcttttcatgcattcttagtctcttttccttcatttgtacattttgcattgcattacatagcatacttgcatttggagtgttttacaggtaaataaggtacttttggactcaacttggacatttctagcacaaagagtggactagctcgagttcgtgggatcaaaggaaggacttggagtatactcggctttcttactcggctggagatcgagtggagcacacaagggagaagcaaggactatactcggccaagacactcggctgaagctcgagtggtgcacatgaggaagaagggaagctgctcgaccaagctactcggcctagacccgagtgatgtgaccaaaggaggctactcgacttttctactcggccaaggcccgagtgatgcagcaccaactttcctattttgtctttttcccaattagggcatcctagtattgcctataaatagacctcttatgtttttgtccaaaatatcttagctttgtctgttggatattagggtttctagatttcttttgcattttctggttgttgtgttgagaatttgtatttgatttcttctgcaaactcgtttatcttattgagatctatcatttgctaagtttataatgatttctgggttttatgatttttctgagttttgttctatgatgttgttcagtattcttgagtagtattcttcagagttcttgatggattcctctattctttagctagctaagtgtttatatgcatgattcccttatgtttttggagttcttaatgctattttctttctgatcaattgaaaattgatttcagactttctccacctaacaagtgtttgataaaatatctgaaccaactaatttcagagatttgtagattctagcccaagacattggatgtttaagactgcttattgactttaatagattggtgtttaaagcctgctttgctatgtttcatcaatgaaaattgagattaggaagtggtagagttatgagaatcattgtcacgaaagtggattgatttggttctgaatctattgtctagggatagcttgattgagtttgttagttagctaaatggattggggagtccactagaaccaattaccccattcttaatagctttgttgcgcttagatttattgagtttcgtgttatttactcttctactcgttcagtttagtttatctgctcggtctgctttgttattctgctcgactttgttactcgacctgcatgttcatactcggccgagcatctttactttcctctacttagttcattgtttaagtttatgcattgagagttcctggtctgtagtttacttcttgcttttatcactcatgttctttaatttctgcttagtatagttagtttcttgcataatcacttaggttgttagataactcaaatcatctagacttggcttgacttagtattctctgatcatatcctgattgatagcaattacactcatttggattaacacctgaaatgctgcaatgacataagatgcatttacggaattgacacacagaaccctactatcactcactcatacacatgacatctagtcatatttgactccaaaccagtaaccaagcttcttcttacttctcaaagctttgatggtgtagtcgaagtccgtatgagtctttgtctttgtgtcttcttacaaggatacaatacttaggctttgaagatcaggttgcggtttaagttcttagactcaattatacacatggcatcaagtcatattcgactccaaaacactaaccaagcttcttcttacttttcaaagctttgatggtatagtcgaagtccatatgagtctttgtctttgtatcttctcaatttttctagtaaacttagttaaggccatattcaatttacctagccatgcacccagtccgtttcattccttagtgatggtattatcaagttcggcaaatgcccatattcactttaagattcaagttctaacttatgccgaattccgattagttaagtctaagtgagtgagcatgcatataatctaaacactagctctagaaaacatgcagacaaacacacaattggagcacaactcacggattcgatagctcataaagtcttctgggtttcgaacagaacttctcgagctcgatcgacaattcctgactcacggtcaagttttcttgcctacaggcgatgattctcgagtctcggacagagtttccttgaccaagggcaaattgtactaaattcgggcaagcttttctcggttttcggacgggttaacgatcggacagccttacagtctctctctctctcgccttcagaaatgaattttggcgcagaaagctctatttatagcccgcccaaggtcggccagactgcaccgcccactgccacatgtccggacagctgtcgcgcccacaggcgacaggtgtctcggacgacggcgtggtgacaggtggcgacgcgtgtcactccaccgtccaaccaacttcggctccaaggctcagctgactttggctccaaggttggtaacttgagcgcaagggcaccgcgagtgatgtgtcctacccatgtcagttccgcggccggtggggcaaacttcgcccgcggcacttctgatcttgcccaaacttgcccattcttgcccattcttgctcatctttgcccgttgaagttttggcaacgtttgggcatatgcagtcaattggctttgcattcaggcaaaagtttctcattcggtcctttagccgtgcccgatgcccttatgcgggtcactacattctccgctccttaatagaattcgtccccaaattctaacctttggtcattcccaacttcaatgaattctcccatcattttcacaaaggttttgaatctccttgtgcggattatacaactgtatgttctttggaccgaacttcccttcttttgcatgtttccctgaagtatgtccgttttagacttatctcgatccctcctgatttcttttctctgattcctcattcggtcgggcgttgctgatgtacttccgatggtgtttcaaactcaaacacaatcatccaatttttatacaagtgatttctcactcatataattgtcggccacacacaaacaagcaaatacttaacttattatacattcaaaagttcatacaagtcataagtaccggattctaaacttagtcttacatactattcaacaagttctaagccttagcatatttacacacaaaattcgctatgacctagctgattctatacttagccgaaaatgatctcacgaatcattggtcaagggttcctacacttgggacacttacaccttacccacaaaaaagaggacatcccttcattcaaacacgtctcctctgctgccgcagtcattaatggccccactcctatcgaagatccttcgtccgcatttggcaaaacatgcgggcagtacatggacacatgtcccattccctcgcaacaataacacttagcataatcatccatgtaaggcatagtctaccttggatacaagcactcttcggtcggatgatctttatggccgcatatctcgcacggacgcttagccggagtggccaacttcttcccaactgacttcctcgtcgttgcccgtattctgggcttaatcttggacttaatcccatatctgatcccaagtggatgtgagtttactacaacaatccgttggtccatagccttctccgattccattcccatttctgccgctatctttccgttccacctctcgttttctcccgccttgtcaaccaactttcctttcgacctttcttcatcaagtcttagacgattaattaatcaaagactcgtgcttcagttcctgttcaaatagcatcggatcccccctctcatttccttcatcatcactcggttcattccctttaaacatttcattctcccagcatgaatccacgtcgctaggattcgctatcatcaagatagcttgcgaactgtccgaggagatgttgatcacactcagactcttaggttctggcgttaaggattcaaatgagcctgacgaggaatcacccccatcgttcccattttctcctccttcttccccattcggaccatagtcttgcgcacactcggcaattaattgatcaatcgcgtgctctaactcattctctatctcatcttctttgtcatttcccataagcattagcatttcgtactcatcgttggctccatactcatttatttctccaagcgcaccatccgcctggataactggcacattgaacaagtctccattcgcttcttccaattctaacccatgctcgccaatgatccccagattcggaacacccaaacttccctcctcatccgtcgatggcacatagaacattgatagcatgttgttaagactatcgttcgcttgttcttcagtcgtattctcggttggtacctcgaataactcgccatcctcgaggatcatccactcaacatggatcgcttcttcactagataatgggtcatcatgatcatcagcattctccggacattcggacggatcggattcaattgacatattggacaaagtagattcactttcttcggccattatctgatcattcctggccacggacaaactgtcatcgtctgcactgctcgacggagcgaagttttcggggttgggcacattaagaccgtgcaacgaactgaaagtgttgcttcctttgctagaaaacatttgcaaaacgaggtaaacctatcctccacttagtcatctaaaagacgaacaaccggaatctaatgttgcattctgtgactcaaatttactcgataaaatcattgaaaacccaagtgtccacaagaataccaaaaattgtaacgcccccgaatcgtcctatggccggacaagccacgggcgacccatttacgctacagtgaagatgatcgatcacaacttagtagaggttccagatgaatccggttcctaaaccaaattataatcgaccctcctcccactaggaacaccacttaggcttgccaaccctcgtgatattctggtgatgagcgacccggactaggtcttatatcattaaacactcggctgcctttaagaaaacgctttatgcatagtatatagcatatacttggcaaagagttacccgaaaaatatatctttatatcggatccttgttcaaatttacataaaacaagtaattttgcagaagcaacgtaaaacatcctatttctggcattttctagtgtttgtcttcccgctatggtcatcccactatggttacatgtacgataagtagaatcatgagtaatctaagattactcagtgagctgggtctatgcacaaataaatttctagggtttaatcaacttaataggtaaacttatccatcagagatcacagagtacataataaacgtattatcatatacttataataatactagaatatgcagccaaactagacacatgaatgaaccttgggcccagcatacagccaaccttaccaaaaaagtgcaccacaacatcagcacaaactcccgcatacgtgtatacgtgttctccacacgtatgctaccacacacacgtacgtgcacacccacaccacaagtacgtacacaactgtgaacacccgagttataaccacaaaggcatataaccggaacatcaccttggctacaccgtcgtgtaaacgaccccggcccttgggtagctggcccagtctcttctggtccttcgatccccatgatgcctattgcatctcatcaagcaaacctcacaaacgaacggaatcacaaggcaaggccagctacatcccacttgaccgtagcatgcttatggatcaacttggataactttcacaagctccacacactatgatactcaatcaacactatgaaacatgtggttcgttcttaacacacataatcatagtgttctcatactttaactatcgaatactagcgagcgttgtctagacaacgcaaccatccctctcaattgaatggtgcttcttgtaatataacgactcctttagggcaaatggtgattcggtcgccacctctcctaggtattcgataacacaacctcaacaaactcaaagagaacatcaacaaaactaagagaaaggagaatcaagaacatgcaagaaagaaatcaaacatgcaagaaccaaaaccggaactcacaatcaccggcgaatcctcctaacttggtcgacgatctctaactcaagatctctctctctctcttagattatactaagggttcggactatctctagctcgaacgctctctctctctctctctctctttgtctctcaggtttttctaaaggttcggacgatctctcactttctctctatttgggtagcgattcggtgtaaagttatctaagggttcaactaaaggggtgaggtcctatttataggctaagggtgcgagtttaaggggtaagggacgaaacttgggctctacttcagcttaaggacaaaacttggtcaccaagttggctcgcccgaatggattcgtctccaagttttctttggttataaatggatgatctgcctctctaacctcatgcattttcttctttcctcctcttgtccttcattcgcctccgaggtcaatgtgcggggtgatacatttgcccctccttataggaattcgtgccgaattccctgagaagtggatgggtcggcctcattgtcgtctccttttagaattgttgattgattgggttacgtggtttagcatttagatgggatctattagctaagtgtagaatttaggaatagatctatgaaatattgaattgatattgatgttaagttaatgtatgatacttatgttacgaatttttgctcacaatcactctgttcgattctctcgtttgatcaagaacagaaaacaaagcatttaaagaagaacacaatttgttacccagttcagctaatcgatgtgattaagcctacgtctggggcaagattcgatccggcaatccactaactcaaagaagaagaattggtcaaagagcttc

SEQ ID NO: 35680 - DNA, 1396 bp, Arabidopsis thaliana landsberg
ttcaattttcatctttgcccaccagaagaacacataaggttccatgtgtgcaatttgcttcttctgttgacactgtactatctaagtctgtagggcgagcggcaattacgcaattttacccagacagaatcagatgcaccatcttgggtaacacactcagaaagagggttaccaacaagtggttacagtaagttcatagcacacgagacgggtgtgaatgtcgaataacatcacggtcaactcgtgttagccaaggaatccaattccacgaaaggtgatatagattcaagaaaaatcaccagcggagggatctgtagatgcggactttgcaaccagtccattttatccagcactagtcatggatcggcatgatcacacatgtaggaaaagcacgcgtgaggcagtcgaggcgcgactagagcgataatttactggtcaacttaatttgatttttggtaagtactttctttatggtgggttgaacaaagtgagtttagacaactcgatgaaacgatctctaaactcaatctttgttcattgggtagttacaagttagtgacaccaacttgttgaactacttttgacattaggtaagtcctctcagtaccattggtaggccaagggttgagagttcacatttgctagcaaaaggtcatatatttgggtagaaatccatttggtcatgttgttcatctgtttccttatgcgagatgaactgacttagtttgagaatacatggattaaataggagagcgaatgaacaaactcctgcatctcagcagcagggaaaacagatctccattttgagagctaatcagtcgtctctcgacactaaaaagctccaaggctccacctttgcaacaaaggatgcaaagggaacttgtataagtagtcactaccaaagtcaaacgaaataaggccacacatgaaagtggtatgcccttttgatccaacggagatgatagatgttgtttggtcacttcacaaacaacatagaaattgttttaaggaaggagtccacggaagatcacacatcagtgtagttccacaatggatcatgaccagagacctcgataccagcatgcgccaagcagcagaatcctgtgtgcacattcacaggaggctcttagtttcgccgtggtaccataagtcattaatcgagacgccattatcgaactggcaccaataatgaatctcacctggtaagaataatttgcgcaaagataacatatcgatgtagtctaataatagattatgactactaacggtgataccaacggatgccaagtagcgcaaccatgtgtgtgcatccacaggaggccctcggtttcatcgtggtgccatcggttttagtcataacaccattgctagacgtaaccaataagaaatctcacac

SEQ ID NO: 35681 - DNA, 1397 bp, Arabidopsis thaliana landsberg
tttaaaattacggagaatatcggagcaaaattaataatttccaacaattatcaacaatctaaaattacggacaaaattaataatctccaacaattatcaacaatctaaaattacggatcatatctgtttaaaatcttaactatagaataatctcttctgctacatttatcaaaacctaaccgcaacttatatcctgctattcctataaataatggttcaaagatgaaaggaaaaaacacacacgtttcgaagaaactcctttactaataccattgcttatacaaaaatggctgcacttgctttgatcacggaccttgctgatgtaaagcctttaaaaaccgaatggaaaatccaagttaagattttgcattcatgaactcaatacacgcaatactcaggagaaaccatggaagtgatcctagctgataaaaaagtaagtatagattttcgtttaaatctagaatatatcaggattgtatcttttatattattaacacaattgtatttcactaatttactaatttacagggaactttgatacatgctactattaagaaacaacatatgagagcacggaaaaccaaactattttattataaataaaacactaataaatgatgcaaaaattgttaaactataaataactaaaatttctattcaaattttaaaactaagaaacataaaataaacgtgtacaccaaagtaattttaagaacaaaagaaaaatttccaatgaaatattactattatgatatctctgctactatataattcactaacccaaaataaaataaaatcttaactaaaagtttttgcaaaaaatattgtttttacattaccttccatacatcttattttctaatattatgataactgataaatttatgatatatatactattatataattcactaacacaaaaaaacatatacaaactttaataaaaaaccatacgataatacttacaacccgcataatatgcggtacacaacattagctattgtgtcataaataacactatacatttttctatgtacattataatttatacactacaatatacatcactaaaaattattctaatatgtttattagaatataaaatctccaagtacgtgcgggttacaatctagtttgttatataaaaatagaaaaccaaaatgtaataaaaaaattataataaactctcataaaaacgaattaaaaaacattactacgataaaataatcttaaacttcaacagttaaattataatcatgtttataaatatatatgatgatacttttagaatcaaatctcgatcttggtagatttcgattcggttggattctcaacatttctttcaaattatctatgactttttttctttcttccttttttaaacatatctgaactct

SEQ ID NO: 35682 - DNA, 1017 bp, Arabidopsis thaliana landsberg
aaatttgagggtgtgtgtctcagttttttcgatattttaagagttagggtttataaaggaatagtttttgagtcatttttgtatccaattttgtagatttcgtttcagaccactccgttgaatgttcaagatccaacaaggatgatgaatttggatcaatcttcaccagttgcaagaaatgaaactcagaatggaggaggcattgctcacgctgagtttgctatgttcaattccaagaggcttgaatctgatcttgaagctatgggtaacaaaatcaaacagcatgaggataatctcaagtttctcaagtctcagaaaaacaaaatggatgaagctatcgtcgacttgcaaggttctgagatatcatatacttttacgtttcagtgatttaagttgattgagattatccaatatgtctttgtttcgtttcttctgcaggtcatatgagtaagcttaactcgtctcctactcctagaagtgaaaactctgataacagtcttcatggcgaagatatcaatgcacacgatccttcgccacgaaaactcagctgctggatctttaatttctggttgagactcttcatggtgctgaagcttgtcagttgatgttgacaaaaggtgttgttggtgttgtagcgaaacttgggaaggtcaatgatgaaaatctcagccagttagttccatttctctcactttttcagattaccttcaacttctcaatgccactgattatataagaaacctttcttgcaatggtttttgtgatctgaaactaactagttctctctcgtggtactttaaaaatgcaggattttgtcaaattatttggggactcgctcaatgttggcagttgtatgcaagaattatgaaagtcttacggctttagaggcttatgataaccatggcaacattgatatacatgctggccttcattgccttggctcttccattggaagagagattggagacagtcttgatgccatctgccttgaaaacctgaggtactacattttgtttg

SEQ ID NO: 35683 - DNA, 2687 bp, Arabidopsis thaliana landsberg
accataaaaaggaaataagtgctctatctataagtgtttgactttcaggacactggtagtggtatacaagtgatcagaccttgtcaacatgtggatgcgatgccagtggagcacctgcttcagttcctaaaccagtcagaatattaagaacaccaggtggtagacccacctcgcggcaaatatcagcgagctccaaacatgtcctggaataaaacagcatcagattggcgagttaatgaactaatagttgaagtggctagctatgatgtcaacagaaatcaaaaactcacagggaggccaactctgaaggtttcagtatagccgtgcacccagcagcaagtgaaggagcgactttccagacagccatcaataacggatagttccttgaatgcaaatatagattattagctgcctaataacatacggtttgtctaaaaaggaagatagaacacttgaagaccaatgtgatctgaatatgtaaaatttaaatccgcgaacttgacaaaggataatacacaacgatctgagggatcggttagattcaaatctgtcaatgaaatatagtaccatggagtaatcatgccaactacgccaatgggttccttgagaatataacccttaaaagtatccatcggaagagaaagaggagtcttctgctttgcatccaagccttcagctaggtcagcataatattcaaaacatccagcaacatcatcctgccaaagatcaaacatccacatttaagatcacacctacaaagaaaaccctacatttcacagatacaaaatggaagcaacagtaccatatcccatactgcttcatccaatggttaccacaatcaagcgccacgagctgtgccagatccgtctatctaacatgtacctacacatcagataacagaagactaaaactgattacacaaaagcccaaacaaaactgaggctttgtcaacacagcatcacaatcacaaacataaaatgaataccttagcagcaatagcacgtaaatacttagcacgaacagctccaggtgctttggcccaatctttccctttattccttgataatgctcttcgagcagcgttgacagcaacatccacgtcctccgttgtagctgcaggaatatcacctatctcatccaacacatacaaatccttggatcaacttcaactaaaattcatggaaagaaagtagtcgatacagcaaaagatagtcatgaatagagttaggagcaagtaatatctccacatcgaactaagaagtaaacaaaagtatacatttttacttggatctaatcgagctgtggcggattttgagaaaagcgcttaccaatgacctcttcagtagctggattaacgatcgggattcgcttcttcaagatgggttctctccattcgccgtcgatgaatagctggcgagtaggcatcggaatcgccattgttcttatctgaatctagagctccggagatggagttgctgctgctcactggatcgtggattcgtggtgcaccgtgcacgcacttcaagatttggactttataagtagctttcactaatgaagaagagtaggaggatcaaaacgaaaaagcctctcttttttccttgttctgctgacaccaaccagatcaactttttttaattataactcttttactaatctaattaaaaatgtgtatttagttccaaaataattaaaacagagatcaaattttcatattatgaacaaaaatatatagaaattagaagaactaaaaatcatacacaaagttaattagaaaaggattagagatctttaaacgtcacttttttgttttgtttttttgcaagataagaggtgaatcaaaattgaaaaaggaaataaacatgtaatatattccaaacgttgagtaaaatcctaaaccggcaaggattaggttccgtaaaccttataaatagagagttcgtatagtctttgttttcctcatcaatactcaaataactcatcgacttatattcctcaatcttccttcttcgattttcttaatttgtgatcttttgatcgataatggcgaccacaacaacaagaatcttctccttcatgctcatgatgatgagcttcaccgttctaatgggatgttgttgctcagcgaaaacctataaagttggtaactcggagggttgggggcaatctgttccgtgggttctgaccaaataaataatagtaacaaacgattttcccaaaatgaaaattgattattgaatctaagggagactgttcttacacaaggttgtgtcacaagttcattagtagtggctatctcgagcaaagtataatgaaagttagtagtggccactggccttcaattcaattattgctccatcttgagaagtgggattaaaagaaggtaactttttttaacttatttggaaaacagaatgcgtaaacaaaagagatagctactgctctaaatagtgttcatgtatgaaacttctgttttggttccacctttcttcttctacgaatctcaagttatgatcaacagacgactcgcttctttcttcaaaacagtgagtcatatacttgcttcttaacttcttaattagtgtccgcatcaaaaatgtcatgagcctaaccattgaagcaaacatttataataacaatacttatgtgtgtccgattcaacgcccaataatctctaaaatacaaaa

SEQ ID NO: 35684 - DNA, 5523 bp, Arabidopsis thaliana landsberg
  unsure (1)..(5523): unsure at all n locations
gctagcttactttgttgaggaccttaggagtaagctgaatcagatgcagaaggaagctcaacctaaaggcgttattaacactattccgtgaagaaagttcacttcaagatggtctgaagagacagattacccttcagaagagaaagaagcctattttgaagaaaggggaattgagtattctgctgtagacctctccagggaggacgctgagtatgatgatgatatcagagaggactatgcagaccctctctatcattcattttcttcttgataagtgtgaggagtcaagctagagactttaaacaagctcccttgggaggaagtcccatgattatccttgtaaataatttttactttcttgatatttttgatttgttttagttgtgtttgtgattctcaggaatagaggaataacgtgaagctagagtaaaaattcaaaacatttaatctacagatggcctagaaatcgagtacattggtcgagtatgagtgatatttaaaacctaaaaaattttaatcatcattttactcgaccaacagaagctacaaagtcttccagggagtctttcaagtttacagagaattgcgggatttcctggagtttttctagtgaacagagaatacagagaagagacaagaagacaacgagggacccgcccgtgacgcccatgtcttccatgcaagagaccaagagacatggaatctcttcactcccacttgatcaccacgcaaccccaccttcactcgatatcacctccatcactcgaccttgttttctcctccataaccaaataaactcgaccccatccttcttaaatcaacgctccctttttcttcttctactcgacctcgacgccatcaccatccccacacctattaaactcgaccccattccccttattcatcacaaccaacaaacccatcctcatcaaagccacgcactcgaccgcttctcactcgcctcttcaccaccgtctcaagatcactcgaccgcggtgctggccgcagcagaaggagagaggtcgagtttcctcagagcggtgttggccgccacagagctgatgaggtcgagtacccacatgctggagctgatacagaacagggcgactcgtctatggcctgggagcaatcacaggcatccattcacgaccaactttgttcattcttcgactgcggtaagcgccgaacttcaccattgtattatatcatctcttgtgatttgttctttgttttgtttttgtgattggatttgtcctgagtacactcttccaagtttagtcacacagtggactgtgtgatttaagtttgggggagggctcaagaagtgtttgttgcattgtatatacttttgagtctacatttatctaaggtatagaaaaaccaaaaaaatttgaaaaaatttcagaaaatgatttcacaaaaatagagtgttcatgtagttgcattacatttaggatcgagtctacagtgtttcatttaggattgttgcatatgcataggggatgatgatgtgatagccttgtaagcattttgattcaccggataaactcagtgccctcgttgctagttgtctgttgcgtagtcaatgaatttgaagtaaaactgaannnnnnnnnnnnnnnnnnnnnnnnnnnnactgtcatgatttgataccattcccgatcaatttgaagagaatattgcatactcagacactttttctaaacattagacgtgttacgacacttaaaaaaacattaggcactttgccttggcaaagttactattttaccctaaccgattgtcttcaaaccaaacccgcattaatcaaagagatcccttaaccaaaccactcgtcggtttaagcaccagatgaatttgcagttaccttatttgactttaaaagactttttcagaatcgtgtaaaaacctaaatccagtaaaaaactgcaaattactgtttgttgaagaagaaaactccggcaatatcatcctcttcatcttttctggtgactgcgcgacgcttaaccaattccggcgacgggttctctgttattaaaccctattttctacattttatcgaacaggacgacttctaaattctctcacaaaccctaaaaatcttcaacttctctgtcactgtccaccaccactgttgcacatgactttctctattgctcactctccaccggtatttcccccaaatttctccatgttcttatattgaattggattctatcttcggttctcggttatcggttctcgtttgcttgattatcggctgcttgattatcaatttctagattctatcttcggttctcggttctcgttttttgtatttcagttacaaactcatatgattgacaaaaccatatattctgttgatgatttttgctcactcttgttgtcatttcttgtaaagccttaacctttttgggtttctttcacttactagtctttgttaggttattccacttcgccttgatcctatgattattctctcatgtttagctttttacttatggtggttgtgtctgtctgttttgtttctggattttaggttcatttacgggcctaaatactgactagagtgttctccaagttcaggtgagtgattagtggaattgattgtgtcttataatgtaagctagcaccagagtgttctctatgactcattgtgttatgattttacagtacacaattagcagtcgccctttttatggacagggcacagaatcaattgacattgtgttatgattttatagtaattaatcttcagttggtttgtgaactttgttttgtttactctcttatattttggcattttcgtttccaacttgattttggtttttgaagaagaaaaaggtacttcaagtttagacttgtttttcttaaaaaaaaagtatatgaccttatggatatggaactttggtttctatacataatcaattcacatggtgttatgatttttcagtaactaatcttcagttggtttgtgaactttattttgtttactctctgatattttggcattttcaggtacctttctgagtcacttgcagagcgtcacaagcttactccatttttgcctgtgcttccacatgtttgctggctcatgaaccaaggtgagccatactgttataattagagtttctttctttcatcatatgattttctgtaattttcgtttcttgcttcagaacttctatctttgtacagttgaaaagcattttcagtggtgcttctaagagagattagttatatgttagcaaaagacatatgatagagtaattgtacaatcccataagtaagatatctttatgtgaattgtttcattgtttagttttcttttcgtatttcagttataaacaagagaatttcttgtttgggaaacgtaattcatttgtaacaaactcatttgattgacaaaaccatatgacctgttgatgaattttgctaactattgttctcatttccgaagtagccttaattatttttggtttctttcacttactaggctttgttaggttcttagagttgtccttctgctggttcttcagagtgatccttttctaatccgttctattttattttagctgtagtttagtggttacacctaatcttctgctggtttgtaaactttgttttgtttactctctggtattttgtcagtttcatttgcaacttgattttcttttgtggagatgaaaaagctacttcatatttagacttgtttaaaaaaaaaaaatcttcatatagttattatttccttttcctatatctattgctgccatatctaagatgagtttatatgtttgtgttacaggatttgtaagacagtttaacatctaaattgatagcattggtagacaagtttattctgttacactatggaaggtactcttactctgttaatctaatctaagcaagcaatagacagacatttgtgaactcgttttatttggtcctattatctgttaatctaatcttaatcttctgtacttgtttcttgctaatgacagggtcaacgtctcaggaaccatcttctcagtgtgattcaaatcttcctaatagactcttcgtcactgatcaatatccgaggggaaggctaaatatatactcaagaccagatattctatcctttctccgaaaggtttttcaggagacaaaggaattggatttcattcttcaatcttgctttggacctctattccatttgccggttagtaagtgtgcgatgtctggtaagcttatgcatgccttgctatgtaggcagctggtaacaaagaaaaagtgtgagctgtggacagtatttggtggataccccctgagatttgcattacctgaatttgcttgcgtgactggattgccctgtggggagttttctgaggattatgatccagatgatgatccggtttatgttgttggcatgaagagttactgggacaagttaattggtccagacaagactgttaccttaggggatgtttctgacatgctaaccaacaaacgcaagacattgtcatctgaccacagacttaagctcgcgtttctacttattgtagatagtgtcgtcatagcatcgaaccaaatcggtaggcctacatttaaatatgtagagatgttggcagatctagataaattcttttcatttccttggggtagagagtcttttctgaagactgtagtagagatgagacccgacaaacgaaatctcggtaagtccactggttaaagacagctgacaactgaccctatcaagagtttggtgaatcaacttcagcagaaaatattccgtttgaaaggttttcccctagagttgcagctcatagcatttcgtaacattcctggactgttagatttgttgttagatgactcaacctctaagacaatcctccattggaaacgattaactcatccaaaataagttatatcgcttcctcagattcatgctttggaaagaaacctaaaggtattcttttccacctaaattatctatattgtgtctataatattctctttctataaatccagtcttatatactattaataatcttatatttttggacagctgccagtggatccgcttatagttggagacattaatgctgaccaaagttgggtaaactaggacgatgaggtaaaagatatgaaagttgcatacatgtatgatttgataatggcatctcatcaattcaaaaaaagcgattggccaggaggtgatgacacattgcctccaatttcaatcccaaagaagaagctatctggtgttcataaaaagcacattatggaccgtaagaagaaattaggtgtgaagtttgaggctcccaaatccaagcaaaggtattcaacttgtagtaaaccggannnnnnnnnnnnnnnnnnnnnnnnntccaggctcctcattgaactacaaactaaggtggaagatgttgcatgttcttctagatcaaagcgcaaccagacaatgaatgtgcctatctaatctcaaacccatgaggtattcaagatttcaaactgttttaaatatttgaacatgatcat

SEQ ID NO: 35685 - DNA, 7253 bp, Arabidopsis thaliana landsberg
gaagtgtggcgcttacctcagtcgaagaatgatttaagtttgtcatcaatggctgcttgtgattgctctcaggccatagacaagccgccctgttttttatcagcttcagtaggtgggtactcgacctcatcagctctttggcggccagcaccgctctgaggatactcgacctctcttcttctgctgcggccagcaccgcggtctagtgatctcctcgagtgaattaggcgtgatctgctgctagatcgagtgagtgtagccatccttcttctctagtgctcccgggagtcgaatgacgaatgcctagccgggacaagtgagactctctgctcactaagctcaggcgtgtgctcaggcgtgtgctcaggctcatcaaatctcctcgatggcatctctagaggaggatgtccctgcaaaatagttgtagtagaagaggaacagctcaacttatctgtcagaaacttgatagtcttgaaacacttggcgagcagcttatcctgcttcttgcaccacctctgcagcttactgttgttcctatgagcctcactaaagcatttgctctccctcgctggaggtacatgttcatcaaaatgatacatgctagtgtcgaactccactactctgtcttcatccatcccatcctcagcagcttcttctataagatcatcctcatccaatggcggagcgttctcttagtagaggtttccaatctcaggccgaaaatcaatgttatctccctctattatccgtgtaacctcagtgctagggagaaggatgctagctctcttatctgtagagtgctcaaacctgaaccggtgcaagttcccaaccattgcgaactccaggaattcgcagtgacgtagatgctcgatatccattgcccgtggctcaagtccatcagatgtgattgggactccacaagcgatcagaatcggtgtcacaacaccacctatgcacagagcgcctcgtgctctcttgtggttattgatgacagcccaactcttgtatccacacaggtggatcagaataagtacagagagaggtgtgtcattgatttcaccttggagagacatgttgttcttagtttggcggagagtgcctttgagagccataacgatcatctccatatcagaattagtaacagtccctatgatctctcgggagtagagtacattggctatagaacgctggaagtacctgatgagagggctacgtatctgattgctcttagacctcgcagagttgagcgctatatcattcccaatggttaaccacaagtctttcaactcttctctctcgaacttgggtttagttccctttccactggggaaaccaaacaatcctttcatgctcttgatagataacctatactcatgaccatacacagagaatcgcaagaatcccaatccttcactttccaaatcatcagaggtcataccctggtaaagctccacagtgtggagaggaattgaatcgtttcttcttcataggctccttatgggtaagccatcagagtgtccaggtgacaactctggtgcatgtgatgaacatcctctagtaatccaagctgtgccagcgtagtcgagcagaactcgtttagcttgaagagccttatatactcctcagatggcaaaacatcaggtttgtgcataagttttgtggctttgtgagtatgctcaggcatttacccgtcctccagctcttcatctatcagctcatacctctctctcattgctctcttccctcgagctatctcagcttttctcctgaagttatcaaattctctatgttctctttctcgtctagaagatgaagattcagcctcatctatgtgatagtcaggatccattgacgaactgtcactgtaattgctcatgatagtcctgtagaaatttagaactcaaagctcaaacgtcaataggttagtctctaaggatagcaatgaaaccaaaattgttatcaataggcaatgaaatagattgaattgatcgagtacaattctgtactcgagtaacttgagctgttcctggaggtcgagtgaattgtggatgttgagttcagccggtgaagtcttgaggttgagtaatctctattacagtgcttcaggtcgagttaaaactcgaggtcgagtgaaatcttgaaccctgagaattcgacggtgaacgaggaggatactcgattgcggcggcgctggaaaggtcgagtgattcacggcggtcgagtgagttgttgaaatcggctgaggcggcgtttgatgtggatgaattggtcgagtatcacaacggagtcgagtgtagaggtccggtcgagtgaaggaggaaatgaactggtgacggcggttcctaggtcgagtggtcctcggaggtcgagtgaattgttgaactgtgtggacgcggcggaggtcgagtacgactagggcttatgaggtcgagttgattgtttaggtcgagtggtggagaacaggatagagtaaggtcgagtgaaaggaatggctgagattgagtttgagattctctctccatcttatcctcagcgtgtggtccatactctgttgactgggaaaactgtaggaaatctacttaaaatttgataaactccctgtaagactctgtagcttctgttggtcgagtaaaatgatgatttaaaagtttttgggttttaaacatcacacatactcgaccaatgtactcgagtgcaaggtctccaggtgcaacagatgattttcaaaattttgtactccaacgggctataccctcgatctctaggtcttctgtagagtaaaagttttgaatttttactcaatcaccatattgttccttcgttcctgagaaccacaaacacaaccaagacaaatcaaaataacaagaaaataaaaaaatttatttacagagatagtcatggaatttcctcccaagtgagcttgtttaaagtcatagcttgactcctttactcctttaatcatcaataagttgttgtatatgagcggacgtcacctgtggaagcatttgatgtgattagtatttcttgagcctttgagcattttttgtgatatctccactcttgccagatagagtggctgttccataaggcgtgacttcagtgtcacagtaggggcccttccatctagttttaagctttcctggatagagtttcaagcgagagttgaatagcagcacttgatcatcatcctaaatttcctttgtgatgattttcttgtcatgaaatagcttagttctctccttgtagattttagagctctcataagcttctaatcggatctcatctaggtcagtgagttggatcaaccgcttctcctcagcgttttttatgtcaaagttcagaagttttaccgcccacatggctttgtactcgagctcaacaggtaggtgtcatgatttttcatagagaagattgaaaggagttgtacctatgggagttttgaaagctgtcctgtaagcccacagtgcgtcatcaagctttgcagaccagtctttccttgtaatctcaacagtcttttccagaattgtttttatctccctgttagagatctcaacctgcccgcttgtctgtggatgataaggggtggcgactttgtgctttactccatgcttcttcaggaggttctcaaagaccttgttgatgaaatgcttcccactgtcactgattactaccctgggaactccaaatctcgagaagattatgatcttgaacagcttcagcacaacttttacatcgttggtaggactagcaatagcttcgacccactttgatacgtaatctacggcgaccagtatatacttgttaccgtatgaagatgggaatggacccataaactcaattccccatacatcaaagatctccacttccaagattgggttttgaggcatctcatttcttatgctgatgttgcccattctatggcatgaatcacattttgaaacaaactcctgagagtccttaaacattgttggccaccaaaagcccgcttgcagaatctttgacactgtcttaaacatcgcgaagtaaccaccatatgcggagccatggcaatgcagcaggatacctcctacttcatcttctgagacgcatcttctgtagatcttatctttacagagagtgtaaagataaggctcatcccagtagtaatggtgtatgtctctaaaaaacttcttcctttcataacttgtcaggatgggaggctctactccgcacgccaagtaattgacgtgatcagcataccatgcagattctccttcaacaacattcagttggtgcaactctttcccattgtagctctttcggaagaactctacagccatgagctactcttctggcattgaatcgtttatcggaaggggttcttcaattctcatccttgatagatggtccgctgcaccattttcaatgcctttcttatctactatctccatgtcaaactcttgcaataaaagtatccatcttaacagtcttggtttagtatccttctttgcatacagatgcctcaaagctgcatggtctgtatagacagttacctttgatccaaccaaatagcttctgaacttctcaaatgcgaatacaacagctagaagctccttctcagttgttgcatatcttccctgaacgtcatccaacgttcggctggcgtaatatatgacatgaagcttcttgtctattttctggcctaaaacagctcctactgcataatctgatgcatcacacatgatctcaaatggatagtcccaattaggcgctcgaacaaccggagcagataccaaagcatccttgatggtttgaaaggatttgaggcagtcatcatcgaattcaaattcggtttccttgcaaaatagtctggttaacggtctcgctatcttggagaagtctttaagaaatcttctatagaatcgagcatgaccaaggaagcttctgatgtccttcaccgtttttggtggctgcaactgcatcatcacttcaacttttcttttgtcaacctctatacccttctctgatatcttgtgacccaacactatgccttccttcaccatgaaatgacacttttcccaattgagaacaagattcgtctcttcgcacctggtcaataccctgccaagattcaacaaacatgaggagaaagaggggccatagaccgaaaaatcgtccatgaaaacctccaccatctcctcaattaagtctgaaaatatagaggtcatacacctctgaaatgttgcaggagcattgcataaaccaaatggcattctcttataggcaaaagttccataaggacacgtgaaagtggttttttcttgatcattagggtgaattggtatttgaaagaaaccactgtatccatcaagaaagcaataatatggatgattagccaaacgttcaagcatttggtcaatgaatggtaaaggaaaatgatctttcctagatgcagcattcaacttcctataatcaatgcacattctatgaccagttatagttctagtagggatcagttcatctttttcatttttgacaacagtcctttttagggacgcaatgcactggagaaacccaagtactatcagagatagggtagatgacaccagcatcaagcagtttcaaaatttcttttttcactacttctttcaaattgggatttaacctcctctgtggttcaatgctggaataggattcgttttcaagatggatcctatggctgcataaactaggtgaaattccgttaatgtcggataatgaataaccaattgctctcatatactttctaagctcagataatagtaggttcacttcatcactatttaactcagcattaatgatcacagggtaagtagagtttggaccaaggaacgcgtaccttagaccttttggaagcggtttgagatcaaccttcgtgccttaagttcagaccagtcatctgaagttggaatgatgggctccctaggttcgtcggtagacaaggtcgagtggttgcttgagtacgtcctcgagagtgcaggttgaactcgagttgacccttcttcgcttattaccattacctctgttgctggtccattcaattcctcaaagggttccgattcttccatcgctttatgggagtctaacagcttctggtatccccatgtttccaaatgcagaaacccatcttcaccacttttggttaaagcactgttaagatgatcttcttctgccagctcttccagtaactcatcagctaactgatccatttcttcgatccaaaagagttgcccttctatggtaggcttcttcatcgtgtctttgacatcaaaggtcatcctaaagtctttgccaaggtttagatcaatcttccctttcttgacatcaatcatagctcctgcagtgtctaagaaaggtctccctagaatcaaagggtccttgggctcttcatccatctccaggactacaaagtcagttggtatctccataacaccgatcctaattgggaggttttcgagcaaaccatgagggatccttactgatctgtcagctaggatgagggatatattacaggacttgtattgagtgaaccccaatcttttggcgacagagagcggcatgagactgactgatgctcctaaatcgcataggcatctattgaaagccaatggacctaaagagcatggtaaagtgaatggaccaggatcactaagcttcttaggaatgatcttcttctgtatgatagcgctgcattcatgactcaataccaccatcccttgcacttcttgaattctctccacgatcaagtctttcaaaaacttgtgagagtctgggattagcgctagagcgtcaacaagaggtatccgcaactcaaccaccttaatattcttggcaaacatagctctatacttgtctactaacgctttcttgtgacgaccaggaaatggaagctgcggtttgtagggaggagggacaaagaccttttctttatttttgacggcaactggttttggaggagttgatgattctgctgggaagataggtcgagtagcacggtcgagtggttgctcgagtggttgctcgagacttaaatcctccccatcttgatcttcactgtcctcagtgactgtctttggttcctccctagttggaagtacttttccactacgcagtgtgatagcatgagcatattcttttggattctcaactactttgcctggtagttggcttgtctgttttggagctgaagaagatgcagaatgtccctctaagtataggactttagtattcagtgt

SEQ ID NO: 35686 - DNA, 4326 bp, Arabidopsis thaliana landsberg
ctctcttcacattactagcaaaaggtctcgtattcttagcctcttgtatatgtaagtagcctgcttatgtctaagcagcaaaacatgaagtagagcttctctcaataaaactctcttcactagtattaaaaagtctatgtgtgtcttaaaatcatagtattatttccttcagtttgattcttcttccgttgcattttcttctggcttgcttcccaatctccccaaccttacaatgtcttccaccataattcttccctctgttgaataacagatttataaaaaagatcaacttcagggagataagagctcaagaaggagaggatcgctctgttctttacctttatctttggagagactactgattagttgttgaaggccgtcgttagcgagtgtgtctttcaggtacattgcagcagccgcaacttcatcaggtgtgacttttccatctcgatctctgtgttcattcaaatgtgatcactttagattctaagtctcggaaacagaacactcaaacagaaaaatggagtctatatacctgtcaagaagctgccagcctttgccaattttgatatccacatcatcaatttccttctctaggttttgtatcagaccatcaaccttaaaaagtatgaccgaagagtaagcctcttaaacaaatctcatgggactttaatagtcttaaaaaccgatttaaaatctttttaccttctccattagtgcagaggaaacctcgtctgcttcagcaacttcatcagcttggtcaatatctactctagctgctttgtatgccttcattgcagctttttcaccatctacatcttctctctcgaccattgtgttatagaactccacctggagaaacagaaaaacaaagtctttcaatctacgacacaaagtgctgatcaagcattggtggacagtgtacctctttcttgaccaatctcaggaattcttcgcgctctctacacaccgactgtttatatcaaaagcaaacagagtatcaaataaatatccaataaactgctctgcatacccattgttgataaccatagactcatttttcttacagaagcggaagccaaaacgcccaaggcgcggctaagtttgcaaagatcatcttgttgttcaagaactctagctctggcctgttcttgtgcttcgctggctgttggtatggtcatctcttgcagtgccttatcctcttcaccacctttaacatccttaatccttgtaagctcttcttcttctttctcttcttcttcctgcaaatataataaatacaaaatgtaaaatctggagcaaccaaaattcggtttctctaacttcctcaagcaagcataatccaatacagtcaagtggtgtatcaagaccttgatcagttcttcttgcatctcaaggtactctaatttccgtcttcgctcagaaacagggtcttcagatggcagagaagtaataccaacagtatccacaacctcgtcaggtagagaagaaagagtagctcggacagcatcctctgctttaactcttccagcaaccgtgaatgccctgaatataaattgctattagaaatttctttgcaataaaactgatcgaagaacaaaaaaatgacagcaaagagtactggaaccaacctagagaggatcaataacgaagaggggacagaatgattaagtgacaaatccatccaatcgcgaagctacaaaattgtttcaatactaaaacattaatagctgtagagttatcttctcctgatggagtttaataaagaaataacaaagaatcaagaatcataggagtaaagaggagaaacctgttgcctcatctcttcaactgaaaccagtcccagcattccccgttccctgcaatcttcgcgtaactcagcttctgaaagggaatccacaccctcagctctaatcagtttatcatcttccttaatgctgcagtgaaaagaagtagaaattaaacatcaaattaaggtaaaaactaacaattctaataacaacgagatatggaagaatcttacctcctcagtctttttctgagcatataccgcagataagcatctgttccatatgggctaatacccatatatttgcacatgctaaccaagcgaggcctatatttgaaaaacaaagaggtatattactgtcggaacatgaacctctaagagcacaagacatctctgagatcaaacaaaaaagaaacgactaacctgctaatgttatccaaagtaagctcatcgatgaaaagctttgcaaagcccaaaagttcatcattatggactatttgacctcttcgaacctgcaaggcatgattttaagaacaaggaaaatgaaattcaaatccaaaaaccgaaagaagaggagggatttgagccaacacaaaattatgactgtttaccttgtctagaaactcatccaggtcttcagcggtttgctttacttctccagttcttgaatgtttaacttccttagccatctctctggcggtttcctgaagaaacttagcatattctatccttgcaagtaatttccttttcaaagcttcctgtgcattaacaaaagagcaacatcggaaagagaccaagaaggcaagaaggtagtaaacgaatgagtaaagcctacactctgttgaaacatacctcttctttcatcttgtcctggaaagttgatggtaacatattagggaagagcttcaagaaaactgggagcaaaaactccataaacggcacaaggatgaacactgcaaatggcactaatctaaagatatcagctgtcgttcgagttagctgttgcctttctcttctggagagactttttccaccagccaacttgagcagcaatcttgaactgattctagtgtctgcccagagtaatttggtccccagccaataatgtttcaatgttgatacaaactcatgtttccagtgagtgagcttttttgcccaatccgccctgtagaaaacagaaaatcagtacacataaaaatccatgcataaagcctggcgattaagaacgcaaaatgtgaggataaagccaaacctgttcatggaggcaacagcttttatagcaggtcctatcttaagaacaattgcccatgccctctgtactatcgatcgagcaacctttttggattcttgaagacgtttagctttcgcctttgctttaacactgctcagactttcaacagcttgatcacattcctcaggagatgcttctttcctgttcttagcaagctcatcaacttttttatcctcttcttccggtttcttagctgcaactgtagtagcattacgaatggataggctcatgtatctcatccccagagaaggaccaacttctgaacttccataaccaaatcccgaggagtgaaaaccatgaaagctacgattgaaatatccatttctagaaagcaatagaagaccatctcttcttgtaaaggacttgtgttcagtcacaggtttagtttccacgggaggacggttaataccagagtggtaagcatgtgaatgaaccgtctgagaggagtttccaatgtactgaaagctctgaatagagcgagcatagacattcaagtaatcggaaatgatattctttctcctaacgatcgctcttgacgccattttgtcaaatcccttgttgtgcaaagatgaatcacctgaacatctcccagaagagaacactcctgatagatttgaaagaggaaaaatcgctatcaaaatctgcgaaccgaaacaaaactcagacgataaatcgaaatcggtatgagaaaaatcacaatatttaccctagaaaactctcaaatggcccaagttctcgaaatctcgaatagagttcaaaaatgaagcgacgcaagcaatcgaaatgcaaagccttgattttaagaaatatgaggaattcgaagaagatattgaagaaaatatcgaagtatatcttacagtagacggaggaatttgaaaatgacgaacgctgtttaccggacaaagtgaatcacgccggagaaatttgagaggttttagggatgcggcaaataaatcgtgagaaagggttttagatttttctttacttatttttttgtatcactttttaggacagaataaataaagatatttgttttgctcacacctgtatgagtgagtgattctaaaccgttggatcagatctaggtcccagatcttttcgattgtaaccacgtgggctaatccacgatcagatgttatacttgaaccccaagggccaagacgaaaggatcgttttatattttatttttctataaaaattaatggttgtattcataattaaattagttttttttttaaagcggttt

SEQ ID NO: 35687 - DNA, 1723 bp, Arabidopsis thaliana landsberg
gttgaatatacctcattatgaatttaggacaatcaatgttttttgtttcatctgtaattaattatatctaacagtcaattaatgacaatagaaaagaataatgtgtttacactaattctgtattcactaatctagatttttgcgcaatttgaattttaaaagtttagtgtaaggtttttttttttgggtgcacactgaatatagtttagcctaagtaatactagatatatagtagtaaaaggaaataggttttaattaaattaagaagtttggttaaattcaactgttgctttgaaaccacacacacatgtcatcataaaagttgggcaaggagtttgaaagatggaacctctgcaaaataaagtttttctttccctaccttatgcatatataattattttcacaaacatagtgtaccatcaataaaaatacatatatgatctatattttggcataaagttttccattattttcttgtgataatgattatggtaaagatttttagtgcagattaattttttggttattagattatttgttctttaaaatgcagaaacattgttgaaactttataccaaatgaaagctgaatattgcttgttttttttttttgtttttttttcacaatattgcttgttttagtttgttatgttttcatttaccattcattcagtagaatatattcattagttaataaaaaagcttttaaaagagttttcttatcatgttagttcggtttacttcgcaccgttttgattggtacaaatgggtatagttctataccggacaataaattttgttatatttttgtaaaattattggtctacatttaataaaactaggctaattttgatataatgacatattaagggatttagttttttttttttggtaaggtttagattttttcttgtattgttataggaaattaatcctatatattgattaataaagacaaaaataataattaatccttatctcttttttcctctaacctcagttaacctttatcttagtaagactttttattctctttatctctgtgcataacccaatgacaagaacaacactagtcaccaacttattataactcttcatccattttctctctctcaaagtcaccccccaaagtttttttttttttttttaactttgaatgtgactcaggatagagagagggcgagacagataaagagagcttgaggaagggtttaagcagatctgcaagaaacactctctcaggtaaggtgagaactctaaaatatgaatttactcatttgacttctgaattgtgaaagtttgtttgtttggttttaaatttccaaagcttttcttttgatcaattacatgttcattgcatgtgatgtgagcatgatctcttatctggatataagatcttctccttcttctgcttatggaaagaaaaaaacatcagttttatcgaaagtgcaacttatgatttgatcacaattctttttctctctgggtatatatctctctcaatttccctaaattctagggatttgcctttctccttcattagttgtcataagcctatgttttagtatgggtaaaaggtcattagtctgtgttgttaagttaactaatcactgcatgcacgagttaaacaacattctactaataatatgttcactcttaaatgattcaaaagcttttttagatttcatggcatggtggtccactcttataaataacaaaatcaa

SEQ ID NO: 35688 - DNA, 914 bp, Arabidopsis thaliana landsberg
agacttgctttcgcccattctaaaactatgcaacttttctctcatgtaaaacctcctagctaaagaagtagttatatagtatttgtctacaacttgtacataccagcagctgtttcttccttcattatctttcatagaaccttatctcctacactgagaatgataatgcttttgttcaatatgtgtttccatcctcttcctcaatctttagagcttccatcaaaccaagaataccaagattatcacggattctcgtcttccataaagtgtaatcacctctcttatatatgaagctttagttcttcgaacatcgcaaaagacatgttgagagagtattttctaacaggaatttcgtcgaacaccttctgtgcacaaaaaaaaatactaaaacaaaaaacgtaaattgtcttacagtgctctatcataagctagaacatacacaggtctattatatgagaagaattacaatgaaattaaacgaaaagagtactgaagtttccgtaaaagccagagccatcactgcaaacaaacgaaacgacgtctctctgttttgcattatcagtgaaattacagtaacgtcacagaacaaaacaggaagagacaaaacagttaaccaaaggttaaccggaattgaaccaagcatatttaaacaaaaccacaccacataattaagaaccaaacttctcctaattagccataaaaaagattatgcatctcatcccataatccatcaggactaaaagcccaagttaaattgtcgacccatattaaaagcccatatataaaaaaaggaaatttcttcgtgaacacgctttatatatctctgtcactacgtaaccctaactaaagctattcacaattctctcttctctctcaattttctctcagtttgctctcattacgattttcgactt

SEQ ID NO: 35689 - DNA, 1051 bp, Arabidopsis thaliana landsberg
  unsure (1)..(1051): unsure at all n locations
gtatgtggagagtttttttgcatcaacctctgctctgaagcatcctcaacaacttccagggaaagtagttcagaaccctaaggactatgctactgcaaatgctatcaccatccaccaagaagatgagtctccaccaagtcatcagactcccaatactgaggacagtatgattcaagaagggggggattcaactcaaattgctgcacctgccacccaacaattcatctggactatagaacacacacctttgctgaatactcaccattctgaaaaaagttcaaaatagaaaaactcaagaaggatcagaatcaagagatgattagtagagtcagcnnnnnngaaacttacaagaagaaagtcatccaagaaaagcttgatgatcccggttcattcactctgccatgctctctaggaccattgacattcaataggtgcctttgtgatttgggagcattcgttagccttatgtctctctctacagctaaaaagctagggatcatggaatacaagttctgcaacttagctttactcttagctgatggttctgttgcacatcctaatggtctgatagaaaatttgcctgtcaagattggaaatgttgagatacctacagattttgtggtattagacgtagatgaagaagtcaaagatcccctgatcctagggagaccattcttagcttcatctagaacagtcatagatgtcaggaatggaaaaattaatctgaaccctgaaaaaggcatcaagatgaagtttgacatcagaaaagcttcagagaaatcaacaacaggaggtcagagttttgggattcaggacatggatgttgatgaagaaacagaagctagaaccccaccaaaagtcaactatacttctcaactcagcaagctgaagagaacttttgaccacaagaagagagcaatagaagggttatctcaaactgaagatcctacagaagatgactggtatgagatgagaaaaaaatttaaatggcaaagcagagtcatggagggattatcttcaagggtgatgaagctgaaagatcaactatgga

SEQ ID NO: 35690 - DNA, 2119 bp, Arabidopsis thaliana landsberg
tgaaaggaaccaacttcttaagaaaacagatttccatgaagtttatacttaatacatatgattacggttgaatcttgtgtggatccatggacttactgtgaaatgattgtctcctatcttgacagttttccatttatcttccccgtatggttcacctccagatataaccagatttggtctgaacctatgtggattgagtttttcatgagcccgtttgtaatcctcgtcttctgcaaccaaatcagtttttatcaagcgaaaaggaagaagatgtaagatgaaacggacatagaaacgtacttgcttctaatcttctgtttaggtcagcaacactctcctcggagattaacaagaactgagcttcattagcaaagttgatattgctttccaaatctctgcacaaaccaggactcttgtttctgttcaagcagtctttggaagtagagctagaataccgtagcaacttgcattgtcgaccaatggcattggtgaaccaacgattgattctagtttcctcattacggttttcaagtctgcaaccaaaatcaaatttattacaagcagctgatgtaagacagcacatgataaggagcaatgcatacatgttggcatgtgaatcaaactcatcgttcctcgggttatatgaatcagacttgattctgatgtgcaacttgtcttcgcagcgagaagattctacagacagtagtccttcctcaaggtcgataaaggtttttataagagacatctcaggcacctagaagccattcccaagaaaatcaaaattttggtgacatagctgttgatagaagatgctctattaccttcttttgggtaagaatttcaccggtcagaccctgaaccatccattctcgatcatgcagcaggccttttatgtttcaaaaaataaacacaggttatgcataaatgccaaagagatcagcccaaccactaatagaaacagcagcaccaatttggagtaaccaagcaagttgaatgaaatacctgttctgcaaagtggccaacgtatcacagaaaatccagcacatgacttgatcgggtatacagtaattgacttaaggtagtggcttggaaaagattctttactttcaaggtctgcaaatcaacaaaaaggggaagagacgccatttatactttatgaagtatttgctatctcgcaagttaagactctgtggttttccaaagatcatacgaagttgacaagctacatgcactttatttgtgtggctaacacaagtatcaattaccaaattacaaaaaggtaagcatgtaaacatggtggctttaattgaagtcacatcccagagaatgaatggcggaatcaactatacgaagtcccttttatgtcaatgtgactatgtgaatgaataaatgctccaagagagttgaattgttgctaggaacaaagcactgtacataaattcagagaaagtcccttcgctaggaagttgaggaaaccttccactgacgtcggttccattcccagtcttctttggaggtgaagcaaatgaacttatgatgaaatcaataaatttctgtgaatgaagcatataatatttattaggtagcagcaagtcgaaaatgagctttgtttataatttcgacaatatacatggaattgggaaacatttaaatcaaggaacctacatatacctttgcatcttcaaaggttgacatataaccaaacgaaaccctaacagcccctgttggttttccatttatcacatcattgtcatcccagcaaatatgcccagcctgtgttacattaaaaggatgtcacggtcaagtatataatacaagaactactaaaatcaggagcagtagaaagaatgataagcaaaataattgaacaattatacctctacattagacagtagctccgaatgggacaactcgagatactttgcacatgcgccaggattgcaaaaacatcctgtctacaccaaaatgaagtaaaatgaaagatgtaatttcagcgttcaaaacttcaaatggcctaatgaaagataaccccttggcagcgagtgcaagtccctagtcttacttacataacttcttttctataaggtggaagaattcaaagagaataaaactgaagtgt

SEQ ID NO: 35691 - DNA, 4839 bp, Arabidopsis thaliana landsberg
  unsure (1)..(4839): unsure at all n locations
aaaatcgaatgaagagcctctttatccaatttgcttttcggtctagtgaatggtggatagttgagagatggtgaagccggtccggcggtcgagtgaaagagagggaacgaagatgaggtcgaatagcggttgagtatggagaggtgagagaaagaaatcgaagtagaggttgaggggctcgtgcggtccagtgaagaggaggcgagagcggcgagagatgatgaaaccnntcccatcttccantggaagagagggagaaggcagtggcgtgagcggtgaaagctgaattgtggtcgagtaggaaaatggacgaagtggtgagggatggtgaagttggaacggcgaggtcgagtgaagaggaggcgaagttgagacggtgaaggtccgccggtcgagtaggcggcgaatagagaggagcggcgttgcgatcgagtgaaagagaggcggtgagagagatgtcgagtgatgtttggtcgagtgagagacgtgagggagagtgtgtatgcaaggtcgagtgaatggagaggaagagagatgatgtcggtggaaaaggatagggtgagatcgagtggtggagaagcagtcttgggatttcgttatctctaaaaacgcgtgggggaacaaaggtgagaggtggtgggccacgctctgtctgtttgtcctgaagcactgttctctgttgactaggaatgtctcagaaccttctgtaatcctctgtaaacttgataaactctctgtaagtctttgtagcttctgttggtcgagtataaatatgatttcaaaattttgagtttttaaaatcatcactaatactcgacccaactactcgatctcatggtctctgagtgcaacagaacttttttcaaattcttgaatttctgacatactcgatctcatgttgctctgtagagtaaaatttttaaatttttactctacctccacgctgcttctctgttcctgagaatcacaaacacagccaaaaacaaatcaaaaataacaagaaaataaaagttttatttatagaaacagtcttgggaattcctcccaagtgagcttgtttaaagtctctagcttgactcttcacactcattaagaagaaaatgggtgatagagaggatctgcatagtcctctctgatctcatcatcatattcagcatcctctcttgagagatgagtagcagaatactcaattcttctttcctcgaaataggcctctttctcttctggtggataatctatcttctcagaccatcttgaagtaatcttttttctcgggatagtgataaactcctggacgtggatgtatgctccaaggactcactttgttggttttgaattggaaatgatgtacttgatgatgaataatggattgatttgaaacaaagcggcggaaagacgataaaccgggatgatgacaagatcgagtggatgcagcggaatgataggggaacgaattgtacttccaagagtgatgaaagactcttagactactagcttgaatccaagttagatattacacactaagaagaaaacaagttgaaaagatattacacacttttcggatcaaacaagtaaaagagaaggtttttgattaaaatgtttgatgattgcaaatgagaaatacaatgagtttatataggagaggagggagaaggggaagaggtgagagaataaagacatgcaagagcatgcacaagtccacactcatgcaagctcatgcaaagagttttggaaataacaaaagcaataaatgcaaagtttgaatagaaaagagagaatgggccaaggcattgtgagtgggccttggaccacgaattgggctgataaagggaggattgaaagtgttacttagggctcattaaaaaccttgtcaagaaaacccattgggacaaaacttgacaagggaaaaagagtacaaatgagacacatgcccatttgatgatcatgtatcaaaaccaatgaggttaagataacatcttttacatactctttctcactacaagaaaacaggcgacttgcgacggaagatttcgtcggtaatccctcgcaaatcgttaatcgcgagagatttgcgaggaacaccagttcctcgcaaaacgcgtctcgcaaatggttaacagtagtaattccctcgcaaattttgcgacgaacaaaatctctcgcaaactaattgcaatttgctcgcaaaacgcgtctcgcaaatggttaacagtagtaattccctcataattaaacaaaccaaaaaagtctatgtttcttgacccaaagtaatgcaagttataatcttagaaagcttgagatggagaggatgatcatgtggctccgactgcctcatctctgatcccagcagatggagcagctgcggtattgggctcctccggtatcggattggagctggtcggctcagtccttgtagaggttctggctcgaaagagggcaacgaactctggatccttatcggcaagataatcgaagtagacgtcaaagctagtgatcttctcagcttgggttgcaatagtagcttcagcgacagccagctttcgagagagaacaaccgggtcttccccaggcagcactggaccagcatgagctgaggaggcttctatctgcaatgaaccagccccataaaccctgcctttcttttttggagcaacctgtaacaaactcaaaaccaaaaacacaacaaatcataacaggttcacattcactatgatataatgcaagccacaattgccaaatactaaggaaaacaaaatcacgaacaaaatgacataatcataatcgtttcatattcagtatatcataatgcaagccacaacaaacactgaaaaagacaatggcatgaactagctacccaagccatgcgacaatgacaaagacaaggacatgaacagacaatgacataacagtttcatattcactatgatttattgcaagccacaatagaaaatactaaggaagacaaaatcacaaacacaatgacataatcataaccgtttcatattcaatatatcataatgcaagccacaacagacttacactaaaaaaaacaatgataagaactatctactcaagccatctgacaatgacaaagacaaggatcatgaacagacaatgacataatccaagccagccaaaactatattgaagtgaaagacaaatgactgaacacaatgaaatgttgcaagccatccaaaacataatgcaagtaacccaaaacacaatgacaaaacaaaaattttacctgagcataaatcttgttcttggccttaatagataaccccccagaagctgtgctctccgtagtgtcccctgaacacagctgagactcctcctcttgaatcctcgaagaaacttctttgtaaacctcctcagactttctatcaatgaaagtcccatcagattttctatgtgtctcatctaagagcacaagaaaatctggacaagtctctccagtcatctcacactacaaccaagttcgggcagtgagtcacatgttggagcagaaaaaaaaatatggttagttgtttgttcaacaatgtaaataaagtaaaggtgcgtaggtacttacacgtttgcgagcacgggctttgtaagaagtctggccagagcgatgtttatgtatcccgaggccatccggatcatggtatcttgtatttctactgttgatactctttaattccgacttaggatccttccaaaacttaacaagacctgcccacacatctggatcaatccactttggtttggcctcatctcccttttccctccactttcccttccaccgacagacttgatcagacatcctatccttcagctttgcttcaaactcattccgcactctctcatttattgcagcgtcccagttatacacttgctacaaaaaaaacaagacacatcagaaataaacaattccaacagctttacaaaataaaacacaacttgaaaagacttacagcaaatgtctcaaaccagcgtttgatcactggtgctggtgtctgtgtccaattagcgtgaggctctttgaaatctctttcaaaaatgctccggacagtggctgctactgatgtgtcatcgtcaaacctacaaaacaagattccatcagacagagacaagtgacttatcattatgtaaattaacttagaatgcaaaacaagtgacttatacttaccagaaagttcccggaggacggttaggatctaatctaggcaaagatgcacgcccaggactttcaagcaactcttccagtgtcatgtcgttgagcctggcagttagaggattcgaatgattgtctgaaggttgaggcgaatgattttgcggttgaggagcagaaccatccggatgattagagttcagattggttggcatctgttgtgcagaggaacgacgagtaccattaacagctgaggtgttcccttcacttacactcgtgtgtggactctgttgctgctgagacagatacctcgtataatcgttcctagagaagctcatcttgcaaataaaaatgacagattagtaaagagacaatcaaactcaaattatgaaaccctaataagatctaaagagaaaatcaaacattaaaatgaaactctattataaaagaatcacaattagtcgagatatcctgtgggattaaactaaaaattttgcataccaacaaaatataaagtggtctaatgctatacacatggtcatcatctcattttgttatagctaagattaaggtttaagtttctttcttctgtttaacactcattattttcatttttgagctgtaagtacttttcttttcgtcaattaggcttaaactttttatctatgatttttttctaagtattg

SEQ ID NO: 35692 - DNA, 4673 bp, Arabidopsis thaliana landsberg
ctcaaaatggtttgctatgtttataagtcttatcttcgatccaggacagttaagagttctgttatgtttatccttttaggcaattgaggtggttgatctagaccagaaaattaaaatggtgaaagaactcgatggacatgtgatgcgatgcgtacgtgatcagaatgggaaccatgtggttcaaaagtgtattgaatgtgtgcctgaagaaaacatcgaatttattatttccaccttctttggcaatgttgtgaccctctccactcacccatatgggtgccgagttattcaggttcttgctcttagtaataaagaaagattacacagttcttgatcttatgcttctaagtaaaacacttctcgtcttatgttgcagagggtattggagcactgccatgaccctgatactcagagtaaggttatggatgaaatcatgtcaactattagtatgctggcccaagatcagtatggaaactatgttattcaggtttgttaaaaaagagttatactacaactggttattttgtataggttgcttaaaaactaatacacgttttgttgacagcatgtattggaacacggaaagcctgatgagcgtactgtgattatcacggaattagcggggaagattgttcagatgagccaacagaagtttgcttcaaacgttgttgagaaatgtttgacttttggagggccagaggaacgagaattgcttgtgaatgagatgctgggaacaactgatgaaaacgagcctcttcaggtctgtcaaacctttatttcagatgattgtcgggggaaataaagaaactattagctcataagcttcttcttcttggtatataggcgatgatgaaggatcagttcgcaaactatgtagtgcagaaagttttggagacctgtgatgaccaacaacgtgagctgatacttactcgcatcaaagtgcatcttactgctttaaaaaagtacacttatggaaagcatgtcgttgcgcgtattgaaaaactcgttgctgctggaggtatgtatatgttcctcttctcttctatgagcacattgcatttactgcatttatttgagaaagagagacaaaataagcatttttatgacatttcattgtctctaagtggttcttttcttatatgcagagaggagaatggctttgcagtccctaacccagccccagatggcttaagaccttaagtaatgtacagcttaactagggtggatggggctgccgtagcgttttgagaattaggtaagatctaagccggaaataatctgcggggaaattgtgaagaagagctttgttttctctgcaaaatctgtaaaattgtgtagtttgcggacggtttttctatacatagaaccaaacatccctctttaggctgatgagtgagagagaaaaaggcagagaatggtgtaaagatggattttagggtttccttcacacaaaagagaatggctttttcattgccaaatgtgtagaagtgagaatatgtgttcatgcttttaggacaatcccagtttagagtttttttttctccatctatgtaatttgtttcatcaaactcttgtttcctatttcacgaggaactttttcgtttcggctagtttgcaatcttcttgtttatatcgatccagttgattggtaacgtatcatagatgtaacaatcacatagcaaccttacaaacaaaatcaatcttggtctctctgcacacagtggaatagaatcattcacaatcaatttttaatcttatgaacctcttggtccagttttggctcacattgccttcttttggccacctttcttagacttcttcgatgctttatctttctcaaacctctctctttagtctttactcttcccaagaaactcagtcactccaatgtacacagagatgagaagagtagagaagcacttgtataatcaaagcaacaccatcttgaccaccactagacacaatagcttcagaagaagaagatgaatcagaagaaacgatctcctgggaaattacttccggagttacagagactctccatagttggggtttttcttggtgaagacgaagaaccctagaagacaagatctttcttcttgaaacagaccaagagagtggagatatatgctgacctttaaatggagtttgaaatcttggtctgaaatttgaaagagatagagatggtgttgttgtcgcaaacatctttccgtccactcccgcacactctatcttttcagatactggacataacccacttctgtttggttacatccaacggttcatagattattgagattgaaaagagagtattgatgggccacgaaaagcccaatatactatttttgggggccttatatttctactagtgtttgattacgcattatgagttacgccatcatcactaaactaattcagaacttaagattgtttactttgatctctaatttttcgacccaaaacaacagtgacaacgtcatgagatacgttagctttcctcaatttcttcaaacaatctcatagcctcgtatcattaattcatcataaatagccatttttcattatcatttttaatcaaacaagaacatacatcattacacaacaatggctagagcagaacagagcttaacacatgttacatggggtctttagtttttctcaaacaatgaaacatgagtcgatcccatgtagttggggcttaacccttaatcgaggcccattattttgagtaacctaagaaaaaacatcaaaaggccttactatgtacgaacgtcattaactcattactcattattatcattcattcattcattatgaatttttctcaaccataaattcagatctccaagaaaatatctttaggtctgtggctcataatcagagatggctaagacattcagacaagggtttcaaaggacaaagttaaaaaaattcacgtaaaagtatctttggccatcctcacgactagtcttccacctcttggccttaaatatgtgaccttcattgaagaaaatgatatccagaaatggctaaaacagaagaaaacttgagaaacatatgtagatggagccttgaaggcatgaccgctcttgttaccggtggctccaaaggcctcgggtcagtccccctaatattgaatatatatgagttctcatttcaatcataaatatattttttgtttttatttttaaatttactttgattatactgaatacattaatagttcaactatatatcaaagtatatgtactttgattatatttaatgtttcaaccctggaaaaaggaaaagcttgatgatgtgtaaaagccatattacatatttgcacgtgtcaatatatatgtacacaagtgtgttatgaatagggaagctgtggtggaggaactagccatgttaggagcaagagtccacacatgtgctagaaacgaaactcagcttcaagaatgcgtacgtgaatggcaagctaaagggtttgaggtcaccacttctgtatgcaacgtttcttctcgtgaccaacgagagaaactcatggaaaacgttgcctctatcttccaaggaaaactcaacatccttgtaagtttatgtataagagcataacccataaggttttgagcaagatcaagtgattttttgttgtgtattgtgtttgctttgggtctattttaaatatataggtaaacaatgcgggaacgggtataacaaagccgaccacagagtatacagcacaagattactcatttctgatggctacaaatctcgagtcagcttttcatctcgcacagcttgcgcatcctttgttgaaagcatctggttcagggagcatcgtgctcatgtcctctactgcaggggttgtacatatcaatgttggttccatctatggagcaactaaaggtttatatatactttaatatatactcaaactattaatgatccttttacgttctgaggctaacataaatatgagtatacatatctctacgcattgtaggagctatgaatcagctagcaaaaaacttagcatgcgagtgggcaagggataacataagggttaattctgtctgtccgtggttcatagcaactcctttagctaacattgtaaggcaataaaatgagaaaaaaaaatacaaagatctccttaatactatgaaattttataacatatgaattttaacttatgccaaaatctcttaattagtatctcaatgatgaagagttaaagaaagaagtggagcgtaagacaccaatgggacgtgttggaaacgcaaatgaagtatcatcgcttgtcgcatttctctgctttccggctgcttcgtatataacaggtcagacaatctgcgtcgacggaggtttcacggtcaacggcttttctttcaagccagtgctttaaagcattgattgtttgttttatattgcatctatgtttcttcgtttactgtgtatttttattttaaaataaactcgcaatctctagcgtctaaaagtgagttgaactttatcaagttcgtaggaaagaccaaacaaaactctaaaacattattacagaaagttccatgattattttctttgataaagaaaaataaaatgtgttgcatcaactaatttgagtcaaaataataaataatattgttctttgttattatgatatttttataacaaaacatgaacaagcctagatt

SEQ ID NO: 35693 - DNA, 2916 bp, Arabidopsis thaliana landsberg
ttaaaaatttgcacgatttctttaaagttttttcttaaatgttttctcaatctgccctcttcttcatctctttcgtttgtggctctcacgatcctatgttttaggttattcaacaatgaatctatcaatgtgagctgttttgttttcttttttttcagctctttattggctcaatgattgatctcaatgcattcttctttatggattttggattctttcttttttctgttcaaaaaagtttgaaaaattcttttgcatgtttttacaattgtggtcaacaacgcttagagataatttgagtttataatctggtattttggattaacaaaaattatggctaatccttttaggaaaatcatttgatgacggataatttttcaccaaggtaaaattttagtagatcctctctctaatcattggtgaatgttttgtttccatgtgaaaaaaaaaaaaacatttcttcttcaagactttatcatgttcggttttttcaatacagttatgtacaaagatcattaactttgtttgcatttgtctgcattgtataagagattagaagattaatgggtttttttttttttttttttttgggtgtggggtcaaactgttgtttttgattgtgtataattttgatttagatcttgctcattgttcttcttatccataacattgcagattttgttttctttgttttgacttacaatgcaatttttttttttttgggtaaagtatggaacatgtgggttcatgagtgagtatcactcttctacctctttttggtatcaacttgtagtttatgtaacttttgattcatatccttataggagttttgactaaatcttttggaatttacaataatgaaagtttgtgaatgattttgctttgcagagaagtttttaagataagaagtttttttagagatgaatttcacagaagctatgaatgttgtgcacaacagaatccatcaacttgaaccagagaatgcatcgaagatcataggttatctcttgttgatgcaagatcaaaacgaccgtgacatgatacgtctcgcattctgtccagattcggtgatgcgttctatgatcaactgtgttaaatgtgaattggctaaaaactctcattacaataacatcccttcttctgatcacattcaaatccgtaaattcggatcattatccggttcatcaaaccaatctcttttggtttctgcctctcctccttcggttctctctatgggaacaagtttttgggagaatacaaacgatatggattcatcattgaaagacaatgttcagtacttcttggattttgaggattctgtgaccagtcctgaattctcaactagtttcttctctcagaagaaacagagtttgtctttaagaactagtcgaagatcactgagtttaccagagtttcctctcaaaatctgccattacttcaacaaaggattctgcaaacacggcaacaactgtcgttatttccatggaaaaatcataccggagaaagatagttttgcgcagatgtttaatccaaaagacaacaacctaagcgacgaagagcatgttgtttcccctggatcacttgagaagctagaaagagagatcattgagctgcttaaatcaagaagaggtgctccaatttccatagcatttttgccaatgatgtaccacgagaagtatggtaggagtcttcaagctgaaggatatctcacagagtcacaaagacatggcaaagctggttttagcctcaccaagcttcttgctcgcttaaagaacaccatccgcctcatcgacaggttagttacttagtcacgtaacacatattaacaaatgaatatacgaggaagtgtagtttatgcattgttttgcttaatggtgtttgaattgtaggcctcatggacaacattcagttatactagctgaagatgtatcaaagtttgtggaatatacgggagagagaagcgaacatggagcaatcttagctggttcaaggcaggtttacttgacatttccggcagagagtagtttcactgaacatgacgtttcaaactacttctctgaagttggaccagtggaagatgtaagaattccatgtcaacaaaagagaatgtatggatttgtaacttttgtttatatggaaaccgtcaaacgcattcttgctaaaggcaatcctcatttcatatgcggagcacgtgttctcgtcaagccttaccgagcataattaggttcgaggaaattccaaaaactgttatcacatcatcgtctttgtctttggggttagactgtttggtcggatggcatgggccatggagttaggttttttagactatttggtttatgacagggggtgagacacaaaacatatataaaggatctgttttcaggtgagcaagttaagaaacataaggtacatgggttatctcttattgaacgttttgatatttcattgtatcatatgacaaatccttctagttttacgaacaatgttagaaaaatgtatgggtagtttcgcctacttaagaaaatatcgccatatcaacgatgaatagtctgtatgatcagaaacttatgaatgttgaacacttatatattgtacaatgaataagagatgaataacattgaaaacataattttttcgctaacaatgaaagaaatgaatattcaaaaaaatatttcatcgtgtcttgcgaaatgtagttaattctaaggttataaaaccaaaaaaaaaaattgatctggaaaatatacctgaccaaaataatagcaagatttgctaatagaaagaattgacaacaatctggaaaatttataggaatataaatagatattaaatctgacgcgagccaccatttatattcaattcttcttctagtgttccattacacatgcgatacgtatttacataccagaagacatg

SEQ ID NO: 35694 - DNA, 6971 bp, Arabidopsis thaliana landsberg
  unsure (1)..(6971): unsure at all n locations
gctgcaagttatgcttaacattggatttgattctcggtggttctggctctgactcctgccatcaaaaaccaaaatcaagtgaatggtttgcaaaatgctcaatgaacaattcatcatatccataactccgatactagagatctaaaaggaaccaaacagagaagaatttcagaattcaattattcaattcaaatcagtaaaccaattgatcataaaccaagaagaaaagactggcaaatccatttcagaatcaattcaaaacaatgaatgttatgatggattagttgatcacaaacccccgcttcgaattctcaactattttggattaaaaagagacttttagttctcaaagaagaaacctttacataaatgtgcatctatgtgtggaccttaaaagaagaagattgatgaggcttcttgctttttcctcccatcttcaccaccaaaactctacagctatcgtaagaacaagatgatgaagaccagttaaagtatacggcggaggaggaagaggaaccacctctctgcggcggcgctccggcggtcttcatctatttgactactgaagaattgaaaattctctcctttttttgaaaagtctataaaactagtggataatatcatgtcaacgttacgcttttgtatcaacgcattatatctttaagagagaaaaaaaaatccattttttacgtgtaagaaaaaaacaaaggatccttttttactggaaagatgtttttttttttcttatcttctgagataaattgcgatagagagagagaacaaaaaaattctcagtgagcgcttattgatcaacaatggcgaaagagacagtgtgtgtaaccggagctaacggtttcatcggatcttggataatccgaacgttaattgagaaaggctatacaaaaatccacgcttcgatttacccaggatccgacccgactcatcttctgcaactacccggatccgattctaagatcaagatctttgaagcggatctcttagactccgatgcaatctccagagctattgatggatgtgcgggagtgttccacgtggcgtcaccttgtacgttggatccaccggtagatccagagaaggagctggtcgaaccggcggttaagggaacgatcaatgtgttggaagctgctaagaggtttaatgtgagacgcgtggtgatcacgtcatctatctccgcattggttcctaaccctaattggccggaaaaagttcccgtcgatgagtcgtcgtggtccgatcttgatttttgcaagtcgaggcaggttcgttaaatttcggtttaaaatggttagtgatgatttatatgatatttgtaacgattggtatataattttgattttagaaatggtatccaatttcgaagacattagctgagaaagcagcttgggaattttcggagaagcatggaaccaacattgtgacgattcatccatcaacatgtctcggaccgcttctgcaaccgaacctaaacgcaagctgtgctgttctgctacagcttttacaaggctcgaccgagacgcaagagcatcactggctcggtgtggttcacgtgaaagatgtggctaaaggtcatgtgatgctattcgaaacacctgaagcttctggacggtttttatgcactaatgggatttatcagttcagtgagtttgctgctcttgtgtctaagctcttccctgagtttgctgttcacaagtttgataaagagactcaacctgggcttacgtcgtgtaatgatgcggctaagcgattgattgagctcgggctggtttttactgcggttgaagatgcggttaaggagacggtccagagtcttagagacaaaggcttcctctgagaatgtatgatatatctttgcaaatttcaaaatctgtgagctttattgtatgatacaagtagagaaactaagggcatctccatccacgagaaacccataaagtttctcaaacaaaaaaaatattaatattatattataatttgattatttgattaaatttttattttagcgaacaaattgaaaagagaaaaatataatgatggtttgtataaagtatttcatagttcaacgacaaacattctacactctctttctttacttttaattatttttattattttaataataaaaaattaccaataaaaatggtctatcttagcttttttttcttcatttttttttccctcaaccaccattcaacaattaacataaaaaataatagtttttttaagttgaagttataagagtcaatttagtttaagtcatatgctttagtaataagcatgaccgtctaatcccaaaaaatctaaaaagtacagtgccttagaaatttcctttacctcgacttccctaattttaatcttctcggtcggaacttctgaataatattagtagagatccaaaacctcacaaatttcgaccgagttttgttgaattccgattagatctttcttccacgaaacccccccaagtacccattccatcttctccggtgagtctcccatgttggcattacgctagggttcttcttctctgtggtttcgcataacccaataatccaattttctacttgggcatcaatgggtcgctctcgagggaacttccaaaatttcgaagaccctactcagaggtttgttcctaattcactactctaatttccgatttggggtttttgtggatttctcttttgtaattgccaatttgtgctgaaattgatttgaatttcaagtttctttgagtctgtgttgtgcaattgtcattgatctctagttgggacaatgagcatggcttcaaatttgtggcttttgataactttcagtagctatagtctcctctatcttcatctatgtaattgtgccaatttctgctgaaattgattgattttgaagtttctttgcatctgctttgtgcaacaatcattgatttttcagttgggacaatgagcatcgcttaaagtttgttgcttttgaaaactttcagtagctatgtagtctcttctctgttttcatctgtgtaattgttttttcactgttgaagctgacatgaaagaatcgtgttatgcgtttgttgcagaacgaggaaaaagaaaaatgcggctaatgtggagaactttgagtctacttctttgggtaaaaaaatacttatcaaggttttttttttttgtttctcctgtcaagattcttcttttactcaacattttttatttgtggagacagtaccaggtgctgagggaggagggaagtataactgcgattattgccagaaagacattactggaaaaattaggataaagtgtgctgtctgtccagattttgatctctgtatagaatgtatgtctgttggagcagagatcactcctcacaaatgtgatcacccataccgagttatggttagttttcatttacttttcttaccttttagtttggaaagagtttgattcattatacttagcgaaaatatcttttggttgaattctaccaaagcttaatatatgtttcatttgctttgttagggaaatctaactttcccttttatttgtcctgactggagtgcggatgatgaaatgcttgtcctggaggtaccactacttcttttatcgtactgatatgaagtctataatgtctgattctttcagtgaaaagtaatttcttttaatgtctttattcagggacttgaaatttatggcttgggaaactgggcagaggttgcggagcacgtgggaacgaagagtaaagaacagtgtcttgagcactacagaaacatctatttgaactcaccatttttcccacttccggtatgctacatcgatctgataagatacctatctacctcagtagtgccagccttttgcaaggtattaactaattcaggagaaacgtttattttcccaggatatgtcacatgtagcagggaagaacagaaaagaacttcaagccatggctaaaggacgcattgatgacaagaaaggtatgcgcttctttgcttgatggttttgattctgcgttgtacgtgttgctattttaattctgattttgaagtggtttcttctttggcagcagagcagaacatgaaagaagagtacccgttctctcctcctaaagtcaagtatgtttctcgttcttctcatgtactgtacagtgataaccctataattttctcatcttttattcaattttcttgcagagttgaagacacacaaaaaggtgagttcttgctttgtatgctatatctggttcgtatataggtgtgcttatcgttttgttatttacttgctctagcttacaccagtagttataatctagttaaccatcgcgtaaatggaatcatctacttgtaaagtaagaagctgactgagcataattttaaaatccaaaaaggcccaatatttgtcattgtatttatactggtagatattttctccctttttctatgttttgacattctttgtggttagagtcttttgtagacagaagttttggagggaagaaacctgtttccacctcggtaaacaactctttggttgagctgagtaattacaaccagaaaagagaagagtttgaccctgaatatgacaatgatgctgagcaactcttggcggagatggagttcaaagagaacgatactcctgaagaacatgaactgaagctgcgtgtgttgcgtatctattcaaaaaggtacaacatttaagatcaaaaggggaacaaagtctcttctttttgctgtccattctgacgcaggtgagtatgatgtttgtaggcttgatgagaggaaacgtagaaaagaattcataatagaaagaaacctgttgtacccaaatccctttgagaaggacctgtctcagaaggagaaagtacaatgccgacgtttggacgtttttatgcgttttcattcaaaagaggagcacgacgagctactccgtaatgttgtaagcgagtaccgcatggtgaaacggctcaaagatctcaaggtaaggacattgctaccctcaaactgtgcgtttggtttcttggattggatgtggctcactgtgttggattggtggagcaggaagctcaagtggcagggtgtcgttcaacggctgaagcagagaggtatctgggaaggaagaggaagagagaaaacgaagaagggatgaacagagggaaagagagcggtcaatttggtcaaattgcaggggagatgggctctagaccacctgtgcaagcttcttcaagctatgtgaatgatttggacttgattgggttcacggagtcgcaactgctgtctgaatccgtaagtgtctgagaactgagatactgaacagtgtgagatgagttttctgtcgttgtaactgaaagaagaaagctctttgttttgcaggagaagcgtctctgcagcgaggtcaagttggttccaccggtttatctacagatgcaacaagtgatgtcacatgagatattcaaagggaatgtaacgaagaagtcggatgcatatagccttttcaagattgatccaaccaaagtggatcgagtttatgatatgcttgtgaagaagggtattgctcaactttaaggcttgtgtagtgttgtatcatatatatatatgtgtgagctctaatgagttatttgttgacattcccttgtttattacaccttgtcaaaattagtttgtaatagaaaaacgattaagttatccacagatcagcgaaaagagatcaggcgaatcagagccacacaatctaaaccaaatgttttagtatataagaaagaatctgactcctacaaggaaaggaagaagtgagatgacgatgatgtctctccccaaaatgagactatcttgtctgcaaccacacctccattttaccagtagcagatcaatagcagcagctctagcttttccaagctcaagcataaggaacagaacatcatgtcttgttcggtgtggctcagccagaagaagattgactacgaaaagtagcagaaacagcaagcttgaaagagcacaacctcctcctctgggtttggaacggcactggagatatgctgtggttggtggagtctctgtagggttgatgatggttttggtattgggaatggatgcagagaaagctatggcgcttggaccagaaggtcctttaatggaagagttttgggacaacgttagaaggtacggtctttacgctctcacggttagcactggagctctctctgctgtctttgagcccatctttgagctcctcaagaacccaatctccgccattctcattctactcatcttnnnnnnnnnnnnnnnnnnnnnnnnnnnnnnnntttctgccatgattggtgtcaacgaattcgcttatcaatacagttattgaccaactatagtttgtttttgttttcttcattaatactctgcttttatgctctgtttttttttatctattttaaattttgttacacaatcattcgacattttatttgacataagttacaccaaatcattttctattgttaaagctttttaaagatggatatatgcttgtgtgcaaatctttgtcagtcgtacttgtgagaatcctcaggccgtccggcgacgtaatccatcagtctctcgccggtggcttcttctgaaagctgttgaannnnnnnnnnnnnnnnnnnnnnnnnnnnnnaggcggctgttgacgcaaacagaggccagaaataggctaaaatgttcagaatccttggtgctgcatacacgagagacgccacaatcacgctcaccatgattgtcaccatgaaatggaatctgtattccatgagctttgcctggatctccatttccttgtgattgaacttggtaagagagagaggagagaaatggagagatgttgaatccaaaaactctgaagattgcaatataagaggaaggagactgagatggttttaatttggaagctggtacctttggctttgttgatcaacgcaagttctcaagtccttatcaagtggct

SEQ ID NO: 35695 - DNA, 316 bp, Arabidopsis thaliana landsberg
  unsure (1)..(316): unsure at all n locations
gttctgggaaaaaaagagcaacaccaaaccccaccagagcccaaaccaccaccacgccgacccgccgcccccccagaaaggaacggccacaaagggggaggggagcaacaagggcacaacgcccaccagaacgcccgaggacaaagcagcaaccagaggaaggacagacaagaaaaagggcccgcccaagaacacaggcagagcaaaaggagcaccaggacacccaacaaaaangcggcaaaagccgggaaacccgggaacaaacacccagggagacgcngagagcacaccgggcccacacaacccggaaaacacc

SEQ ID NO: 35696 - DNA, 5080 bp, Arabidopsis thaliana landsberg
ggaattgaatacacccttaacatataagtaggcctaaaaaaccttcttatcagtaactcgcattctgtttcgacaccctcggcttatttccaacctttgcaattgttcattcctaataatcgataataatgaggtcataagaaacatttcgaccctataacctaccaaaaatcatatcaatctcttgctttatttttttttataataaggggagagaaatattttctttttgacacattagtcgatttatcaggtatgaataaggagtcaagtcctatgagcactaaccattttgatgaggtaaaaggaagagcagtgagattagctccagcctttgtggattatgttaggaatggatgtccttaagtttgttgattggccttctggatttttcattagtcggattgatttgaatctgcaatacttaaacaattcaggcaataaactcgagatatagatcataatttcagacgaaagttttgactcaataaaatgactatctaagttaaaatgacacaactgactcataagaaaagaaaagatgaagttagtaactgactcccccagacttagataacactgtccccagagttattaagctagaggaatcgaaagagaaatagtcaaaagttaaaaagttagaaaatttgagttgccacctgagagtggtgtcgatcgataccatgatggtgtcgatcgacactctggtcgtttcgcattgctttgtgaattctgctcattgttgtagagccttggttagtgttttcacatggatcctccagttagactgttaaatcactaaaacacacatcaatagttccaacaaagcataagaaaataagtgctaaaagtttcaaaacaaataaccaatagtctgatataaaccagaaacaaagtcagaaaataaaacacgataaggaggatggctagtcctcatgctctaagccggaggtgggtgcgggagagcgacgaagacgacgactgagggcaacacaaccgcaacgagaaagtgtagctatggcgttccagacgctcttgaaactgtcgacgacgtactgttgaaagatctgtggctctatcgggataggagtaggagaaggcagctcatatggtagagctaaagaagaagatccaactctcggacccccaacagggtcaatgaactcatcctcagtctgagtcggtgcggatcctgaagctgaacctctctgtctcctggagcatggcgcagaatgcagacgggaaggatcataatgaaaaccaatctcctcatgctctcctgtaatctctgtaagtgtagggcaaggtaactgaatcatatggtgtcgtgtttgtctctgaaacaccaaaggaagttgcctttcagctagtgaaagttcttaagatatcgttcatccattgtgaatctcgtggtgttgacctcttctccttcaaagatgatgcgaaaatgctcaaatataggagtgagaagactgccaactctcttagatttcttccttttacgtgtaaagggcttcgtcttgagtgagaccaagtgatgagcaaacaaaacgccaaagttgacatcgcggacaacctcctcaactccaaagctgtcaggaaagaaatcatgaacagcatgatagagcaacaacagcacagaaagtctcatcttgccaggcttcatcttgcacaacagtgtgcttctaatcagcctaaccaaatatcgcaaaaaccgggtgacgaatctctgagtgaactgcgtccttggaatcaaaaattccattaccaaacctgcaccagataacctgagcatccttaaactgtccaggcagggaaactctagtgagatcaaaatcaaaaccatagatgtcacacaaatctctcggtggtagactctatctgacaccgcgaatgaagtagataagagctccttcctgagcattgcgtttcctgtcattcacatagtagaccctaacaaaaaccatgaattgtctaactagctcaggatacaaatcgtactgcctacaacagatggttcccaaacctatatcatctagcagtcctaaaacagatttctctatctgcaaacgctgcattaaaccaaaatccgcaaaccgagtaggcaaaatttctacactcatctaggcattatagaaaaaagtatcataataatcccaatctggagaaaaagggcgattgatatagtcacctttagtgaattctttgttgacatccgtctcccaaactctttgagaaagaattctttctgttagtagctttggccatggaaatcaatagataagaggttgaggcgctgcagcaggtagttgcggttgggaagggcggagaccggcggcggtggagaaggtccggcggtggtgagcagcggcggaggaggaaggtggaggaacgctcttccttgccttctttttctgcccagtcatgttgcagatcgatgaaatagatacttggggacgaaagaggatgaaattctaatgagattagagcctaaaatcacaagaaccggtgaacaatctagagagaaaagagtgatttcggcggtttgaataaaaactgaaatgaagaagatgaagtttaggttaaatcgacttaccttgaaaatgagagtgtcgatcaacaccatagtggttggtaggcagcaaatatgttttttttggtattttttttgttttttgaataaaatcctaaattaataccaaatgaatgaaataaataaaaagaaaaatcatactagtgggttgcctcccactaagcgcttgtttatagtcaatagcttgactatgttgggtttctagaatcaggaggatcagatggtggcaagaaataccgcggagaaaaacctctcatcatccatggtggcgtataggcatttgccgtgtgaggtctacaaaggaagtgcggaactttagcagtgcagaatagaggtatcggtggtctactccttttacctgcacaatcatcaaaaaaaagaacaagcactcgacgagaaactcgtggtttgcttaatcgtaaaacagtttttggaaatttgaaactcttattaatgaaatcaagaggtttaagaggaggagatgagtaccttagccgtttaggaggtggatcaaggagtagaggtgcagtgggtgacttgactatagtgcctggagtatcaacagtgaactcaacacaaaaactagctctaataaagaactctagctccgcctgtgtggggtgtcgatcgacataggtggtggtgtcgatcgaatccatccctccagattgattctcagcaactaaatcatgacttgctttttgtagctgcccgcttgtaccatgaaccttatctatctcaacactagtgtctatagagtgctctacagagaatgcctgaccatctatggtgggtggcttcttcaacttgtccatgtcaagagtcataaccacatcacactcattcaaaacaattggaatttctgtagatatagagcaatcgagtacataactacctggatcgctggcattgattatttcagagataggcattgccagcttgtccttcatcgtccgtggagcatcacacatcagaagtgtaatgatttcggcattaagcaagcttgcgtccttatcactgacaccattcaaaattaactcccagatatattcatgaagtatataccataggttcgtgtagtcaacataaggtaacttttctagaagcaaatcacacagcgcaaaacatctctcttcaaggatatgctgttcggtccgtatagccactagaatctcaacaaaatatggcgcagtccttgtccattgttcatggacactatcatttgttgttgacgctttggtgtcgagctcgctcgatttcgctccgtcaaacgttgaatcattgattgttcctgatgagtgtcggtcgacaccgaggtcatgtcagtcgagactgagacttggtgtcgagtggttctgtaaatcagtgtggcaagcaagcgtgagggttttctctaaggtctggtgctgaattctactccctaactgaactacactaacatcctttctatcgatccgagcattcaagtcttgaaagtcattgtacagaccatcaattctttgattcgttatcacctggctcttgagaatctgttctagcatgtattccatcctactcgtagaagtgggtggacggtgggcttggtgagtagaatagctggaatgattagcatagaatagatcaggcttgttgtagtcagcaagttgaatataacgttcatctgcaatagctgcagctctgtatcctacttggtgtcgagcgacaccctggtggtgtcgatcgtcaccctcaacaatatcaggtatcatgtttccctactcatcgattttttgaccatcctcgttgtatgcctgaccagctgtcccttaacactcctgcaacatcagatataattatcaacatcttggtgttgcaattaaattcttgaagctcctgaaacacaagaaaaagaaaaaataaaaacaagtgagaaaaaaagaacaaaataagtctagtctaaattctacacctataaaataacaagagaaaagagtttagaataatcttctctaaagggagtttccacagggttttgctcccaaagtacaaaagagaaaaggagaatagcctctccaagattaggtctaaacaatgacctttaaaactatatatatgacctaaaaacgtgatgggccttctttagaaataacagaaacttctgggccatatatggaaatcttcaaaacatcaataaattgcgtcttcgaattgtcgtcaggtattgggtcgctcgacaccaggggtgtgtcgttcgacacctacggggattttggtctgcgaactgcttctgcaacttaagttgtctgttttgctccaggattgctccataatctccaaatgcatcacaaacatgtaaagatctgaaaaagactagaaaagactctagaaataacaattagactttaaaacctatacctaaaacatagttaaaagcagtaaaaatagggttttatcaacacacatgtgccattattacctagttagtatttcccaatgttaccattacta

SEQ ID NO: 35697 - DNA, 1171 bp, Arabidopsis thaliana landsberg
tcttttcctttgagtatgaactgccagaacaccaaagaagatgagagacacaattttcgatttggattaaacagagcgagacaaagatcattgtcgaatttaggtttaataataccagaacaaatcatacataacagtaatgagtaatctcaaattctcaatccctctgaaagaactagacaaccttaatattcatcaccaataaagacacgatgaccaagcaataatttgtacacttgtaacaaacactctctgagacagaacaagttttgtgtattagctaatcaggtttcatcatagcttgaattccaaacacattgcagcatccatcacaaaaactgattatcaaccaatatcatctaaagactaatatctcaagcagaattctctataaggtatccacatatcaacatagcttctcaattcactacgcggtaatctcttcttccacgcatcaagatccggtaaatcacccgttaaagctaccgagctatcattcccattcccaagcgttagaacaaatagcttatctccaaaaacctgactcatcactctcaacgtttcctccataaccaaagctccatctctatctgaatcctcagcttccacacatttacctccaacattcaccataatcctccctctatatctcaacctagatttcaaatcctcccacacttgaggatcttgaagctctttgatcacactccctttactaaacaaatccaccaaaatacccgaaaacccggttttaacactagcgttcaaagcatcaccaatgttgataaaaatcctatctttatgatctctttcgagcttagagagaccaaagaactctctaccaacgtcaatcacggaagggtcaagttcccatccatggacagcgatctcaggagggtaaagctcaagaatcaatctagctgttgaaccagctccgaatccgagaataccaattggtccgggaggtataatcggaggcagagtagcgaaaacgtcgaagtaactatcggttaaggttttaagaaggaaagagatgctatggatgttaccgggattatcgagaaggaggagacgagaaccagcgagtgggtgattggtttttcgtgaaacttcgatgactctgatgtaattgtgacgggatttgaatttggcgatggttttgaccgcctct

SEQ ID NO: 35698 - DNA, 2043 bp, Arabidopsis thaliana landsberg
  unsure (1)..(2043): unsure at all n locations
cacgaacacaaatacatatatgtttttaatctaatccaataagttgaactagttgaattgttcatacaaatccgagaaatacaaattcaaaatacatgaattaattttttcatgtgcaacaaattcttcaagtgtatcccaggcatagtcttgttcttcctcttacgacgcttttctctggttgatggaaaccagttttttttttttgtttaaccattttttggtgtataaattcaattggctctgtcgactcgggaaaaaccatctctggtcggctcatccatttcggcagccgtcgattctcaggtgatgtgtcttcctccatcgatattgttggatcgaaatctagatcgatatctcgatatttactttgtccactctggaaacgttcctcctttagagataccatctccggtcgactcatatatttcatcggtcgctttttcttccgtcgcaacgtcttcttttctttacaagcgctttgtttgttctactctatctatagatctcgattgaagaaagtgaatggacgaaacaaaaatggctggttagatatttgcaatggtagtcattacaatgtagtaattgaatcgtgttgctctcctaatcaatccgtagttgcagaataaaatggtacaactgaaattggttcaactgatctagttcaaatggttcaactgatctagttcaaatggttcaactgatctagttcaactggttcaactgttattttacatattaaaaatacagtgttatttgtttcttggcccgggttatttattttgttgggcttgggtcggattattttggttggatttgtagtttttattttttttaaaggttatttatacatttccaccatttttgattgaaaaaaaaagataaataaaacaatgaactggtaagagatgtttcagatgaggagattacaacatcagcttttgacatagggtaggataaggcaccaggacctgacgggttcacatgcgctttttatcaacaattttggcaacacatcaaggaagcagtgttcaaagaagttcgttcttttttcagcacaagggaactagaagcaggaacaaatcatactaacatatgtctcattccaaaaccggagatcccgcgaactatgagtgattttcgccccatcgcgttatgtaatgtcagttacaaaatcatctccaaaattctggtgggaagattgaagaaccacctttcaggcattgtatcagaaacacaagctacttttattccaggccggaatattatgtataatgtgatcatagcacatgaaatgcttcattctctaacgtcaaggaaatgttgggctcggtcctacatggcagtaaaaactgatatctcgaaagcatatgatcgtttggattggagcttttggaagacataatgagacatatggggtttgacgtgaaatggatcacatggatcatgaagtgtgtgagttctgttactttctctgttcttgtgaatggatcaccatatggatacatcagtccaacgcgaggaatcagacaaggcgacccactctcgccatatctcttcattttgtgctcagaagtcatctcacacctccttacaaatgcaacagttgtcaacaaactaaaaggaatgaagataagctctactggccctacaattaaccatttactttttgcagatgatgccttatttttctgccatgctcatcctaaatcttgttcaacaatcatggagatactgaaaatgtatgaacatgtctcgggacaagcggttaacctccataaatcggttataacctttggctccaaagttaagcagcaagtgaagactcaactgcgaaggattttaaatatccataatgatggtggtggtgagaagtacttaggtctcccagaatagattggtggaaaaagaaagaaatcttcaactacattatcaaccgcgtgcaacaaaagactaatggatgggcaaatcgattcctttcagaggcggntgaggaaaaattaatcaagacagnggctctggctctacccgtctatacatgaa

SEQ ID NO: 35699 - DNA, 2107 bp, Arabidopsis thaliana landsberg
  unsure (1)..(2107): unsure at all n locations
caccaccaaatatcactcttccttctccaacaatctcccaaaggcgaagaaatgatctcgctatcgaatcaatggcggtcgaagaatcttcttcaaccgcttcttcactttcctctgagcttgcttctgtgattttcccctagcttgcttactccaacacactcttcttcagttctggatacaatgtgcaagtgtttgttgaagataatgagtcagaggagaggcttgtgaatcgatttaggagagaagtgatgagaactggtgttatacaggaatgtaagcgaaggaaatactttgagaatcaaaaagatgataagaaacgtcgaggcccatttatcatcttgaaggatccacaaaattttatttcgggtcgggtttagtcgcggttcgggtcgactgtgatgataacaggaattgtctattttacctttacttttttgtttgattttttgtgataacgtgttttttaaaaaaggctcaaacggcttgtattttggttgtccctgattctctcttattagtatagatttaggaaaaattttgttttattttaattatattttactggttaaatcaactataattaataatattttttttaggtaaataagattcttatagttttctaattcgtatccaaaaatctttacattacttataacgaaagagaaagagtattatttttacatattaaataagaaaagtcatgattatttatttaaacgattgtctgtaaaaaaaaaaaacctcgaaatcgatctcgtttgcgaatctaccctccatgttccaactatgcaagtcaaccacatcaactctaaagtcatccactaaacagtccttagtgatatcgatgatgtggcatcgctaaacgcggcgttttggaatgtctctgacatccaaaaatcttgacattttttggtgttaatatagaaagtggaaaacaaaaattgggtatttattttgaaattagggttcgtggctttaccttgagcattcttatttgtcgacaatcttctctttttcatctgaattggcgaatctggtatgtttaaaatcgatttcttgtttaaaattgaagttcttgtcattttatttgtcgaatttatatttgatttgaactgtaaaatttggaggtgatcttgttcactctttgatgacagtaacgatgtttgaaagtagctctttcacaagtcaacagagaaagggtccatcaatgtcgcaaaatggcattactaggcgatgtttctgtggtggattagcaattatccaaacctctcggactgccacaaacccgggaagaatattctacacttgtgtaatgagtggtgtaagtcaatttaagtgtttttaatactgctaatgaattagtaaactccatctttcttaaattatatcttatgtgtgaatatttgacaattttaggatggaggaaatcatattttttaactttgtgatgaagcaatgatggaggggatcgggcagctatgattggaaatgcaagacctaaacaacttgattcactgcattccagactctaggactggtcatgttggaggttatgatcctaggatctctcaattgtctgaaacaattaaaatggtcatgttggtggttatgatcctaggatctctcaaaattgtctgaaacaattaagatccaaaaggacaagattgctcagacagatgaagagattgttaggctgaaagagttaattgagaagatagatgtaggaaatgcaatggagttgaagaatgtggtaattggcggtttggttgtgtttgcaatacttgtctacttgtttaaatagataagagaaacactaagttgaagttatgtctttgaaagactatgttataatgacttaagtattctagatgcaatgtctttagtttggttatggtattgtaatatgatgtctttagtttggttatgatattgtaatatgatgtctttagtttgggtatgatattgtagtatggaatgttttctagatgcaatgtttttatgtgctcagtttgtagtgtcaaaaagacacacattcatgttcttaatagaccaaanaactagaaaacacttccgattaaaattctcaattctgagacaaagc

SEQ ID NO: 35700 - DNA, 3949 bp, Arabidopsis thaliana landsberg
agacaatttccaatttattttaaaatttattaccatttgtattctacataattttatctaagacatcttaatctccttccgttatttattaattgatgtttaagatttttgcacatcgattaaagaatcatttaagttttgtttatttcttaattaaaacattatttcttgtctaatcaactaatagaaaaatattatgcacgatagaaatcgtcaaaatcaataaaaactagttaatattgcatcaaaaacgataaacatcatcaaattttggaacatcaattagaaaaaaacggagaaaatatattaaactgagtaatcaagttttttttttttttgatatcgtaatacctcattagtttaacccttttttgggaaattctttctattttacctgctggattcaaataatattattccctaaagaatttttttttttttttttttgaaatttaagaggttctgtgccgaagctcgtaatcccctcaggtctgaaaccacaacatgtaatattagtttcgtctcaagcgttactcgtaccggtgacctctaagcttcgtctagggtcttaccaattaagctaacgacacttagttacaaacattaggttactgattggtggttacgcaaaacaatgcttttttaacgaatcaaattctgcaaaccaaataaagaaagtgaattggggacacaagcaaatttacaaattcatatgctaatattatcgaggctcagttttttttttttttaataattcccaacctatgctcatcaattccacaaagaaacacctttttggctcttgtaggcctgtatcgttgtctccttccgtaccaaaatattcgagtttgagcttgtggtatttgtcctggtttatacctttggatgagagagaccctaagttttcatgagtcatgcaattcagtgtattgttctgatatatacttcacatcagagaggtttctcgatcggtttcactccatgtataccacacacattaggaggactgtatgaaaatttaaaggttaccatattttatggaatcaaagaaaaaacgtttactgaaaaagaaacataggatttcaataatagcatgagaaagcagacacacggcaagagcaaggttaattaattaggagctagtagtgaggaattggaggaggccagtaagggaagtccaagtttcttattggaacttcgtcttctgtgtagaaggtagtgcaagttttggtggtgagatcgtaaacaccaaagttatcgccaacttagttttagtgtttactttatcaaaaaaaaattctttcttgtttttttaaaaaactatcatttgtgattatattgtcatttttttttcaatttttttttctcaaatctttcttttgcatttggcttagaattttttttgacccccatgattaactattctgcctccgccactgagtttaaagactcggctgattatcagatgtgccattgctgaaaccctaaattttttgtgtgtttcgtgtcccgaatctgtatgttagacttaatactgagaatatacgtgctcaccaagtacaagataacaatgaacatacaatatttagagaatatttagaatttatcacacaaggcacataaattgctctttatcatcgaaaaaataaataaatccgattcttgttttatttttcaggaagtaaaaataacggattttgttgttgtttaatatttgttccgaaataaaatatattgtcatatgttatattgttttattcataaaatctaaaatcattcctaaaatcacggcatacttattaacagtggcaaagctagaactttctgttatggggtccaaaatattttttttaaatataaaatcatacattaaaaaataatatttttatttttgtgttttgtaaaaattaaaataatattaggttaatatttttttatttaaggtaaattatgggtctaaacttttagtaaaaatacaactttcaaatatatgtactattttttctttcatattgcaacaataattttgtactggggtcaaaatttatcctaagttggggtcattaaaattattgctaatgacagataatgaatttttgaaaatttatgggggtcaactgacctccttgtcaaacctctgcatcggccactgcttattattcgggcatacttatttttttttgttatagtaagtgatgttaaatatttctgtcaaaaataaaataatatatatatgtatttgtcaattgtaaataaccaatgttaagattaatatcagttttaataaatgatttgtatcatttacaataatagctataataattgttgtatcatattacaatatatgttttcataaagaattgtgttattttcaccaatcaataattaaaaataaaataatataaaatcttaaatttcatagaagaaaacacgattacatggttcaaacgtcaaaaacaaaccccaaaaccataattttatgtgcatcaatctctaccaagccttgaatctcatgctgaaagccctttggatctttttcatcaacatgaatcacacagagacgataggcctataatcttgctcacgatgccgctcaactcctttacgatagatctaggcctaaaaatatgcttcaattgtactttaggcgtttaactttctcacgatctctctacagcaccttgacaatgaagacaagagctatagaaaatggaaccattgtgaccttagcctgaagattctacactacgtcactaccgttggcattttttgttttttttttgcgatgccttctccgatcatcttaatcaggggagagaccgagagaccgagagaaccgagaactggcgacttggacttcttcactggttacacgaatgtagacatatacgatttggttcggtttaacgtcggctccaattttgttcaacgaaataaaaaaaaaagaacctccttttcgggtttttgttttgtttgctatatttccattttttttgggatttactctttgcttttaatgtactgtagtataacacgattacattaaagaacatattgagatctatctttatagatctaagttggaaaacaaagaattcacaaacactagattacaaaacacttgttttttagttttttcctaatcaaattaaaagttaaaaccactgcttttggttataggctttcaataatctttctcttgcacccgtatgcagtggcaaattcggaaaagacaaaagaaaaaaaaaatctaagaataacatattgaaagaggcacataggatttcaatgatagcatgggaaagcaaatacacgtgcaagagccatgttaattaagtaggaactagtagataggggttggcggaggccagtaagggaaactaacgttctttagtggccttacactagtgtaaaaggtagagcaagtttcggtggtgagatcataaacaccaaagttattgccaacaaaatagatgcagttaggcttaaggccaggggacgagctagccgggacgcagaaagcctcactatgtccaacaaaaatgcaaagatctccaatgtcttctgtatagatcatcttcttagtgtagacacaactcggtttctctccctctttaaacaccatgaactttcttgttacattatacagtgtggtgttgtcaatgtcctctaaatcctctccatacctgcaaagacatgataaagcgcgccaatatgatactcaagcaaaggattagagattttggtatatatgttatgaagacaaaagctatatatagctttaattagatagtataccacttgactaggaaaagttggccggtgggtgactccacaaggtggtctgtcctagaacatgtactcacgtcggccaactcttgaaacaccgatcttggaagatcgtcaaactccaattccacgaaatcaattaggtcgtcgtcctctgagt

SEQ ID NO: 35701 - DNA, 1418 bp, Arabidopsis thaliana landsberg
aatttgtgtaatctaccgagccgttgggctgagttcggtatcaaaggtcaagctcacttctatggaactcttcgagtccatatcccgactagctcctcctcttgaattttcagatgccatacactcgtttagttcaataacaacttgggacatggtcggtcttcttgttgaagaaggattgagacaactcatggctagctcaacagctttccaaacagaaccagaatcataatcttcatttaaattaggatccatgatgctgttgatgtctccttttgtaagcattactcctacccattctgctatatgtggcttttcacggctttggtcgatcacgggtcgatttgtgataagctccaacaatacaatcccaaaactataaacatcactcttttctgtcaaccaatttgttctatagtatctggaaaataaaatacgaagaaattataaactttctttctcattaaaaacaataataatattttaagccataatacttactcgggatcaagatatccaggcgttccagcaacaactgttgacacatgagtttcaccttcaattggaaatgaccttgaaagcccaaaatcagctagtttggcttggaagtgttcgttcaacaatatatttgtggttttgacatctctatgaaccattggtggtttacatccattatgcaagtactcaagtcctacgcgacaaatgtcattttcgtcaatggttaagcaaacgaatagaggatactaggaaaatttataatgaaactcatattgaaccttgcgcagactcgacgactatttgtagtctagtttcccaatttagaatagatccacctcgctttcctacatttgaatcaacgtataaatatgtgaaaacaccacaacaaatatgtatttgtagcaactataaatacttacctgacatatgttctctcaagtctccgttagccatgtactcgtagataagagccaagttttctccttcatcacaatatccaacgaggccaaccaaatttttgtggtgaactctgagaagaagttccacctaacgaaccacccattagctaatactcttaaagatagaaagcacttgtaaataacaactgaatattccaacaacaatcaccggatcaaaatctaacctctgccttgaaatgtttatagccttgggaagatgattgagagagcaatttaacagctacttgttgggtaccattaacacaaccatgataaacgactccaaaccctccttcaccaagaactctctgaaagttatttgtcatttcttgaacctcgaaataagtaaaccttatctttttcgagacgaatgatggttctgaatgtttagcatgttcaacatcttttacgggcaaacttggtggagactgtgcatctgcaaagtacaatgattgatttata

SEQ ID NO: 35702 - DNA, 1786 bp, Arabidopsis thaliana landsberg
  unsure (1)..(1786): unsure at all n locations
gtaaaatctaaatcttaatagtttttataaacccaacccgatattgaattttgtttaattataaaacccatttataaatctgaactaatatttaaccttgtttaattattaaatctaaactttaaccttcttaataaatttaaaccgctatatgattttatttttggtggtagataagatttaatagttaaatgaattcaattttgtttaatttaactgacaaattctaattggataaaaaaatggggtgcatttttccaaaattattagtcacactggtaattattgacaaatccgtgtgttgcctttgtgtcctcccgtgacacttctatcgccatagtgcgacctattactgcagtatgcagcctttttcctgaagctattaggtttccctatggctcctatgcctcctttagttccttctttcatgtctatatgatttgtaggttctctaaagttgagatgggtaaatgttcagctaacccatggagttggaattgtgattctcgcttgttcacaattgcttttggtcttcacaaggatactaattgtatgctttgtttgtggttgtgctttgtttgccattgttactcctttatggagatctatgttctatcaaatccccctgttggtggaaaatctttatttgcagggaatgagagcttctttggtgtttgtggactcgctgttacatcttgtttggacatgctggcttctaaaactcttgaagttcccttgcgagacatttctgtcgcttatcgttctagcacctacacgttggtagcagaagatattgtagcgaagactgccttatcgttgaagaacgccctcttgttggtgtggaatgaagactctttgggtttgcaattgttcttggattcccagatcagtgtaaaatctttcaagtcactcgaaggcaccgttgagctagggagatttctgcttgttttaagcttcctccacctccggtttatccccttgttttttgcattaatctcttgtactgcgtttgtatttgcagttctttcagttcttagtgctgtgttttactcttgtaatggagactaaatcatttctatatctatgaaatcagtttgaccaaaaaaaaaaaaagaagaatgcaccctaacaaaggcggcctttgggcaaaaactatttcaaaaaatatgtttaatttctccaaatttttccttctctttgtgctttcattggcctttgaatcaataagactcgttgatttgttgtctccatccttctcctcttctcgcagcaaaatttttcttatcattgttttacttggacatgctccaaaattatataagctctgataccatgttggaatattgattctagttcttaaaactcaacatgtacaaaaagtgtgtcaaatgaaatgtaggtgttttctcctgcgacccaaatgttgtacattgcgatgatgttttgtggcccttccacgtcaacgtatgtatggtcaccggagaaatgcgttgggatgattcctccaaatactacctctccaccggtgagaccttcttctccagagttagaaaaccgtctaagccagatagagaacacattttttgcaatcttgccttggaaaaccatagagggaataacaatatgtgctcctagatgaagggcttnagcgtgacaccgagttccaatataccatcaaacggcattttcttgaaaaactctttgtaaggagtcttaacgccctctatgaaggtctgcgacgtgatgctaatcccaccaaccgtaacggtgtcaacacttacagaaa

SEQ ID NO: 35703 - DNA, 3610 bp, Arabidopsis thaliana landsberg
taaaatcaaacctagggaaacgcaagagattcgacgacgacacacagctctacttaagtctgtgggtagctcattaagggtaatttggggagaaaagtattagaaagggtagaaatgaaaatgggaaaaaaaaagggtagagttgcaaaagggcattgagaaaagggcattagagtgaattattctacttttttagttttttttatatttttataagagaataagaaggtaaatctttaatgacatatgtaaacatctgattattagacttgacacgtaacaccattatgtgagttagtaactttcaaaatgatactttatataataagatggtgattaaataaaactagggaaatttgcataaataaccaacaaaaaattataaattaagaaactaacattaaaccaaaaaaaggttgatatattatgtattttttgtattaaagataactttgccctctacactacatacacctttttttttctccctctttgcatttcatgctgcttctttcactagataccccttattcatctacacaaatgctaaattttataggggccgtttaggtctcttttacctatctgactcttttatttgcaacccattgaaaacactaaacctatttataacacaatatttgggagtttgtaaattattagtattttgctctggttatttatttgtcaatacatgtggttttttctttctccctttctctctagctagtaatctcatcttatatatatatatttttatattaaaataaaataaaataaaaaactagtttataattaccattactaacaagtaacaattattactacactaccatcccaccgccactaccgtcattgccgctaccatcatcatgtcaccactaacaattaatattaccaccatcaatgtcatttttattgccactgccaccactaccatcatcgttgccaccaccactattaccatcgtcaacgtcaccgctatagtttaccttagttacttggattgccaatattgtatctcatagggatagtaatttttttattagagcggtttaactcgatcttttgaattgtctacgttttgttctatactattttatttgtgtgttttagacaaacattgttccctaatttaaataatttgtattagattttaaaaatttaaatcatgttatactcaaaaaaatctatgttcttataaaattattgcaaaatttataagactaaatcaacaagcaaaattatttggggtgatattaatttagccatgtcattattattctgggaatttgcatgtataacctaaaaaaaattacaaattaagaaactagcctattagaaaaaatttacactataataactatataatatattatattacaatttcgccctcacaacaatcatcactaccaccactaccggcgtcacaaccaccgtcatcaacaccaccgtcgccgccggagctacccccttaccagaacgaatgacatcaccagagcaaccacccatcgtcggtgttcccagtcaccggagcctccaccgtccccggaaccaccgccggaactatcgctggagacactgttattgtcggaattatcgccgaagctaccgctatcgccggagccaccaccagaactgtcactggaaccatcgctgtcactggagccaccgctgtcgctggagccaccgccgccgccggagccaccgccgtcgccggatccaaaccaccacctatgatcatttaatctaccatttaggttagttagttaactgatacatatataatattatattcttaatattttagtgaaaatgtgttagttttgcaattcctctttatgattctctctacttttttacatatatcatcacatactctagctctgaatggatgctgattttttattcagtttttgagtttagattttagtttatagattttagattttagttttagatttttgatattatatttttgttttaaaatctccaaaaaaattggttttggtttttgagaaaaataacgttgatttagtaaaaactagatttcctaaattttaggaaaactaaaaaactataatatgaatggaaaactacaataaaataaatttactaaattgtaaaaaaaccaaaattttaaaatcttgattggtataaaaataagtttttaaaaaacaaaaaccaaaaactcttacaaaatgtataaaacattcaaaacctctttctttttgtattgtgcgtgtctttcactgtacaattttatcttttcactaatctaattactttcttaatatttttcaataaaatgttatatttttaattttacatttagactttgattataccgcaaattcacccataaaactatagatttaaaattttgaaaatctttttgtcggttttaatggttgatttataaaaagaagacggcagggggctcgggtgattgggggttgggtatccgctgaggatccgacccggaaattaccctaaacagcccaggcaaagtgttccatcgagcaagacgaaacttataccataagtagcaaaaaaccccaatttggagagataaagcgattttcgagtttcctgagcaacaacaaccaacgatgcaatcagttagggaagatgaagattcttcttctccgattcatcacgactctaaaacctcttcttctatcccttccggtgataataactccatctgggccgatgtatcacctctcctctccgccgcctgctctggtagtgatcgcaattacctattttgcttgttttagttccacggagataatttgagtcttttctttttgcagatcttcaagaaggtgaactcataaatggagataatttcaatctttttgctgccatgtctgctttagaggtttctattttgtaacaaactatgtatggactattcttagctgtaaacttagcttgtgaggttgctataagtgtataacaaacatggtgtggtgtccttgctttgtattacataatggacccaaagatggattctggtatggtgtctacgttttattctatagatgaagccatcgaaagtggttttgcgcccgtccctataagttccgatagtactgttaatgtgcaatccatcattgacattatggaccatctcctggcgtgtgaggtaatctcttctttacatgtgctcatataatactgtgtgagtttgcaaggtataattgtgataaagagatatgtatgtagctaacatgtcagccttggagttgatttatccacattttgtgtctctactcttttgcaggcaacatggcacatgggtcattcattggcccaaactgtgttttcatgcatctatgttctgaggcctgagaggacatcttcacaggctctattacattcttattgtagggtcatccgagcaacttgcagggcagttgtttctgttgtttcagatgcgcgtacaaatgaagtaattaacttttacaatttttggtcctcttttattcttgtggggctaagcaaatgtttctgtatgttttttggcttttcattaaaggtttagaatgtgttcaatgtttgcttctaaaatcttttgctatgtccaacattcttttatgcg

SEQ ID NO: 35704 - DNA, 3330 bp, Arabidopsis thaliana landsberg
aaacaaacaaaaacccacagaatatattcgggaatctacctgaaaaagagagcaagacacgcatcaatggaaaaagacttttatggatcagagatacaaacagagttttgatatgttatctcacatcaattgcagttcttgtgtacaaaaggtaacgccacacacactctcgatgaaagaaagagatttctgagtaaatggaatattaaaaaaagtatgtttgtttgctgcaatgcaaaagtcgaggttaaattcaaaaagcaaacatatacatacacatatgtgtgttacctttttcctagacaacaactgatcaaataaattactttattattagtatgaagtctgaactaagcattttccaaacagtttacattggctaatcgatcgaagtaagcgaacaatgtccagtgagcttaattatgcactagtgactagtgttataaacttcaaagggagtccaaatttcagcttataaaacctcgtaccgaattatgattatattagcgaaaccggttttgggttaaaaacacaacacatgtttatatagatagatattacatgctaacaactcatgatgagtagtaatgtgcaatgttagaaagtatggttcgttttcagaatccacctaacggttggaataactcgaaatgtacccatgagtttcctatctatatttagaacgacatgcataatcttgattgtgacactcagtaatatttctctctaacccgacccgacccgacccgccccgcccgaactctcccaagttacctttccccttttcgaccgtttctctctctctctctctattctcttcttcgatttattggtgttttgttcgcttacgcgatttctcgaagaaaaaatctcgtattcctggatcgagacaaggctgattcgattactcgctgttgctgttgttgattttggatctgtgttttgttatctgcggatcgggaaattggaaaaaccctagatatttgagccatttcgtcgcaaaattagggatttttttttcaccgctgggtttttggatctaaaggtatcgaatattgtctggggaaaaaaggaattttgaggatttgtttgatattcgctgaggaaattgatgttgttcgaaggagaagatgatagaaggctatgcatgggagggtttgtgagcggaggcacaaaagtcgtcgtcggcacatgttgatatcttcctctcgtgtaattgcgactgtggaaggtggtggttcttcttgtttgtccttatcttcatctacctcgttttctaaggtaagttctattcgatttcgtttcgatttcctcaggcggtttttttttctttcgtgtttccttctgttttggtggatgggtttgcccaaagttttgaaatttcgtctggattttgtgattctattggttgattcgagaaaatgatttttttttttttttttttttgggtttgctcttcgacttatagttttgtttggtgtttgctgtcactagcaggacgggcgcaaaattagtgttggtgactgtgctctgtttaagccaccacaggattgtccaccgttcattgggataattcgcttgatcattgctgaggaagaagataagttgaagttgggtgttaattggctttatcgacccactgaattaaaacttggcaaaggcatccttctagaggctgagccgaacgaactcttttattcctttcacgaggataatatacctgcagcatctttactgcatccgtgtaaagttgccttccttccaagaggtgttgaactgccatctcgaatcagctcgtttgtgtgtcggcgagtttacgacgttacaaacgagcgcttatggtggctgactgatcaagactatattgatgtgagattataactcatcaccaactgccttcttctatttggatttatggctttctctggtaactaaggcatttttttcctctttgcaggatcgacaactagaagtagacaagttattgtgtaagactcgttcagaaatgcatacaacattacagcagggtggtcgttctccaaagtccatgaatagtccaacaacatcacaaccgaaagatggcatccagaacaacaactctcttttctctcagggtaagggaaggaaaagagagcgtatggatcatggttccgagtctgttaaaagggaacgttctagtcgagtagatgacagtggttctggtcccctcagaacagaaagcggtttaaagtctgaaattttaaaatttacagagaaaggtggtctggtggattctgaaggagttgaaaaattggtgcagctcatgctgcctgagaggaatgaaaagaaaatagacttagttggccgtgcaattcttgcaggggttgtagcagcgacaaacaagtttgattgccttagtcgttttgtccagctcaggggattacctgtgtttgatgagtggctgcaggaagttcataatgggaaagttggagatgggggcagtcccaaagacagtgataggctagtagacgatttcctcttagtcttacttcgggctcttgataagctaccggtgaatctcaacgcgcttcagacttgtaacattggaaagtctgttaatcatctacgctcacataaaaattcagagattgggaaaaaagcaaggagcttggttgacacttggaagaaacgagttgaggcagaaatggatgcgaagtctggatccaaccagggtgtttcctggcctggaagactgagtcatgggggaaggcattcaggtggttccgcggaggcaaacaagacatcatcatcacatctacatgcttctaagtctgtctcggtcaaacaacaggtggaagacaacctgaagtgtgtagtcacgtcgccaggctctacaagatcagctccatctccgggatcaggtggtactgtttctaaagatggacagcagcgaaatgctggggctggtggtgtatctgaagtcctagcagcagtaaaagatgagaaaagtagcagctccagtcagtcccacaataatagtcagtcttgttcgagtgagcatgctaaaacaggcaatctgtgtggaaaagaagatgcaagaagctcaactgctggttcaactttgaagaagtgctccagtggctcttcaaggcatcggaaatcaaacaatgtgtttcaaggttcgtcttcgtcagcatcccctagggaaactggttggtgtagcagcttctcgtcacacaggagtgtcccgtgtgagaaaatttgtcaatcaagtttcccatctcccgagactcgtgagtttcctctaaaaaagggtaaaagtgatagattggttgtgaagcagccgcgggg

SEQ ID NO: 35705 - DNA, 2353 bp, Arabidopsis thaliana landsberg
cccgggtggcctgatgctgacaatgaatgcacaagattaaaaagacattgtgtggggcttcttgataatacccaacgtgatgagtgtctgtgattggtaaaacctcgttctttactttatctccttctgaaccttcttcagggagaacagtttgatctggctgcaatgttaactcgttctgagctgctgaatttgaaatctcatgattcttatcctgagaaaaagttgatatatctttcctgcaaaccaagtttcatataaaggtattcatatcagaaactcattcatctgagactctagatcaattcatgagaatattgaagcaagtaacactgtaagatttactcaaagtagctattagtcaccaacctagctgatgcggctgtcccatgagaagactcaatattggagtcatcacacccaatagtaaacttgtcagaagatgcctctctcacaaaattagaatcgaagctcccaaatgtcagaccattttccagcattttggcaacctgaatgtggacaggaaatgttacgtgcggccgttcaccaacatccgacttgagaagcgactcattcttgcatttactggctgcaacctcactcttaatgactgttccaaataaagccatacgtcgaatcacataagaggctgtaatcaaactcaggaacaacttaacagaatacaggatgcacttaaagcaacattagcaggcaagtaattatatggtataatttatacctcgctcggactgttgtgggatctgaaaagtttcaacaacagcatattgagtatcgttttctacaacagaatctgatacagccactgatacactactttctttagacttatccggctcaacaacatccttagaagaagaagtagccttggagagaggctgttcctctgtgtccaccttgtccacaggggatatgatagcataatgaattttctggttactgattccacttggaagacttatagggttcggggccctgaaaaagaatagaatgcgttaggaagcccatatccaaagagggaattaaagacatagacagaattaaaagtatggatacattatggaagaaggttttgtgtcgtttcttgcattgttaggagcagacgaagcagttccagaacctcctattatgtgattagctccactctgctttttaaaagctgcacttcttccattactggcatctgaatcaacaaagagcttgaatcaaggaaggaaatatagaacacaagtttagaagtaaaagaacataaaccacaatgacctgtgtaacttgaagcaaagttcttccgtccagtccggccccttccttgtgtatttggcactaaattctacaacaggtaatacacataaaggcataagagaaacgagatgatgtaagctaaacagagaactcaagaccacacttaaaatgcaaagtatggatttaaaagaacataggaaagctacctctgtcttactctcccgattgctcctcacctcatgaaatgtatctgaaagatcagtaataatatatgagtacatgtctgctatcaaagtacatgattatgttgatcttgaaacagtagacagaatcaaaacttaacccagatgcccaatctcaatcaaagctaaacagaaattccctttccacattccagctagattggtaaagatttaaaacgacagtttcttagtcatgaacccaaattctacatattccatttcaataaaaaagattccttatttgaacatccccagacatattataccaattagaaatctaaataaacaaaacataagattctaagcataacacacagattctaagacaagaccaaaatcgacaaagggcattaaatagcaaaatccaaaacaaaaccctaggagaagcacacgctcaatacaacaaaaaggaagtaaaaacactaaaacaaaaacaaatgctgaagctttctcagtaaaacaacctaaatagagaagcttctgagtggtctcatgtggatcactgaaacactccttaaagacagagaagatatcctcgtcggaatgttgtttaccggtaacctctctgatgttttgaatggtttgaagcagatcagccggaatagaaaccctagagccgccatcgccgctgatcctgctcatgttggttacagagagaaagagaagcggaggagagagcagaggaatatgggtttgaacataaagacttcgtatatagtactattatttatttccgtacaatctaccgcttaatgtctctctctacgtatatttatacgctgacgtcactgtttatcaatttcctcctcattatttgattgagtactattatttatttccgtacaatctac

SEQ ID NO: 35706 - DNA, 1557 bp, Arabidopsis thaliana landsberg
acagtacatatcaaagcccaataggcccacacattggtttatcaattattcaacttatttttgactgaaaagggaaaagttgatgagtctttagtgtttgtgagactggatatcttggcttcatcaatccttttatgtttgaagacttcttctatcttggaacaggttcactgcgagctgagtggtttttacggatgattacctcttgcggcatatggtcataccatcgccgattgataccttatgagcaaaagaaaggcggaaaaaatcaattatgagcttggaagagctttttgtgtttaggaagagggagtgatagaatccaaaaaactcaccatactaatgcttacacgttgatcatccattaattttttgttgaaatttcttaggctgatggtcctctcatcattcacctgttgaatttatcgatatgaaattatggtcattcgataagctttttagagcatgattgttcgtaagatacataccgtagaatccgcaacccatccatgccaaagaacattatcaatcacaatgactccaccaaccctgacctgcaacagtagatataacagctaaagctaaacttgacccttatggcaagaagactagcataactatgatcttggtcttacgagtcgaagtagcgattcgaagtactcctgatacatcgccttatcagcatcaagaaatgcaaaatcatagctgcaaataagtaaagcttgaaatgggtcgaatcatttcagcaattatatgaaagaggcttactgtgtatttacctggactcttcaccgttctgaatcatagacatcaaagattctgctgcaagaccatgcttcacagtgacctaagtagagtaaacaaatcaaagaatcaaccagttgtttgtaatgagatcaacaatattgagaaactattttacaagcatggctaagacttcagtctcaccttgtgagacactccggcaagctcgtagtacctcttagcaacttcaagagcgttagcatctttatcacaggcaacaagacgccctgattctggtagaaccaacgccacagccagtgatgaatatccctgtcaaaaacacgagctcgttatcattgtcaaacgaatcgaagccgacatatataacaatactcaggaaactcaaaaggaaaaaaagattaaacaccgtgtaaactccaacttcaatacatctttctgctgcaagcatctgtacaagcattgcaagcaactgcgcttgatcaggcgacacctacagccaaaatcaatagtattgtgcattcttcattttcacctcaaattccaaacaattagcataacccagagctcatcaacaagatgaatccagtgaaactgttacctgcatttggctacctcgcattttggaagtctcttccagaagttgcctcaaaatctaaaacaaaatcaagtaagacaccgaaccacaagtaaaatctctataaatcaaagtagaggaagagttacacaccttaggctcgcggacgttggagaggacatagtcgtaaaaacaaggaaaaagactgataacttgtt

SEQ ID NO: 35707 - DNA, 320 bp, Arabidopsis thaliana landsberg
  unsure (1)..(320): unsure at all n locations
aaaaataatattctaccacataaaaagttatccgaaccttcactattttcaccatctctaatgcatatctctattttttcttttattttataggaaactctattttaaaggatttatcaatataaatcttgtactcatgattaaatttgtgtaaatcaagaaaactgttaatttctgtaatatttcaaagataaatcatttacatnnaacataaagcacacacgcgaaaagcggcaagcccatacaaaaccatagaaaaggcgaaaaggaaaacagaacaccccgacaaaaaaagaacaggacaacgaaaaccagaaaag

SEQ ID NO: 35708 - DNA, 2213 bp, Arabidopsis thaliana landsberg
  unsure (1)..(2213): unsure at all n locations
aagcgaacaaaggcgcggccccacgcctctataaagagtgctgagcagagagggtttagcgaagcagtgatgggggcattagttggtataacccttgaaacgctctcatgcttcacagaagctttcacctgccttttctaaaacgccagagatctcatttctgagtcttgcagttctggcgttggagaagaactttgatagaaaagccttcttgcaatcatctcaggttgtgattgagccatggggcagattcttctcccagatgtgtgctttgtcgcccatggagaatggaaacaaacggagcttgaatccgtcttcactgacaccattgatctttgttaggttgcagagcctatcgaattcatcaaggtggtcgagtggatcctccattggcagaccatggaatttgttcccctgaatcatcgagatgagaccactcttaatctcgaagttgttgttctggatagcaggaggtgcaattcctttcctctgacggtgatcacgtggtgcatctccagcaccaatgttggcagggccattttgttgattctgttcgtcagccatttcgagtggttgcctaggtacaaagttaactgtatttctcctttctctgagttcgcgagctatgcggtcgatgttatcgttgaaaaggaggttctgattgcctgttgatcgagttcacatacagtagaggtgtacctggatcaagaagacaacaagaaaaacacacagttagcaatcggattgaaaattgaaaaagaacttgatctaagcaattctgaaatctaaaatgtaacaaaaaaacacccaattgccaacggcgccaaattgataatatgtttttaagtcaattaaacctaaagcactatcatgtcgttgtagtactgaaggttgtcaatccaaatgggtgtgatgttaacaatcaagatgtgatcagaagtcactaagtcaagccaagcaataacaggttttggtttgttctagcagtcctaagtgaacatggagaaaacagaaatcaaagagaaactgtaaaacactcgaccaacacaggtctttgcagagcactgggtgaggtcgagtgacaggtcgagtaacagacagaaagtataacacagatactcgactgcacagtctgttgccagacaactgggtggtcgagtatgaggtcgagtaacaagaaagaactgtagaaactaagcgacagataacaagatgcagtaaacaataatagagtaaacaaagagttcaatgagataaagaattcccgaggatggggtaattgagtagtttcgattccttagtttacaggtgattgacatgcttaataaattaaccctacacaacaagttcattaaccaaatctaagtaccaccgcaacagagaccctcaagttaacctagtcccagactcaatcaccattgacgagagctaacctaacaggcattacgaatcaacaagttaaagccaaaacgctcactacaaccaataccttggtacagggtcacgaatctctggaattagtggttcagacatttcatcgaacaccttttgggcgcagaaatgtctgggctcaaattccagttgatcagaaagcaataggcattaagaacaactaatgcagaagggatctaacaatcaatactcaatcacctagaatactgagaattctacactactctaacccatcctcagaaacctattcactactcaaacatcataacagaaagcataaacgttgaacaagttgaaaacatgatagcaacagtgtaatagaaggatgataacaaaatgaacaacggtaaacaaaatcaagaaaaaaagctgaatactgaatactgaatagataaagagaaatccggattacaaaaggtctagaacacaaggtctgcagaataaaactagataaaaaacttgtttgcaaaaatgtgaagtacatgctacttatagccaaatattctgaaaccctaatacttaaaannnnnnnnnnnnnnnnnnnnnnnnnnnnnnnnnnnnnnnnnngtggtcaagtgggaggtcgagtgaatagttggagtcttcttttcttccttgtgctcgagtgtctgattgagtgcggaatgaagaagaatctgaagcttgccatcgagtgtgtagtcgagtggtggtgatggtgatactcgactaacaggtagagtgatggggtcgagtgatgatcaggtaatggtggtaaagac

SEQ ID NO: 35709 - DNA, 1498 bp, Arabidopsis thaliana landsberg
ggacatcatactgaatatgagctacatgtgtctaacagctcattatatagatgataattggaagctacatatttgtgatgatgtaccaagtcaagcatcttatgttgatgtactatccaatatcttgtagtatttttatgatgcaacaattaatatctctggatctaaatatgttactgaaaaacatatatgaaagaaatattcagagtgggttggatgatagtaaagatcgggtgaatggaggatgagcacacataaactataactataaaaaagaagctgaagttttatgagtataagggaaactttgataatacaaatatgttaatctatattgaagtagttatggatctatgatacaaaatgagagggtaaagtggatgatggaaggtatgtatcctgaatttgaagctagctatttgatagaaaagataacatcaactttggacatattatttgcacactataagtatctgctatcacaagatctagtgttatctttgcatggaaaaggagaatcttctaaggacaatgggaagagacaagattggatggatggaatgtatgatgatgtttaggaaagtgaagaagctgttgttataaaatctgagtacatggagaaagagttctaacatctcgttgtacactcccttctttctacccgttgacgggaactcctagagtagttgcacaaaaagagggattcgcattattgacccaatgataaaccactaacacgctacagtcttatttagatgatgttcgggaggatcatacaaatccagattttaaaatttaacattggtggaagataacatgttctacatataaggtattgacattgattgcaagagatttattggctatatgaatcataacagttgcatcagaatctacatttagtgcgggaagtacagttcttgattgtttttatagttcattgacaccaagaaccgtgcagactcttatatgcattcaagattggtatcgtgatgatgaagaagattaaagagtacaagaaatgcttgctgaatgtgagaatattgaatcacgtaatcattttttttttatcttctacttgtatctatattattgattgggaatcattgggaaacttacaatctttgaagagtagttttttataatgtctaagactaaataaggtattcgtccatgggtatactggtcatttaacatattgaaaaaaacgcggaactatttcgaatccctgatctattatcgggccagtcgtattcaaagattggtacactggactatatgggccaatgattccaaatatgccccaataacacgacactcccctgcacgcaaataaatagcaactatttagattcaaaaactaaaggcaatcaacaataaaatcttagctaaacgaatatattcttatcccataatatccgtaaaaacaatgcaaaaatacagcaacaacaccacattcgaattcatattaacagatgtttattctataacgcaatca

SEQ ID NO: 35710 - DNA, 664 bp, Arabidopsis thaliana landsberg
ccattccatcaaatctttgagaaggggcccaatctcgtatttgatggttggcgtggcgatagactttgcttctacgactgcctccccagccgttgcaaacactgagcgagaacggtaaagggcgcacaaactatgtcgttgcgcggggatgcgattcaccaagctgggacaaactaagccgtccggggttggtggggcggattaggaatgcgaaggcctttacttcgaaaggagacccgcccactattaccacgaaaaaagccctgcccttttccttcgctactaggaaagtaagcaacctctattagcgccggaccctgagtcgaattgatcgtgtcatgtgcaacgtccatcaatgatggttcattaatgtccatagatttagactccttcccccttccctactacgaaaaagatcgagaggagcccgaaccaaaccaagaactaaaacggaagcctttcgattcgctccccattctctcttaaataaagctcgccctcgagccctgggcaggtcggccccgggtctttctttccctggtggtctgtacctgccacgagaaaagacgcaacggaagagggatgcccagtgccgcggaggatattgataagaggggcttttgtcttggtagggaactgaccaaacttttccccttattatatt

SEQ ID NO: 35711 - DNA, 2398 bp, Arabidopsis thaliana landsberg
gattaattcatttgatgtgtatacataatttaattgttatctactgtatgtgatgataaatcccagttaatatgtgttcttctaggaaagctttatccgaccaaaaaaataattttatgaaaattttattccaattttctagattgtataaaatttccccggaaccatgcaaattcagaattttttacactagagacttctacggatggcaaaattgtgaagtgtaatattgttttagacattaagaaacaagtttcgaagcggatcgttttagttaaaaggtttacaaacaatattatctcttattgaatagaaaaagtgaattggtgcaataattatgtatctgtttgtaactgtaattatagaaacatccaataatgtgaatcaatatcattgttctagcataataaaactgtagatttacaaacgtcaaacgatatgaaatgttttaccgacctctaccaaaaaatgagtgatgtgagaatatacgcgcgttatcggttgtttctcactcacctagtgacattggtcgagcggcaaatggtggtgatgactggcctcttttacgactcgcagttttagattttagtccccttaattagggtattctcagttatggggatacatctaatcacgttttgtatcatttgacaaattcagaatatcaaaacaagacacgattattatgaagtgtgttatataaatacaaatagattatatgagactcaactctaccaaggactaagaatctctcacaaaaataataattgaatggataaaattttgaggatttaaggaagatgtcccaatcccatatatatcatctcaacgcatcatcaaaacaaactcgtcaaagctgagaactccatcgtcattctgatcaaacccacgaatcataaccttacaagcatcaaccgtacacgactcgccgagtcgactcaacgtcctccgtaaactcgccgccgtaataaaatcttccccctccataacatacatcccaaacgcttctttcaactccttcctcctttcttcatcactaccatcttccccttccataagcttcaaaaactcctcaaaatctataaacccgtctccgtcaacgtctgatgtcttcaccacttcctccacctcacgtgacgataacgcgccgcctaagagactaacgcagctttgtagctcttcaccggagattttcccgtctgagtttgcatccatatagtcaaaaacggttcttagctcgttaacgtttaacgagctgcttccgctactactactgctcgttcttgcttcgtcttcaaggtttcttgacgattctgatctcttcgaggaaactttcttgtatagtcgtgacaatgatgatttttggttcttagcgagagtcatttcttgatttgaatatgaatctagaagatttggaaaatggatttctgatgcaaattcttttcaagaagtggtaggttatatatagatgagtatgtgaatgcgtgtaatggtggagagattcttgattgttcgacggttaaaacacgggtttgaatattttggtgttattatttaaagctagaggcggttgcgcggcggtggccgggaagtttcctccgcaatgagtgtttgtggggaaaggtcaagttgaccacgactaggggtgttttcgtaataatgtgatggtaagtttttctcacgtattgtgtgaaatgtgatgtcatatcgacgactagattaagaaaagtagcaaaccttctctttgactgtgattaagtatacgatgtgcggacacgtggttttggtcttttaaattgttaaactgtcatgaagtttcatataaccgtccagatatgctccacgaaagtggtatgacttcctctgttcctagaaacttgaattaaaaataaaatatttcatgtgatgaagtttcatataactgttacattcccggtcctgaattcccgttccataagaaaatatatttctatatggaccaaaagagagttttatttttatctttttgcatctcaaatgccaacttcatgtaaaagcttttactgatgtatagttcggctttctaagctcgacggttttactcggcccaccatatattgttcaaacaattcagttattctttgaaacttctccccgtaattatcgagctcaaagattatttaacaaaaacatctctgtttccccccataaaatctccttataaatacttaatttgatcctaatatcaacaaaatgttagactttaatctatatcttcaattcttgatgaaatgaatttccatgatgcggtgctggcatatcgtgaccttacttaattcacattaattaaactttctgagcaatagtttaaattgtgctataaatctcacaataaactactatgaaaactatgatcgca

SEQ ID NO: 35712 - DNA, 2682 bp, Arabidopsis thaliana landsberg
tagctgtttccatgaccattctatgtatatgattttgtgcttgcagacaggaaagaaggacgatgttgtcgaagcgggtgtctctaaaactgaagcaatcattgctcccgtcaatgagaaagagaagaaaagtgtaagacggagagttaccttctccgatgacaccaaaaatgatgataaaaaagatcctgatgtaacatttgttgaggagagagaggcaggcccggaggttttggttaaggctggcgattcgttgtacaatcctttggagaaggttgacgaagctaaattccagaaattatgtactataactcaaggagaaaaaaggtatgcatctgtgcattcacacaattatctgattgtttgtcaatcttatatcaatcataactatttaatatgtcttactaatttcaggtgtcatactcttttcggctttcggaaagtggacaacgaattcttcacaactctagccgaggctaatgattgtgttggctcatacgtaagtgaccattaattacgtacactattgtaattgtacgtatatgtaataatatgtttttgaaagtacgtacataacatcagacttttatgtacttttcagcacatggaaatgatggcactcttgatgtggcataagaacggggagcatatgaagagaaatcggtatgtcgtggtggatctcagactcactttccttctgtcaagctgtgccactgcattcagatcctgtcgtaaacccgacactttcaaatgggacaaacttctcacacggtttcccaagggagaatgccttaatcgtgaaccacagctgcattggatcagagatgtggacgtcatatttgttcccatgaactggaaagatgagaagcattgggttgggttggctatatgcctgcaacgtcgtgatattgaaatcatggatcctttgagttcgcttacgcgggagtctgtggttaggtcacgtattcttccaataatgggagatgctaccgtacctagtcagagcgacatgcaaagattatctcgataagccttataccgtgactccttttacatacataaggaatcaacgtctagctcagaatccaactaccggagattgcggtccgtacgcgatgaagtttattgagttgtacatgcttaacactcctgttgaggacaggttttcgattgaagaagatgatatgtacaacttccgtaagggttacgcagtcgagctctacgagcatggaattgggccattaacctagttattcgaagttggaactaaaccaaacttatgtgttttgtatgccttttggaacttgtgtttggttgtgtttacatttacttgtttgttttctaaacaatttattacttttggatgctatgcaacattttatgtagtaattaacaacgtacaaaaacaagatatcttaccaaagtacatacaaactacgtgtccacgtgtacatagtacacgactgttgtgtatacaggcggtaccattgatttgacatccatcaatgtaaaattaaatttctcattgaatgtaactgtaatttccccaacaatatctccatccgtggttattaaatgggaggaagaatttgacctcttcggagtatctcatttctaagatggtcaatcccactatttcagacgacttgctcgctatgatagctaagaaagtggcagacaaaagctggttggaccttaagccactgatacgatccggcactcgtggaagagacattgtctaccgaccggatgtccttaaagacgctaacatctacagcttgtgccgtgttcccgatgacttccaagtaggaggtggccataatccaaccggaccccaaggagaaggccgcaatcgaccatttttcaaaaggtgccttctcgctaacaatccgacggctgtgtataacgaagcaatacgtgttctaattcatgaaactgacatcaatggagcacttaagctcatgcagcgtcatgcacccgtccgagctgatgcaaccatcgtctgcgccatcatattcatatgcgcggggtatgaatggaactaaatttgtttacattatacatagagtacacctatttgaacgtacacaaacataaatgtacgtccatggaaggtcattacaattaggctgtatttgtaataagtaaactgtagcaattagaaggtaaaactttagcataaaagtagggatatgtttaaattcggttacaaatctgtagttatttagaataaaagaaacaagaaataaactaatagacaacgactctgatttcttccacttccggtatatccggattagcaatgaatttggagatggggccattggtcacagccttcagtttatggatcccggttagacgccaggatacgagtgcgataatgttttgaggaccagttagccgctggaagaatctttgaaattcgaaagcttgatcattttgtgcttcacattgaagaacttccttgctacagagaatatatattatacacaggatataacaaacatatagccaaaaacattaaaaataaacaacttactgtttatccattatcttaaaaggagcttccgcccacggtagtcttcggtcaaattgccaacctcaatgagcgcaccaataacatctggtgtacgtaatggaagataaaagcattatgtgtacgtcatattacaaaaatgaata

SEQ ID NO: 35713 - DNA, 1364 bp, Arabidopsis thaliana landsberg
  unsure (1)..(1364): unsure at all n locations
gacttattatctttctttgaacgagatctatattgcaaacgagtatgatttatttatttcgtccaatgaaatttaagacataccaatgctgatgcatttcttcaattatttcattttcattggaccttttgggaatcatatttgctagttgatacttctgttaaccaaacgagagttagcatagagttgacagaagattcagctcgaatgcgcacagacaaaaagaagcgtgttgagcatataaaataaaaaaggatctggagctgcagatcaaagaccttcaaaatacggttatggatcacacaaagaaggttaatgagctggagctacaaagaaatcaaattgagaaggagaaaaaaaaattgactagatacatgaaaaagttaatgaacataaagttaattatatagtaaacagtgtaacataaattttcagtttattaatagaaaattgagaaaatttatcaagatagactagtgtggggatctatgtcaaaaccataaatgtgaccaagctcttagtaaaatatgttaccatttagataaatatgatttgtttctttgtttgtaatcaacatatattaagataaaacttaaaactacacagatttagtgaaaactttttatatatcattgaaataatgattatctaccttacatagatttctagtgcataatcgcaaatgattcacgtgtataaatattagcctcatgagtcgtgatgtactatcgccctaatataattgttgtgtcctttgaaacctatttaacaatgtcgcaaagcaagtaattgcttaatttctctctttcagtctctcacacacatttaacatttttattaattcgtttacaagttgttgttttttttttttatatataaattattattattattattatttttcattcataaaattccaataatccgaaaaacgttacaagaccaaacggtccagcacagcacgcaggccaaaagagacataaaaacaaaggcacaaacaacacagagagggcccaacaacaaaagagccaaatactgaaaacctgaagcaggccaaacaagcccaagacaaacaaaggaagcccctgcaccttggctcccaacctgcaacaagcacgacagttcgtttacaagttaattacatatctaatgatctactttttctatatttatacagaagaatggatggcaaaatcgtgattataacaggnggagccagtgggacaggagccgaatccgctaggttgttcactgaccacggagctcaagtggttgtagttgacttacaagaagagcaaggcaaaacgtcgccgtttcaatcggcaaagacagagcaagtttttaccgttgtgatgttacaaacg

SEQ ID NO: 35714 - DNA, 1283 bp, Arabidopsis thaliana landsberg
tgatccttaaaccataccgccttagaccacagaactgaagtactaaaaggctgaaggtagctacaagtgtccgctgtagagaatctatttgacggtgcatgatgaccaattttccaaaggtaagtatcatcatgcggacaatcaattagactcgcagcagaaggaagaactcgttgaagcaaagtgattaccggattgcggcttctactcgaagagatcctccaggtatcatcgcggagagcatctctgacaaccgaatttaaaggcaggccggctaagagaggaccagcgggaccagtcaggtgaaggagaggcccatgatcagtccaattatcatgccagaaactagcagtcaccccggatccaacctcacaaatgatgaaaggacgagcaaaaggtcgtagcttgcacaacttacgccatatccagctgccagacagagaaggattaagttcccagaagttccggcgcccaatgagatgcagtctaacccaggaaacccatagagaaccagcagaggtgaagagaagccaaataagcttcagagcaagaattctgttccaggaggagaggcgcttcaagcctagcccgccagcctctttaggagagcacacaatgttccaagagatttttgctcctctagcagagtttggagctccagaccacaggaaagcattacacatttgctcaagtttttgcaggcactgattggggaagatgaagacagaagaccaaaaatttatagtggaataaataacagacttcaaaagctgaagtcttcctgcataggagagatgtctagctgtccaagaagtaaatctttggttgatcctgtcaatgagaggttgataatcctgtcttctcatcttttgagacataagaggaaccccgaaatagcgaactgggagagctccctgaatcaagtcaaattggacagtattggtagtccaataataacttgcacctcacaagttaatttaatctaaattacctctttttaatttgtttttaatttaaatcatgcattgaaatttgatattgagggattctaagattattatgtacatggcgaaacaaatttaatagaagtggagctatggagtgacttttgggcgactcaatcaactaggttctcgattgagaccggttttcacaaacaacccttatcaacataacccaagactttaggtgaaagtaacgcgtaccacaaacaccggtgtagagaaacctatatcttaaaggtatgtggcgtgaatatgatgaacccaatggagcatcctcat

SEQ ID NO: 35715 - DNA, 1831 bp, Arabidopsis thaliana landsberg
tacagaaataaaaataatacaagaccgagttcataaagataaatacaaaaacataattttaagtcgatgttcaaccgccattccttgcaccttcatcacggaacctacaaaacaaataaatgtggcatggaattatcaataataatattacattccgtttatacaattactgataggtctataatttgcatgttttacacatcctattatcaccattttgagtgtagtttcatccatctttcataacattcaccatcatttttgtacattttgcatctttagtcgagtctaggactagtcttgcatacattctgcatcttggagttgtttcaggtgttttggagctattggtgctcagaaagaggaaaaacagaacagaaagtcacacttccaccaacatactcgatcacaagtggcagagagggaagcagtcagctcagcagtccatccagacacttctacttgatcccagaggagacctggcagtccattcggccagatatacttgatcacagaggagaggaggcagtccattctgcaattctactctatcgcagaggcgaccaggtagtccactttgccagtccacaatttatactcgatcgcagaggagaagaaccagaccatcctgacagccgacacacttactcgatcacaaaggccaagaagcagcccagaccattctgtcaaccaacctactcgaccaccacctcgaccctctgatcaatccgcactcaaccagacaacctgagcatcggaaagagaagagaagagaaggctcattcgaagcccattcgaagcccatcaggacgcccactttgagccgacactcttgatcacgccgtccatgggccgttaagtgggctcgaagcccgctttcttatcttagtataaataagtctgtaagggtttcgccctgagacatgcacttttagagacacgaatttcgcactattattcagcagccgcttttcattcttacaactttgtatttcgatttatcttctaagttattcagattttgctttcatttgcttgttcatctttcgtttctatgtaattttctttaagcatgttgtctgagtagttattaggatttctgaggatgggatagagtagttgtggaacctctggtcgaatatgttggttaagtgtagatttattgaatcccttctggattagttgtgtttacttcttattcctttctgatcaactggaatccgatcccagacgttccagcgcccagaaggcgtttaatggaacgttgaatctactaattccagtgataatcgtctctatcccaagggattggccgtttagagcggttattggctttaacagtcggctcttattgcctgcttagttagagatcgctaatgggaattaggtcagtgtctagctatgcttgaggatttctatcacgggagtgaattaatttgttgttgaacctgttgtctaaggatagcttaattgagatttgttataccaactgaattgattagggagaccacactattcgattaccccatcctaaggaatttctcatccaattgatttctctgtttacttacctgtttcattcacttgctattgaattttattatttttctgttttcaaccgttctactcgatcacaccagtctactaacagtgagactgcgtgatagagtaaacttgtccatttctgcattttcactctctgtcatcctgttgtactcaatcacagggtcccttctggcagtcgacccagcgatcgagtatatcagtcatttctgtcactatttactgttttttgcatcaacactaggactgttagaaaaccaaccaaatt

SEQ ID NO: 35716 - DNA, 960 bp, Arabidopsis thaliana landsberg
tactggtttttgaaatggattttttgctaaatgggttgggatgattaaaatgcgacaaccaatgatgggcgttttcaacgcacattaaaaaagcatgcattagctaagattatgtgccattaaagaaatttaatatttcgaagattagaaaaaatgcaagtgtaaatttttttcataggtacattatgaaaatatcaaacatcaataaattaattatagatttttgcatatatggatatatattagagacaatagatgtatattatagacaaatcttgttttatagtaaataaccaatcgtgaaataacgcgtgactaaataagttagccaaatttacatttttgcgattgatacattatacatatatgacaactgatacacaccttataaatgctctatttatgtttgactataatatacaatctaccacaacacaatctagtaaattgttagtatcatcctcgtgtcaccacctcaatttaaattcacataataactatttatttttatttcattataaatagtgttataaacagtaaaacactgtttatacgcatagatttgtaaaaccaatttacgtctacaacgctacatctcagacttatatcaatggagagcaagcttcagcacggctacaaaaggattccaataccgggacaagaatttgtgtgcagattttttagcaatgaatgttatttcatgctaggatcagtggtcattgtatcatatttgtcctaatttcctacatacagtaaaacctctataaattaatactcgataaattaataacctttataaattaataaatcgatataaatcgataaattaataagataataattgatacaaatcgataaattaataagataataattattttgaaccttccatgtaaatatatggtcccatcaataatataattaataattgtataaatttatgaatataatattatattt

SEQ ID NO: 35717 - DNA, 3128 bp, Arabidopsis thaliana landsberg
ttccctggcgatgcagctacaaaaaaacagattatgactcaaacccttgttcgatcaattctagtctaatgcctagcatctctggctacatcagaggttttgaaaatcagcccatgaatgtaaataagacttaagttggaagaaccgtaccactagccttttggtgtgtcttctctacaacatcattagcttcctcaggtcttttcaccgggacttcctttgctggagaagctgctacaaaaccagagcatgactcgaaccatggttcacactgaacaacttacacaagtgagcaaaggaaaactaatcaagaaacaatgaaaccacgagatgcactaacctggcttttcttcggttgaagaaggatcagacggtttagcacatggagtctctgcattattgataagattacatacttagaaccacatcaacataaacctaaagtaaaatcttcattgaaaacaaaacagatacataaaatactcttcctctattggttatacaatctgcaatgaaattagcaattcaaaggtcacgaggtttaagctaagtaataaaactagagacactcaacgaattcaattacaaagtccaaaactttaaggtctaactcagaaactaacatcaatcaaggaactaattccaaatcctaactttttacgaatttcataaagagatcaaaagaacttacctttgtgtatcttgaaacaacccaatgagcagctgcaggcaagccacagaaaccaagtaagagacaatgacaaagatgacttaacaagccaatgatgaaacgaaagaaaacctatgtaaaaagagagagagacgaagaacacttactaaggaacaagacaagaaggacacttgtatttggatacaaccttctcgcagatttcgcatgtttgagtagctcgaggacacatctctcactctctcacaacgagcacagcgattcaggggaagagaaaaacctcaatcaaggaggcaatggggtttacacttgcctcttcagaaagaaaggaagcccaatgggcctgaaagcttttttatttatgtcattgatttgtcacggaggctttttgactctgctttttgtgaattcactgttgagaagcgccggagaagatgaagctgaagcaattagaaggcttgttgggtgatcttgaacagttctccaatcctaaagtatgtgaaaaatattataactttgaatactaaagattgatttcgtcgaacaaactcttttgattttgattttttgtgtggcaggtggaattcgagcaatacccaactggtcctcacattgcttctcgtatgcttttcactgtaaaatccgtcttcctctgctctgaagtttattacttttgttaatttcatgctttctgtgaagtgggtcttcactgtctaatctagaatatataacaggctagtgattttctcagtgtgtggatgttagatttatgtagtctgagttgttttgtgatgcttggttttgttcctgctgtcttagaagaagccttaagtgtgtatcctttgtttaggcagagaattcatatggagatataactgataaggtcgttgcggattttggttgtggctgtggtactttaagtgctgctgctgctcttctagatgctgcgtgagtataatcatctttgcctcactcttctattcaatctctgtggttatctaatctctttattgcttcagaacaggtctgtgattggattcgatatcgaccctgaatctcttgaaacagcaacactaaatgcagaggaacttgaggtttttttgaaattcttcttcttttatgtaaatgagttttcttttggttgtatagcaaataccattgctataattggtttgttttgtaggtcgagatagatttcgttcagtgtgacatcacaaagctagagttaaaaggtacaatcctcctttcatttcagttcattcaacgaaaagaagattctaccggtaacatttttgtggctctatgaatttttttaggtacaattgttgatactgttgtaatgaaccctccatttggtacacgaaagaaaggagctgattcgatttggtgatgatgatgtctatgtttgagtaggtcagctactgttaggcttatcgatggccaacaaaacatggtaaatgtgactcaaattcttggaagtgtagctttgattctgcacagtaggactcataaatttccagtttgttttgctctctatagcttggtttagtgtctaaagacgaagccgttcgaatggctgatgatgctgaacttgatctggtatgtgtttccattgaaatgctcttacttgtggacattagctatttggtatatgcaatggtttttgtatgatatgagtcagaactcgaatcagtgaaattgagctaatagatggaagattgaactagaatcaaagcaaatattagaagatatgctctgataccgtattagattaacagaatttggataagagttgtgaatgatttatgttattctcttcttcaagaagaagagaatgtacattgttatatataaaattctctttactaagcaaatcagaacttcataaattaatttagctacaccgagtctctagtgtaactaaaccaaccaactataaatgattgattgtgttggttttcaggttatactatcgcctgatgcagatcctccggttgttaaaatgatggactacaggtaaattatctcaaggatgataatttgtatcatatacattgtgtagaggaagtttcaaggagaatgattctttttcctttttgcttcattatcagtaaatacagatatgagcagcaaaagaggaaaaaggaacagcagaagaaaagtattgatcattcttctctgcttaactggagataatgttgaaactataagtgtgtatactgtgtcgtattttacatgaatggattgtgtaactgaagctttcttcttatgtcagctactcgaatggacttgaaggagcttaaaatggggtgatttgagccattttcactatctcttttatctgtgtcgttgtgatgcttttgtttagaaaagcttcttctcaaaaggtttttgtattttgtttctccggtagttataacatcgatcagcagaagtattc

SEQ ID NO: 35718 - DNA, 1477 bp, Arabidopsis thaliana landsberg
  unsure (1)..(1477): unsure at all n locations
cctatttgggggttgaccctccttttgctgagcctactactatctttccttagacgagtgcaactatttttgttattatacattctgatcgagaaaatatgagtattatggatatttgacgctcgtaaacaccaagaacaactttctttggctcacttttttacatagcgctccttatccgacttcttattcacataaccacaactgttagcaaatgcagctctatcccccacctcgtgcaataccgccttgtttggaaattcttgatgtaaggtcaacccaattccgtcttcccattcttttttaaagagaccaggttctatagaaggtggcgacttaacatattgtacccctcttataagaattatccataaactcatcatagcgtgtttcatcttcttgagtcttgtgatcctcctctactatttcctcaagttgttgttgagttccttgttcctcttctaataagacgatgagggcaccatcatccactctcattttatcctcgcctgaattcaactccgtatagttcttaccaatagaacttttaccaactctaaacaattgctcgggcggtttagagatctcctccagaaccaaaacacttctccggttattttttgcggatgttaaataaacaaagacatcctcatcatcacaaacgttcatctctttctctactccgaacaaccgtggattgtacctcatatgcaatttaaccttatttgcatctaatccaagcttcgtcattatcctatcttctaacaatgagagagttatcttctctcctaatgtcttcatcatcacattatacatgcaaccttcgaatttaaaatatatgatcacgttctctttcattgtaacctgccaaaacaatacacatactcagtcaatattactagtattaccgattctactacattttaagtaatactagtactcatttcgaaatactatgtgttagtaatactattacatatatgaaatactacgttctaagtaatactggtgctattaaaacataccatctacataaaaatcaattgtttcgttaaaactgtaactagttcgaccagtattattttcacgacaagaacaacgtttggtttcgagttcaattcattacgaatcaacattcaaaatcaatttctgacccagttataggccaaatcgaccctaaaactatatttaaactactaatgtaggtactaaaacacaataacccaaatctaattagattgaatttcaaaatcctcaaaatcctcaaaatcctaattcaaagcttttgaagctctctccaactcgatgcacatacctggacttagtagattgatgcagcttgcaggaggagaaaaacggcaaccaatgcggctcaccggaggaagaagcccgaagaagaagaagctcgatctcgagctcgtttttttttttccgtttttgtttgtgtttgtnttgtgttaagaatatattatttcaa

SEQ ID NO: 35719 - DNA, 655 bp, Arabidopsis thaliana landsberg
agcgaaagtatatctcatttgtgtttatatcagagattgttaagctgttcttaaagactaaacggcttttgatttctgtttgtaatagataagaagaagaagaaaggggtaaaagccgcttttggtttaccttggtcagcaaggtacaaggtcgcgttaggtatcgcagatgccatcgcttatttgcataatggaacagagcaatgtgttgttcacagagatatcaaaccttccaatattcttctttcctcaaagaaaataccaaaggtaaagattcgcgaaacaaatgtactaaattattatcggtaagcgaaccactaatttgttttgacctattctttttcagttgtgtgattttgggttagctacttggaccgctgcaccttcggttcctttcctctgcaagaccgtgaaaggcacattcgggtatcgatcaaaacttgccatgagttcttttcttctcctttatagccaattcttgattatctaatcctctatcaaaactttcttgcagttatctggctcctgagtatttccaacacggcaagatatctgacaagaccgatgtttacgcatttggagtcgtgttgcttgagctaataactggtcggaagccaattgaagcaagaagaccatctggtgaagaaaatttggt

SEQ ID NO: 35720 - DNA, 3145 bp, Arabidopsis thaliana landsberg
  unsure (1)..(3145): unsure at all n locations
ctaatcaaagtccccattaaaacaaataattgttgtttcaatcttcttgatgattgcaaattagttacatccacacatgctgaaattctctgagattgcggcttataagccagacaccgaatattgaacaaaaccaatgaaagattattcttttcaaggttttaccaagttccaaacccttttcaaggaagaataaagagctacctcatacacgtttgtagaaaaaaatgtacccaacgtattcttttaatatactgtgtttacctgattaagttgaagaatgtactcattcgtatggaggccatggttcttggagacatctaatgcaagagatctggcgcaaattgtcaaaaaggtatcacggccgtaaagtttcccatcttgcacaaggagaagctgtagaacaagattatttattgagtgtaaaaggtaaaagcattatgctagcttaatacataatttattcacaaatattgctaatatcataacaaaaatggacaaccatatcaatgcttaacagaaatttacaatcagaatcaacctcaactacatatattggatctatattcttataagtcttcataagaaagaaaaatgagagtgtcagccactacatattccagtgtcaccataaataatatctagataacaagaatagtaaagagtcaacaagaagaataagcagagcattcgacaggcctgttggcgaatggggcttgagttgggaaggtggttcacgagagttggatattctctagtccattggttctaagtttatgcaactgttcttacagaaataaaggagatttctactacagtcatatggctgaatcacttaactctaagnnnnnnnnnnnnnnnnnnnnnnnnnnnnnnacacaaaactgcaaagcaaggaagcgggtaaaagaagaagccatataattcactatacaaacacaccctagtggatgtatgcgaacatcagtgcaactacagccaaaatagttactcaaaacaagaaaacaaaatgataaatggtatctgaaagcacagagctgcatgatattgatgcgttaagttaaagtaacgcacctgaagatgagccctagcaaccaaatcaggacgagatttttgaaacttaatcacaaactccaagacggcctctaaatctggttccaatgaaaatgcacagatctgatccagattgtgaagaagtttcacataatagtcaatagcctggagaatcaaaaattgaaaaaagttactaaaaagttatatacacacaaactaaattacgtatacagagaatttagaagtcccaacctttttccaagaaagaagtttaatggcacgtggcggcgttggagctgataatcttttgtttaaagtaggatcaaatccaatgggggaccggccagaagcagttgtactttcttctatctcgtttacgccattctcgacaatatctaatcttagaaattctgctgaatccagaacagaatctagctctgatatgcaatagcctatatgtttccttgccaattcgaggccacgtccttgtggtcgtctcatacaattaagagcatgtagaaaatgctgaaaggtattgagaatatgttaaaacaactagcagtgcaaaagtatacaacagctactaatttttttttaaaaatggcttacgaaacaaaataataattacatcatcaatcacatgtctggcaagaatttttaaccaaaaataagggtaaacaggtaataaaagctgccatatattcaaaatttagtctctgctaagcttgttcattcttgtaagttgcataacatggaaaatttaacacaataaaacatatattaactttgtccaccactccccattgtgaggttaggttgaagaaaatcaactcatcatacccttgttacgtgtagtttatcaaagaaagaataaataaagcatgagaccttacggaacactggataaaagaccaaatgcacattttaagtactaattgtagtttttctttttcaaagcaagcaataaaaaattatgttcattgatggtcaccagaatactaattaaaggaacagacttgggactatattatacactacttaacatgacttaagttgggaaaacctgtaattaacaacatttatcaaagaaagaataaataaatcatgaaaccttaccgaaacgtatcctgcataacaaacatttgcaaaaactctctttcagattaggattactttgtaaaagttccaattatgcatctttaacaaacaaaaggaaagaaagttattttacaaataaacaatataccatatcactcaaagagatggtaaaattagaaagaaaaaattaattttaataatcagcggacttcacatataaatcattactcagtagaagactcaaagttatcgtatctaggccagagaggctaatttcaagttggtatatgcttagagagctgttgcaaaatatctaattccaatgcattatactgtctccaaatcccaaatcatccttaaatgtgtaaacaacatatcataagaaaagaggcaacagaagactcttcgatcccatcatatgaatacgctcttcatatttcaattctgcaagtgtgtgtatgtaaaataaaaaaggaagatatgcaaagcaaaaaaagtaccttccaacattctccttctcgtggccttacaagcacgcagctgacgacagatagtttcttcaaccgcattcaagagtaacaagcccttggcatcttcttctccactaaaaggaagaccatatgtcatcgtaaaaagatcctcttcctgtcaataggcagggatcaggtgaatcattcagagtaaactatccatgaagcaggggcatctgtctagttaagagaaacttctatccaaaatatcacaacaaatcttctcaagtattttatcttcatttagctgcataatggtggaaatttctacacaaataagttatacgctctgctaatcatctcaagattaaataacaactgcttaggctagatgagaacggatgccaagacttcattagaagagtaaagtcaagtgaatccagttttcgtctctgatgtcataagcttaaggttaatgacaactatgaaatatcaaaatgggttagcaactgtttttctttacg

SEQ ID NO: 35721 - DNA, 3140 bp, Arabidopsis thaliana landsberg
caattactacgatccgtctttgaaacgtgctcgtagatctctgttgtcgtcgagagggatcttcgtcgttgaaggagatctaaacgacgcgaagctgatagcaaagcttttcgatgtggttgctttcactcacgtgatgcatctcgctgctcaagctggtgttagatacgctttggagaatcctcaatcgtatgttcatagcaacatcgccggacttgtgaatcttctcgagatttgcaaagcggcgaatcctcagccggcgattgtttgggcttcatcgagctccgtttatggactcaacgagaaagttccattctctgaatctgaccggacggatcaaccggcgagtctctacgccgcaacgaaaaaagccggcgaagaaatcacccacacttataaccatatttacggtcttgccattaccggtttaagattcttcacggtttacggaccatggggtagaccggatatggcttacttctccttcaccagaaacatcctacaaggtaaaccgatcacaatctaccggggcaaaaacccgggtcgatttagcccgggatttcacatacatcgacgatatagtgaaaggatgtttaggatctctggattcatcgggtaaaagtaccgggtcgggtggtaaaaaacgtggagcagcaccgtaccggatatttaacctgggaaacacatctccggttacagtaccgaatctggtggatatattggagaagcatctaaaggtgaaagcgaagaggaacttcgtggagatgccaggaaacggcgacgtaccgttcacacatgctaatattagctcagcccgaaatgaattcgggtataaaccgacaaccgatttggaaaccgggttgaagaagttcgttagatggtatctttcttattacggatacaatactaaagccaagcttgtacattaaccgtgactattattattatttttaatgaaattatttatttctttctcccatacattttatatgattcgttcttttaggattattataaaatctaaatgattcgtttctcttaagacaagcaaaaaccgaaaaaaggacagcctattataccgcgttaatttaaagttaatcgtgattgtgttaatcttgaaatgtatttgaacatttttgttttcttaatacagaattgattgatgtaaggcagcaaatattttcctaccaaaataatttgttagggatcttttagaaaaagaaataaaataaaaaaaagggaataaggacagctgggaagagtgggacagcagagaaagtggtggtgtacggtaaccgttggatccgatgaggaatttaataaaggtagtcgtaatcttacggtccagctgtgaagtactcatgccacgttatcttctccaccgacagtacattgttactatagcagctatagtatagcctattcaatcatttgtattttaatggtaagcaaagaggaaactatgtagaagtttcttatcttatagtttctcaagtcttttagttttggttccataatcctttttttagtatgtgaaggtgaaggtgagtttagtatgtgattttagtatgatttggttgataacgttttcactcgactaattatatacttcagaaggatagtaatagaataccaaaataattaaatgattggttagtgccttagtggagactttttaaccgattctaatagactaatgatgtagctaagcatttatttgtgatcatcactgtttgaaaacgtgaaatgtgataaaagttatgaaacgattaaaatataaaataaccgtacaaaacattatgtaccgtttttttctctgttcttttgacgatttggtttagttcgttacactctaaatgttattgcagatatatatatataaatgatgcatttgcatctgaggaacatataattccggttaacacttccaaatcttatatccgtctaggtagggattttataaatcatttgtgtcatcatgcgttatgcttgtcggctttgaccataacgcagagatatagaactagcttttacttaacttttagatttattatttgatctagagttaagtggagatatatagtgtttttgttagattattggtggatgtgagagtttgtctttagtttcaagttgagaatataaggcaagaggagactgaggcaatcagaggtttcgattggcaaaatatccaaaaggcccaaaccaagtcgaagcccatctcgtacaagtaattcaagttcaagtcgaagcccatatcgtacaaaaaaagaaagagatctgtaagaaaaaatattctttgatattcttacaaaaataagtgtaaaacttttattagtcaaaatcttcaatctttaaaaactctcatcactcctacgaaagcgcgtgagagttatgagacattccttaaaagcaatactcacaagtcacaagttcaaaacgtctgactgaaaccgaaacaaacctttttttaagtcttgaagaagagacattagtactcgtcgtatagccataaaaggtaatatacgaaatttcttcgctaatctcttcaccttcctctacgcgtttcactttcactttataaatccaaatctcccttcgaaaacctaatcacacaaatcccttttttggtttctccaaatcttcaaatcttcttcaatcatcaccatggtacgttttagtaacagtcttgtaggaatactcaacttcttcgtcttccttctctcggttcccatactctcaaccggaatctggctcagccttaaagccacgacccaatgcgagagattcctcgacaaacccatgatcgctctcggtgttttcctcatgataatcgcaatcgctggagtcgttggatcttgttgcagagtgacgtggcttctctggttctatctctttgtgatgttcttcttaatcctcatcgtcctctgtttcaccatctttgccttcgttgtcactagtaaaggctccggcgaaactatccaaggaaaagcttataaggagtataggctcgaggcttactctgattggttgcagaggcgcgtgaccaacgctaagcattggaccacccttagaagctgtctttatgagagcaagaacagaaatgctgtggagttagtcactgactaatcacaactgtt

SEQ ID NO: 35722 - DNA, 1770 bp, Arabidopsis thaliana landsberg
taaaaatattttttctccaaagattattatttttactttttgtcttttaagtttgtattttttctatattatgtaatgattgattcaaacattataaacaaataaattttttcttttttgtacttactgaatttggcacgaaaaattcgtaccaaacgcatattgtcgcctataaacaatattcaatctaatatatttgtttgaaagaaaaaaaatgcgtagcggagggaataagtatttagcgagtctcttgcgttgttatagagatgaaaggtgtaaactttctgggaaagttatacatgggttcattgttaggatgggaatgaagagtgatacttatctatgtaatcgtttacttgatttgtatattgagtgtggggatggggattatgcacgtaaggtgtttgatgaaatgtctgagagaaatgttgtttcttggacgagtatgatttgtggttacgcgaggcgggattttgctaaagacgctgttgatttgttttttcggatggtgagagatgaagaggtgactcctaattcggttacaatggtgtgtgtgatatcggcttgtgctaagctagaggatcttgagacgggcgagaaggtttatgcttttatccgtaattctggtattgaagttaatgatcttatggttagtgcactggttgatatgtacatgaaatgcaatgccattgatgtagcaaaacggctttttgatgaatatggtgctagtaatttggatttgtgcaattcaatggcatcaaattatgtacggcaagggttaacgagggaggctttaggtgtttttaatctgatgatggactctggtgttagacctgataggatttcgatgttgagtgcgatttcatcttgttcacaattgagaaatatcttgtggggaaagagctgtcatgggtatgtattgaggaatggatttgagagttgggataatatatgcaatgcgttgattgatatgtacatgaaatgtcataggcaagatactgcgtttaggatctttgatcggatgtcgaacaagacagtggtgacgtggaactcgattgttgctggctatgtagagaatggtgaggtggatgcagcctgggaaacatttgaaaccatgcctgagaaaaacattgtttcttggaatacgattatcagcggtctggtgcaaggaagtttgtttgaggaagcgattgaagttttctgttctatgcaaagccaagagggtgtcaatgcggatggtgtgacaatgatgagtattgcatctgcttgtgggcacttgggaactcttgatctagctaaatggatatattactacattgagaagaacggaattcagcttgatgtcagacttggtacaaccttagtagatatgttttctaggtgtggggatcctgaaagtgctatgtcaatttttaatagtttgacaaacagagatgtctcagcttggacagcggctataggagcaatggctatggcaggaaacgctgagcgagcaattgagcttttcgatgatatgattgaacaagggttgaaaccagatggggttgcgtttgttggagcactgacagcttgcagccatggtggattggtccaacagggtaaggaaattttctattcgatgttgaaacttcatggagtttctccagaagatgtgcactatggatgtatggttgatctgcttggtcgagcaggattgttagaggaagctgtgcaactcattgaggacatgcctatggagccaaacgggggatcctctagagtcgacctgca

SEQ ID NO: 35723 - DNA, 2238 bp, Arabidopsis thaliana landsberg
tctatagtcgttaaacacctctttacgacaaataaacgactattaaatatagtcgctaatcgagagtcggtaaatacgatagtcgtattttagtcaccaaagagcgactaagttacgactaagtttaagtaatcacttttttagtgaccttttagtcgttaagtttagagactaatattagacgataaattaacgattaacttaagggttatgtagtcgttgtaggtaattagtcgttaaaatttacgattatggtgtcactatatttaagaatgagttgcgactgaaatatcaattagtcagaaattttagtgactaaattgttatcaaaaaccgactgcttggttacatttttgatgactaaattgcgactattgttgttattagaacacctatatgattgttctaaagatggaaaccttcctgagaaaacaaaacattacaagaagcataaacacaatacaagaagcatgaacacaaatttattgtcatttcagaaaagtacaaaacccaaattacaaaaacatgttcgattcactacaacttagaactttgttcagcataagtacaagcaacacaagtacacatatataaatacgttgagccgtgatattgagtcttgaggaaggagttaagattcagacctatgaagcagatgaagagggagaggcagctggagagggtgagataggatctatggttgtctcctttgctgaatgagattcgaggaaattgaggaaccaaggatcattttcgcgcaaaaacttctccactaaggacaagtgctcaagcttcttcttgtgctcatatgcagctcgggaattctcagcttcacgcaaagaaatcttagattcacgcctatgattgtaagagacctgctcttctatcttgcgttgagcttcctgtaattgttcttgcaaagctacaaaagaagttgagtcacctgcttgcttccgcttgccattgacaagagactctttgaggcttcctactccataaggaacgcctctcgaatccctctcagtggactgcaaagtatgataaaagctgagattagagaatgaaaaagacaactcgaaaacactaaattgggaaacataaaacgttacctgaagaaatatggttgtacaatcctcagctgtgagctcccgtgcccgcgaagtgccatctgaaacagctgaagcttcagcctcgaactcagactgcctcagttgcaaattctttcttatataactccgcaatcttctccgcctttcgatcaacatacgtcccatcaggttttgtatgtgttttgatgaaaacgtcaccaatattgacagttttgcccaattgctcttcctgtaatgaaaaaaaaaacaagtcatagaaaagtagagaaacatcagattaaagttgcaaaggagtaaacaaagttaagttttaccaattcgtctcggatttgatgatatgacttcgaccctgagaaatgtatgtgaggacctagaccgttacggtcagacatacgggcatttgaatatatttgacttatttcgtgagcttcttcagtgtcccagtacgcagtcatttccttccatagagtttttccgatccatttaggtttctttcgactagttcttgcagtgctaaccatgcctttcattcgccttaaacagatctcgttgaagtaaaactgaacagtccatgtgatcaaaggatcccaatggtgtgtcttctacaaatagaaaaggtaatgtcagtaaaaaaagaagtgtaatcatatatataagaagggctgaaagaactctaaaccgcaaactcgaggaagtatttctcttgtctctcttgaggcacacatgttcagctatagaagggaccatcaaatttatttgtaaacactctagttatcttcctaacaagtcgcgagtttgtgtcccgagtaaacctccatacaaaagaaaaacaagcagttgttatttggcagaatatatatacttatcagagctaaacttaaatcagagatcaacacaacagaaccctaagatcagacctaaacttaaatcagagatcaacacaatagaaccataagatcaaaacacaacatgttcaaatgcacttaatcaaagacacgaatgcaaacacacgacttttcaaatgcatccgtgacaaaaacatgactcacaaaagacaaatacttaaactacttggcctcacaaagctcattacccaacataaccataagatcaaaccacagcatgttct

SEQ ID NO: 35724 - DNA, 3097 bp, Arabidopsis thaliana landsberg
  unsure (1)..(3097): unsure at all n locations
gcccaaaacaagacatttcaacaaagaaagtaagtacaattcacccggggtaatgcaagtggtataccaatattaaatgtttaaaactttatgtcagtcgtcatataagcaccaactttgtttgtttttttaacaaatgaatatgatatcattaattcttttctgttaactatcattattggttagacgtccgattttcacataaatattatcaatttatcatttaaacaatgcagggaaaataattggaaccttggttcgttggtgctaatgtaaatgaaataaattagttacaagttaaagaagcattgcataattgaccccaaaaattacgagtttacattgtaaaattaggcatttgcccaaaatatatatatatacagtaaatagccaatttgtggaaggtattcaatttatttatctgcaaaataaatttcgatagatagttgtgagaaaaaacctaccaagcaaattcgatagatagattttttttgcttgaggttttaacaaatttcatgtctttttttttctgataacatacatgacattttctgaaaaccctaccacgcaattttactaattttggatttaaatacgacaatgtacctaataagcccttgcattatccccaatcttacttgttgacaaataatgtttttatttaatatcatataaattcataatcaaaagaattctgatgattggcgtcacgattaataacagataagcgcgttgcgtgaccctaattaaatacggtcaacgtttaattacattacaaaattcccccaaaaaaacatttgcctagttgtcttgtaagacaagtctccacgatctcataagtgtagaagaaactttcaaaaacctctgctctgttttcttcagaaattttttaagtaaaaatgatgagtaatctgaaacttggcgttgaagtcataagcgcaaggctcaaacctagagaggtctatggcggtgttttcgcttacgtcgagctacgatttgacgatcagaaagtcataactatgactaagatcgatgactctagtccggtgtggaacgagaagttcttcttcaacatctctgatacagaggatttatcaaatcaatttcttgacgcttacgtttacaataaaaccagcagcataacaaaatcttgtctaggtaagattcgaatattgggaactgcgtttctcccgtactcagaagctgttggattgccttatcctctagagaaagagaaatggagcatgttctcttccgctgccgccaatggaggtgagctcgctctcaaagttttcctcactgataacccctctcccaaggtaccgaatctaatccctacaaagaagattccttctaaatcaaggcacaaatttcacaacatccccacaaatgagagtaaccatagcccacgagggaatcagcaatcgtttctaccgcaaccgcctccgcctcaatcgcaaacgcctcaaccgccaccgatgatggagtcttttctctatcaagcaccgaggtttggtactccgatacctacaactatggggtttaatccgaatccaccggattattctatcaaagagacgaaaccgattctcggaggaggcaaacgagcaagatcaagtgatcatgatctctcgagccaatggagtttctcttcatcaaaatcgtgaaagctagaaatcttccatccatggacttaaccggaagtctagatccatacatcgaagtcaaactcggaaactataccggcaaaaccaaacattttgagaagaatcaaaacccggtttggaacgaagtcttcgctttctccaaatccaatcaacaatcaaatgttcttgaagtcatcgtcatggacanagacatggtcaaagacgatttcgtcggtttaatccggttcgatctcaatcagattccgacacgtgtcgcaccagacagtcctttagctccagaatggtacagagtcaacaacgagaaaggaggcgagattatgttggctgtttggttcggtactcaagccgacgaagcgttctcagacgcgacatactcagacgctttaaacgctgttaacaaatcgagtttgcgttctaaagtctatcattctccaaggctttggtacctccgggttaatgtcatcgaggcacaagacttagttattgtaccagaccggactcgattgccaaatccatatgtaaaaatccggttgaataaccaagtggttcgaaccaaaccgagtcactcgctgaatccaagatggaacgaagagttcactctcgtcgcggctgaaccgtttgaagatctgatcatctcgattgaagaccgagtcgcacctaaccgagaggaaacgctgggagaggtacatataccgattggtacaattgataaacggattgacgataaccggacagtgcctaaccgttggtttagtcttaaaactgagaaccagagaagagtcagattcgcgacgacgagacttcatctaaacgtttgtctagaaggaggctaccacgttcttgatgaatctacttactacagcagcgatttcagaccgtcgatgaaagagttgttgagtcataaacaaccgtcttttggtgttcttgaattaggaatcttgagaattgaaggtttgaatttgagccaagaagggaagaaggagacggtggatgcttattgtgtggctaagtatggaaccaaatgggtcaggactcgaaccgttacgaactgtttaaacccgcggttcaatgagcagtacacatgggaggtttatgagccagcaactgtaataacaatcggtgttttcgataacaatcagatcaatagtggtaatggtaacaaaggagatgggaaaattgggaaaatcagagttagaatctcgactctcgaagccggaaggatctacagtcactcgtatccgcttcttgttcttcgaccttcaggtttaaagaaaatgggggagttgcatttagcgattaggttttcctgctcatcgatgtttcagatgctaatgcagtactggaaaccgcttcttcccaagatgcattacgcaagaccgttgaaagtagtgcagcaggagattcttaggcagcatgcggttaactagtgg

SEQ ID NO: 35725 - DNA, 1126 bp, Arabidopsis thaliana landsberg
aaacgtttagcttttgatcttctgagttctgtgaccatggaactagttccttaatggtcatgcattatctgagatttgtttatgacatgagcattgagaaaaaaagctctcgtttctgatgcatttgtttcttaggttgtggcaaagttaaataatgtctaccccaaggaccccgagttccctgaacttggagtagacgacatgacaaagcttgcatatttgcatgaaccaggggtcctgctcaatcttaagtgccgttataatgcaaatgaaatatatgtaagcttcaattcgattactagttgtcaagtatttcttgctttcaagtaattttgttgtttacattaaccatcacgtgatcttaagatgtctccacagtttatgcaatctaatttttttcatgatggatccagacgtacacaggaaatatattgatagctgtgaatccctttaagagattgccccacctttatggaagtgagacaatgaaacagtacaagggcacagcatttggtgagttgagtccacatcctttcgccgttgcagattctgcgtacaggtaactcttttgccgtttaaattagcttatattattgtttcacttacaactgtttttcggcattatgatcaccaaaaacataacctttcaggaaaatgattaacgagggagtgagccaggcgatcttggtgagtggggaaagcggtgctggcaagacagagagcacgaagatgctcatgcagtatcttgcctacatgggaggaagagctgagagtgaaggaagatctgtggagcagcaagttttggaggtaatgaattttttaaaatacatggcttcattcttgcaaaagatagacttggttagtttcctccagtaatatcttgtcatacttttcgctgattgactttcctgttttgcagtcaaatccttttttagaagcttttggcaatgcagggaccgttagaaacaataattcaaggtggaggagaggagtctcacgtttgatgatttgaccattttgtgtattttcttgaacccaatttaagatacttacgcaaattccattttgcagtcgttttggtaaatttgtggagattcagtttgatcagaggggaagaatctcggga

SEQ ID NO: 35726 - DNA, 2739 bp, Arabidopsis thaliana landsberg
aaaagggcatctgaagcaaaaaagggccaaacagaagagagagataagaagacgccgcacaagtggcgaaaataatacaacgtcgaatacgaatactcaaaagccaatgcaagtcagctgtacctgtgcgagacacgcggccccgacccgaacggatggataacgcccaaactgctatttaagacacaccactaggcctctttgttccaacaagacctcaaataaaaacacaacaacaacattgaagaaatggccatcttctgtttccttgtagaccagagaaagaaagtccgggggaggaagccagcggccgggttgtgctcaagatgcggaggaggagcagttgttgccgacatgagaacctccacaagattctgtggggtccctttttaccgcaaagcttggaaagctatcgtctgtcatatctgcggtgctgtcctcaaatcataccactgagtctgatgaaccaacaacgttttttgttttaattcattcgtttttttttttccaacaagctacttgccattgtatgtcgcttgattgcctactttagactctgaagtcttagctaatgtttttgttattcatttatctctctgtttctgactaatgcaagtgatccttttacttacaagtctcttcaaaacatgtttggtaagaacaccacttaataggaaaaagcagaaaggcacatgaacgtgattccccaacttgctatacagctttcaccattcaatgctcttctctctctctctcattctttagacccctcaagacaattatattgggcccaagtttatgatccaagaaggcccaagttttgtattcattgtccattatcaaatagtataccctaaaattattttacaactttcatcacctccattaattctgctgctgcaaattctatcgaactggtgagttttgttaatctctttcctcgttcgtccttgtctgtatatcagatcgatctctattaccgttttagcttgttcttgatctttgtcaacataaaaacaatcaaacaaagtttcttctatgagttctggtctgaacgaagatttcctcgattgtatcgtgcgtttagaggagacacatgttcaacaaggcttcgatgagggttacgaagaaggtcttgtgtctggtcgtgaagacgctcgtcatctgggtttgaaactcgggttcgagacaggcgagctgattggattctacagaggttgctctgctctttggaattcagctctccgtattgatcctacacgcttctctcctcagctccataagcatctcaatgatttccatgtcttgctcgataaattcccgcttttggatcccgaggacgaagctaaagacgggatcaaggatgatctcagagtcaaattcagcatcatttgtgcatctctcggcttttccaagaaacaatttgagtataaaggatacccgaatccttcctccaatctcgacttttaagacctccctccatcaaaacactcttgtattgtatgtatggctttcaaagtttctctcgtttcctcaaagtttgtatttttaagagaagtgtgtgtgtagacaatctatgttttattggcttgtccttttttctggacatgtgaatgctgaccacaagtctaaatctggtggataacttcttttttagccttataatgaacaaacaaactcacatctgtagatatatatttgtataggtggtcggaggagatgttgagagaaatgcttggttgttgcaaggtttacatatctgaagcgcggaataagacggccctcgaagccattgagagagctttaaagccttttccaccagctgcaattgtcaacaagtttgaagatgcggcttatggcagggttggttacactgttgtatcctcgcttgctaacgggtcgtcttcttccttgaagaatgcggtgtttgctatggttaagactgctctcgacactatcaatcttgagttgcactgtggatcccatccccgccttggagtggttgaccacatatgctttcaccccttatctcaaacctctatagaacaagtttcttccgttgccaattcccttgcaatggatatcggctccattcttcgaggtcagtacctaatagaagacctcagtcataaacatgtgaattcctgaattttaaaagatacttatcaagctaagagcagaacattgttgctatgctgctgttgatgtgtactttgtgataagccattgaacatggaagtctatgagcaatgctctgctcttataaaaatgactagccatagaacatgaagtttgtagcaatgctctgctctctgctgttatcaagataagaacagagcattgtttgtctgctgtactttgtcataggcagagtgatgttctgtttttactatctcattatctctaggccatagaatatggaagtctttgtagcaatgatctgctctctgctcttatcaagataagaacagagtattgtttgtatggtgtagttgttgtgtacgttgtaacaggcaaagtgatgccctgtgtttaaaatctcatcttcgtctaggccatagaacttggaagtctttgtaccaatctctatattgatatgtggactggactgagatatatgacccaccctggtgcagttcctacatatctctatggagcagcagaaaaggagcagtgcacctggattcgatcagaagaaagctggggtacttcaaggcaaacagggagggacatgaatgg

SEQ ID NO: 35727 - DNA, 1311 bp, Arabidopsis thaliana landsberg
attacgcctacatctagcacgtctctctgcttttttaattctgaatatggtcagtaaataccctgagtgcaaaatctgcattgttgaggcaacccgtcttcccccttgaatttctacctaaaggaaccgcgtttccaactaatccagtagatagagacttgccattgtagtaaacagcaatgcccctttcagcaatcaagtccatctcctcggttctgatctgcagagaaaaatgtagtcttaataaccaatcaaatcagccttttaaatattccccatgcttgaacctttaaaatactaaaaccgaattcaattgtactaatcatcggcgtttttctaagaactgtgataaaagatttttatctcaaatacctgaacctccagtcgaaacatactctcatacaagaatggaatcacagtagtatggaggctctggtatccattgggcttcggggttgcaatgtaatcttttacctgtaagacatatgttcagtcccaatgtagataagatataacctgaataacacaagatctgatacatactgttcgtggaatagggggccagatctcatgaacaagccccagaacgtgatagcatatctgcattgacgacagagcgagaaagctaagtgacacacaagaacgaatcggaacaaaatatacccatttccttttcattgggatttcacctgttgtggactgcacaaaggcccgacccctacagatggttttggctttacaacaatccgtaactgctaaaataatgaaattaggagaggcagcgtgttaacaatcatataagcttcagatggaagttttgtattcaaaacctttgatacaacttggagacaagagtataacacaaacctgagcaatctggttgtaatcattaattgatcctttcgatttgagagcagctttgtagatgctgcagataaaaaaagagacttcagatgctgaagaaaagggtaggttacaaggtaaaatgaagaagtcacttatgaattcacctgtaagtttccttgcaaacagatcgaacatcagtattcacagtcacaaggtccagaaactgatcatcttcaatctttttcaccaaaattctgtttgcctaagatacatagtaggactctgtgaatgcagatgaactaaataaacgcccagatgaattcagagttcgaaaggtcaaagaggtgtaggtcgctaatcaacattcttctctaatatccttttgtttttcaatctatgttttggcattttaagctcagagacgataatagttgaaaatacctcagtgagttctttttcatgctc

SEQ ID NO: 35728 - DNA, 853 bp, Arabidopsis thaliana landsberg
  unsure (1)..(853): unsure at all n locations
caattcgttttcatcactgtttcaatactcatcctcgtaactggattcggatctaacatctgatagattatcgatttagcttgtttcgaaatccagctcggaaaccgataatctctcnnnnnnnnnnnnnnnnncatcgcagcgatattcgaatcatcaaatggaacatcgccaaccaataaaacaaacaaaatcacaccacaagaccacgcatcagcttttgctccgtcgtatcccctccgtgaaataacctccggagctgtataagccggagtaccacacgccgtgtgaagcaatccgttttgtagatgctccggtaaagctgataaaccaaagtcagagaccttgaggttaccttgctcatctaagagtagattctgaggtttcacatcacggtgaagcgacaccgtcttggtgagagaaacgaagagcggaggcgagttgttgaaagtaacgacgcgccgttgattcaggaagacgtccacgacggaggacttttgagaaaagttcaccaccgnnnnnnnnnnnnnnnnnnnnnnnnnncttagatttggttgccataacttcatggatcttgagtatgtttggatgatgacgaagacgacgcatcgcatcgatctctctgattattcttggttccataccggattcgattgttttcttcttctcgatgattttaacggcgacgagctcgtcggattcgattgatcgagctaaatggactttcgcgaagttccgcctaccgcgacgacgaccgagttcgtattcccaaggaggatctctgctggagttgttccggagatgattggtttgctgctggggaagtgatccatggcgcggcggaaagagaaat

SEQ ID NO: 35729 - DNA, 3112 bp, Arabidopsis thaliana landsberg
gtaaattcttcagagagttgagcatagttaatgtaagctgaaagaggatacctcacatctttcttggcatttggaactgcattacagaagtaatcctggagataacccggaggtcgagattctcgtttaggatgaactacttttgcaggttctgatgtggctgaaacattagtgccactcattgagtcaactgtatcaaacacatcttgaggaatatcctttttatcagcaaatggaaaaactgtttcatagaacaccacatgtcttgatatatgaatcgtattagtttccaaatccaggagtttatagcctttatatcctgaaggatatcccagaaaaacacaagcttttgctcttggtgcaaacttatgtcgttgctgagaacttgtagattcataacacaagcaaccgaagactttcaaagaagaataatccggcgcctttgaatgaagtaactcaaatggggacttgtttgaaagaagcggtgtaggcaatctatttatcagaaaaactgcagaaagaatacagtttccccaaaactctagtggtatacaagcctcaaacatcaaagctctagccacattcaatatgtgttgatgttttctctccactactgaattttgttgtggtgtctcagggcaagaatgataagagatgatacctttagccttgtataaagcttcaaaccgcaactcaggagcattatctgacctcactgcttttaccaaaacaccatattgagtctctatcatctttaaaaaatctggaaatatctgcaacacttcagacttagtcttcatcaaataaacccatgtagcccgactgtaatcatccactattgttaggaaatatttatacccttcagtagttggagttgcaaacggaccccaagtgtcaatatgaagcagatcaaatttgttctcagacatgttgttcttagaaggaaatgagagatgtttctgttttgccttttgacaaatagcacaatgaatcaaatcgtctttattcctttttgttaaaccaagtacatcatgtagaacatcatttttctcataagatggatgtccaagtctactgtgccataaggcattatcaaccacaacattacaatactgtttcttagcaacagatgagttattatctacactagaacattcaacagaactagtgtctaagacatataatcctccaatctggttacctcttccaatcttctgctccttgataggatcctgaatcacacagcaaccctcatcaaaataaactctacatttcatatcctttgtcagttgactcacactgagaaggttaagtcgaaattcagggatatacaacacgttgtgtaacgtgatatgtgaattcaacttaattattccaattccagcaattctgacatttgatccagtaggtaatgttacttcactacttaaaccatcagataggctttcaaacatattcctatcataagaaacatgatgaatagcaccactatctatgatccatgtattttgtgataacacttgcctagaggacgttagagaacatagtaaccataaagtcgaaggtgagaaagagataccattgaaagcagaactttgaagtgaccaaatctgctgagttagctgataagaccttggcaaattcgtaatgtgaaatctagtatccaagtctttccagatctctgcagcatcattgaaacgaagtatactcttatagatctgctttgtaacagaattaaggatccaagatttaaccatactgttgcatcgtaaccacactctaaagcttggatcagattcaggaggtcttggtaaagttccatcaacaaaagcaatcttattcttagcgtccaaagaaacaaatatcacaatcttccaagaagagaaattagatccatcaagtacctcagaaacaagtgtattcccaggactgtcaccatttgtgagcttgaatggcgaataatgagcatccgagaagtcgaactgtggtaaaggatagatcgatagttttgaattgaaattttgttgaaacggattcgaaattggtggaatcggtgaagcttgaacacgttctggagttttctcagctgaagttttgctcgatcttctcgtacgacgccgcaatttctctacggaaaccatcgcaagatcaacgaagctctaaacaactgaaattttccagaaaacgcagaaaaaaaaaatgaagaaacaaagaatcaacgagtttggaagatccaagagctcgaagatactcagagtttaggttgaatcggacgaatcttcgagatgtatcgctctgttaccataatagttgatgaacgaattcaaagaaacgaagaagctgagaaaagtttgttattcttcttaattgttctgttacatgaaacactctttatatagtagagtgttccggtttagtaaccggtttacattgtaccaaacaacaagacaataaccgaatctatggttaatatcttttaatttctattttacaaggattatgttaggatgttttttacttgatattgggaggcattgtatgattttgtaattgttagctggttaagtccggtttagtcaggtttagttggtagagtttacttgtatatatactcacaatgtacagtattttatcaataagagaaaatagaaacttcttcttctacaatctttctctctaaaaccctctttttcgtcttcactattatggtatcagagccatcacggttctaatcttcttctctccgatttgattttgttcttctcttgctggtttcttccatcttttgagctctttttcgttcaaaatggtgaaggcagctcgagtcactctcaaatcagctcgatctaagtccgttgcgagctccgttgcgagctccgttgttcgccgatctactcgatctacctccgatggtaacgtttctcctctaatcgatcatccagcagctatatctcaagtttctggacttccaagaggtgttcaatcgctagatctctccgatccaactcagtcaactctgtttatgcacagtgcagaccatccaggtttaaacatcatctctcttcgtcttgatgaaacgaattatgatgattgaagctatgcgatgcgtatt

SEQ ID NO: 35730 - DNA, 3218 bp, Arabidopsis thaliana landsberg
cgtcgtttccctcgattttcttccccctttcctaaacccctctaaaaacccttcttttatggtttcaatctcatccatcttcaacctctagctcttcgatttcactgtcactctccactaaaaaaaagctactgcttcaagctggctacttcttcaatttcctctcattcatttgagttgatgtagcaaaacaaaaaccaaaatggttccagtctcgttctgcctcttctttctccttctcttgctttctgctggagagagttcatcgcaattagtttctggcccacacatcaccgatgttaacatactcttacctcccaagatgaagaatccagttgagtatcgccttcaaggaagtgatggctgcttcaaatggtacacatttacccaaactcatctctcttataagtagctgtattacccaaatctgagttttgttgttgtaatttgtaggtcatgggatcatcatgatattctatcagtcacacctgagtttaattcgagcagtcattgttcgaccagcgcgcgtctcagatcgatttctccgtatagtggtagaaaggagactgcagtttatgccactgatatacagactgggatggtgattcgctgcaaggtctttattgacaacttctcacggattcagatttttcataattctatcaagcttgatcttgatggtctttccatgcttagagtccgcgcttttgataatgaaggttagtgtcgtcacaagtcaataaagtaatgtttttgcttcagtttgtgctgtgattatagaaatgtgctgaaatctatttgcagataacgagttctcctcactggtgggtctacaattcatttggaagctaatgcctgagagtggtggatcaacacatcatcttgctcatgtgcctttgaaggaatctccgttgactgactgtggaggactgtgtggctacttagatatccagaaaaagcttgaagatagtgtatgtatatctattgttgagtgtgaattactgaatctaaaaaattgatggatgagagatctaatgctgacatggcaaatgcagggtgtatatgcagatttgcctgttgtgaagggaactaaaattggacatgagaaggtttcaattcatctgcttgaggctcctctgacccatatagctgatgaaattgcattaacggttgcagaggccatgttttctgaacctcgctcacctgtctatgtcctgatgggagcttcttttggttacacgttataggttttgcgtggaaatgttcctcaaggtttgtctgcatcttcgagattaacttgttatttagcaatgcttgagttattcgattttcatgtgtgtttaaagctgatgatttttgacacatatattaaatgaaaacaatgtatagagctaccttggtacatttatcatattaaactggcaggcttattcgctttatgatatttcagtggtgttgattcataatttgaaaatacttgtaactgtagctcgagtgtgacatgctatgttatgttgcttttcattctcgttcttgattggtctattgtttattttatttgcagccgtggatctaccatcaccacatcatagatggtctgtgttaaactcttctgttgctcaagtggattctttgataggtctgactaaagcgttaagcttgggggtaacaacagttgttgttgaggatacccgggtcgctggccacattcaaggatcatctattaatgttgtcactccagatactcttatcttgtacatatcaccttggttaatgtcaggggatcttattacagaatccaaaccttttccatcatctatgcattggtatgtggtgtctggtcgtcaatatctaattcaaatgaagattttctctggaagacctgatgcacatgaaatctatataactgaggtacttttctttttcttttacctgttttgcatgcccacatgtagtttgcatcagtttcgttgtgtgacaatattaccttgcctctgtattttctaactataggacgtggtgcatagtttatttatctttaggctgccaatcaatcgtccataagcttgtctttggtcatgagtctctttatactgagtatgtgttctattttggggaggaaactgctggtggctacacagtattcaaatctttaaaactgaagaaaagcctgatgatgtgtcttttgtggctgtttttctttctttctcactgctgttcatttgtttgcatttaagtttcttcctttaccgagttatgtccagaggatttattgtagataatattgcatgtatgttcaacataataatttcctttgtgttgattgcagacggatgacataaaactgtatggaaaagattcagattattggaaaatcgtctcactgccagatgaactttcctctgaatatggtcagcgaaattctagaattttgaacgcaatctcaccaggattaggagagctgacatctacattgacttacttcagtgggcatcaagagtcaaaagaggtgagaaaattatatatctttggaaaaccttttgtctctttccatttgttggtactgcaagagtaacaactttgtctctagcaggttctcaaggttgtccaagaaattagggtttgtgaaaaagtgcagttcacattgaacagtgaagatgacacacctaaggttctactcccatggacccctgctgtttatcaggagatggagctaattgtgacaggaggttagttcccaatctatggttctcgtgacctattcttttttagtttgaaaaccatggtaacttgatgattgttcctcactgtaggttgtgcaaaagcatcgagtgactacaagtggtttacttcagatataagcattttgtcggtgtcagcttatggaattatccaggcaaagaggcccggtatagccactgtgaaggtggtgtcgactttcgattcacaaaattttgatgaggtacattggctttattgcatattatccatcagttgatgcttcgacaaatagaaaaaatatatattttaaatgctcaaactcgtttgtgacttatcatgctatggccctactgaaaatcgtggggcttcaactgattattgtgttttccataggttattgttgaagtttccattccatcctatatggttatgttgcaaaacttcccagtaaagccagtagaatggatcacacctgaaagctgctgtcacaatgaagg

SEQ ID NO: 35731 - DNA, 2463 bp, Arabidopsis thaliana landsberg
ctttagagaaagaaatcaaaaataaaagaaaataaaagagagggaaagacaaatcaaaccagtgggttgcctcccactaaacgcttgttttgagtcaataacttgacttgacggagttcaggatgtgggtggagtggtggaggattgctgctacctccttgccttccaaggaggtgtttaaactgatctagatggggcagctgcgggtgtcgatcgacactcttctcgtcacctgcaagaacaacagaagaaacaagctttcgaagaactctaggcttgttatctagtgaagcagacttcgaagaatctaaggaattaatcgaaggtaaggcaggagaagagatagaacagaacttatcacataggtcctcaagatgtgtgggctgaagagaatgtgtagaatcatctgtcaagtggtggtgatgatcgacaccgtatctctacaactctcattggcgagttgagctgatgggagcgttgtgtgtggctctgttgtgggattctgagcagtctgaggagttgtgtctatgctggacgcaatgctactgatagttttagtaagctctgaaccatccatgccaaacttcatctctaaatcagaaacctttagagagattttacctctattcacatcaaacctagcaccagctgtagctaggaatgctcttccaaggatatggggatccttgggttccttctcatagtccaggaccacgaaatcagcagggattatggagttaccaaccttaacatgaacatcttcaaggaatccttcagggatgcgtttggagcgatccacaaaaaggagagtgattttagtcggcttgtagttagtcatgcctaatctctcatcaacagacttaggcatgcagtttatacttgatcccatatcacacaaggaatttctgaacctgcttgtggagctagagcaatcaagaataaagctacctggatctgggagcttctaagtggtctaatctagagtgatggtgcggatgtactcagctatgtccactctctttggcttctccttcttggctttaggcagcatgattgcactgatgtccttggtaagcagcttagcttcatctgagctcattccattgtcaacaagtcgcttgacatacctgttgagtgaggcagaagatgtctgagaatcatccttaggaagagtatgaaggatcttctccattatagatgtgcacttggcagcatgaatctcctgtttacaacgacgcctcctcggataggggacaagaggagtgtagacagactcgggttacataggtacttgcacctcacaaggggcagtccggatccagtgtcgatcgacactagaggggtatcgatcaacaccgtcgtattgagtcgtcttagagaaagagtctcgtatggtgccgatcgacacaggagagtgtcggtcgacaccatcattacaactacgagctccaactcgtcttcagtgtccaattcctcccaaacatcatctccttctctgatcaagatggcattgcagctcttcctagggttagcatcaggattaccaggaagcaaaccctcttgtctcttgatagattatgcagtttgagctacctgtacatctagcttcttcaagtgagagctcatattgccgatcttcccattaagatctgtgtagacagcctccaacttgccattaaactccacaacaaggtttttttggctctccagaatttgctcaagcatcgattccattcttgtctcaactgagggtggaggggtgtgagaccccgtcccggggacgcggtcgttacaagggggggtttggtaagctgaattaccataagtcctctaaaagttgttctgaggaaaggtcttttggaaagcaggttttgtagtgtagcctgaagaactctgattctttgtaaacatgttgccattgaagttgccatgtggctgcccaaacttcctgtaaccttgtccatctatgtagaagactccttcttctaactcaaactcaggctcaatagtctctgcttcagctgcaaagtggacatgcttcctccctgtaagcaagttatgaactgaatccaacttagcatttacttttggccatttgttttcttaaaatagctccagcatttttttttctttcgaggtcagcattcttggtactattgttgctggcaaggttctctatcaaaggggtaacatcaactggatagcgtgtgttgaagttaccatttctcgctgcatcgagagctatctggtatctccaataaactcctcttaaaaacgtaccaagaagttgtacctcactaaagccgtgatgcgggcaatcccattgatactcgttgaatctaacccatgatgccttgaaagcttcagctggacctttggtgaaggtagacagcttggttctcagctccttagacttggcattatagtagaagttgttcaagaaagcgatcttaagaatttcaa

SEQ ID NO: 35732 - DNA, 972 bp, Arabidopsis thaliana landsberg
tttttcccctaccctttttatattttggggtgtttcttgagtgttttgtttttctaagtctcccagatccttctttacgcttgtggaacccagagcagttttttgtttgcatatttgaagcttttatagtatctaatattctaactaattttcaatctattttaataatcaatatactgaagatttcaaagttattttcgctattaaaaagttaaataattattttttagtaggattcggataatttcagttcggaccctagtccaagtaaaaatgggaatgtagttgaattagtctctatatataaaatatatagaatcaatcaatctattagatacttgataaggaaaaagaaaaagctagtaataaaagtaagtctttttcctcacgtcaacctagtaattaagtaatatgcttttgttgatttgtttttctataataatattattttgcatcagataataatagcatgactttttctcatcgaatccctatctgatatgaaatataaccggcctctattttaataatcccgtcttttctcttgtgataattatccagaatattctcacaattaaattgatttttttgtaaccgtgaaacctaatttacctaaggctctttttgttagttaaggatatatttctcatatatggttggtagaatattcactgtatatcctctgtataagttacgaccatatatgagaaaacttttcttcttcctttgcacacacgtcccaaaacagagagcaaaattcaccagaatcatggagagctgccagaagaaacaaaaattggagacaccaacagagctcagtgatatgcctgatgacttaatcttcaaaatattctcgttccttccgttttttaaagaggatttagcaacacgtttcatatcagaatatgggaaagggtcttttggaatccagacccgaatgccatatttgatggatgaatcactcgatatgac

SEQ ID NO: 35733 - DNA, 2561 bp, Arabidopsis thaliana landsberg
tcccagaacatggttgaagttgctgtggtttctgaaatcatatcaaatcttttcaaaggtatataatctttattgatttataagtgtatagtatttaaactgtttcattattccttttgacaaaatttgcttaatgttgaaacagtttctagggaaagaaagatgaaaatgagtgttggagtgattactccttacaaaggacaagttagagcaatccaagagagaatcagagataagtacagttccttatcaggtgagcttttcactgtgaatgttcggtctgtagatgggtttcaaggtggtgaagaagacattatcatcatctctaccgttagaagtaatagtaacgggaaggttggatttctcagtaaccgtcaaagagccaatgtggcactcactcgagctaggcactgtttatgggtgattggaaatgagtcaacactggctcggagtggttcgatttgggcaaaccttataagtgactcgaagagacgtaaatgcttctatgatgctaaagatgataagagattgagagatgccatgaatgctgtccaaggttgataagtctgatgtgtgtgcacgtttaagtactctttgggtcaaaaagaaagggagaaaatgagttgttggtacttcatctatgtcattcttcaacctaagttactagtagaagcttttggtaacattttgtgattaatggttgtgttttaaagatttggttggttttggtttcacaccttatggaatctaattggtctgaccaaactgaatgtctaacaatgttgttccaaaaatagaataagaataaatactagaaaagtttagttaccctgagacagctacataaaggttcttatgtttatgacgagagtgtctgtctaatacaagctaaagtacgtcctaaagtttcaggacccatactcacaaatatgattatgtttctttctaaaaacgtcaaaacgagagagatgcgaacgaatggcatataaagatgagtggaaacgacttcaaatgggaaacaaagggctcccgcgttgtagcatgatgagactaacaccgaagcagcttctagagatgggtcgggttttgcgggaataacccaccactgccttctccatgatctcccatttgatgcacatcttctggtgatagtatctttatgtaccaaacgttattcacaaatgacctgcagaacaagcttttaaagatctatctcaaatctaaagcaatgaatacaaatagaagaagagtactttacttactcccatgggtcatcgccaaggagaagaatatcattttccttgtcaacgaatacaagctgccagcctgatctaagggggtcttccaacaacccttcgatagcaaacatcttccctaactcttctcgcagctcgtggtagctgctgaatcgggagatgtctaatgaacgcccaaccgaaccagatttataaacctgcagttttggatttgtaagcatatcagtattttcttagagacagtagagccacagagaagtcggtgagcctagaacaaaccagcacctttacaaagttcttggtttggttggacgagttaatctgtccagctccatgcaataactcatgagttgtgtcttgcatgcagctatataaggaattctgaaatcctgaatctgttagtgacataggggaagcttcagcatctcctgatgaagaagcaaagcggggaaccgtactggggaggaagagtccagagtcgggatcaacaccgaaaagagagggattctgcggatttccgggttctagagcaagactcttcccaggataggcttgtggaagtgacaacggttcagaaaaagtgttggatgcttttggagaccagccctctgttgttaactgctcagggagtacagactgaccggttatagaaaaattcaaaagattgccatctccagaagccggactagcagttgttgcaaatttgttgcttgagtcagtaaaatctgacttcatgaacgagggagatggcatctctgattgctgctgccactgttgaagatggccattttgcattttgaaagcattaagatatgcattttggtccggttgctgtagctgttgctgctgtccagctggttggttactaacttcttgtcgcatattctgctgcggaagattctcactcataatctgtgtttgagcatgcatgagatggcgtgacgcttgttgctgctgttgctgctgaagcatcaaatcagaattatgggaagctgattgttgaagatattggtggtgaggctcttgcagctgtacaaactgctgtcttaaaggatctccaccgccgatgttctgcaacccagcagctaacattgcttggtattgctgattattatcagtccccatttgactgagatccagcctttgttgcatccatggaaacaaaccaacagatggataatttagaggaagcaaaccttggtgctctccacctccccctcttagccatgttagaccactttccaaatcaccccttccatctgtaacatcataatgatatgagtaaatagctgtggagagtaccta

SEQ ID NO: 35734 - DNA, 3591 bp, Arabidopsis thaliana landsberg
  unsure (1)..(3591): unsure at all n locations
tacaggtaactaacccttttaaacccactttgttttttcagaatctttgttcttctaaagacattagcttcatgttattacatttttgtaatgtgcagatgagacgggtgaagaatagcttggaacagaagaaaatcaaacttcagtataccaaagaggcagtggatctccttgctcagcttggctttgaccccaactacggggcaaggccggtgaagcgagtgattcaacagatggtggagaatgagatcgctgtcgggattttgaaaggagatttcgcagaagaagataccgttcttgtcgatgttgaccacttggctagtggcaacaaattggttatcaagaagctccagagtaatgcttcagctgaagaaatggccgcttaattgcacaaacaaaattagacgattcggggtttagcgtttataactcttttgttctgtcttttgtagattcgtactttagtgttgctctctcttctaactcgtacggaatgtaatgttttgaggataatcttttgccgacaaaagtaaatgggaacacaccgacttattcctcccttagcatttgaaattgtgaactgtatggagcgtttaaggactcacgtaccaatgtggtactattagaatttgtcacagatctgattttcaaataaggagattacaaatcttaccaaatcaaaattgaagaaacgtttttgacttggaataataaaatttttaaccacgttctcatgtcgctagaattgaatcggatattcggatccttctctttaatagcttccgacattgaagtatttgtttattcttatgtaagtttcttattaattcgtgtgtctgatatttaatcgagttagtattcttactagtgataaagtattagttagggactgagaaatgtcggtcgtgtcatgcaatgagggaaacaacctggtacatcgagtctaaacaattatcgttttcttagaattgtacttttgatattgtgaaatgagcctaccaattataatcaaattttagctatattttttactatttgaatgattgaactaattttgatatacgttcgttatgttcgtcggaaaagtattcgagctagttcaatctttatactactctaggaaaagtattcgagctaacatagaaaacaaaatatatgtgtattattcaatctatattttattttagaagaaagtatttatccgaacgtagaaaacaaaatgtgtatttgaggatcaactattttagttagtcaaaacgggtccaaaacccgactatatataaatgtgaaacttctaaattctcaatcttaaaattaaatattctctagaactccacaatattgtttttgtaaaatattcgataaatctctttaaaatcattttggttcctctgttttcgcttccaaacagaacaaactcttttctctctccctctctctttcttgcttcctcaagctctatagaactgatcggcgataatggcgaagtgtcaccggaacaatgttgatcctctcattctccatcgtactccctctgcttcttcttcctccgtatccgcaaacaccttctccggttcgtcattgcgcaggatcatcttcgacgccattagttgcggcggtagctcccgttaccgacgtgaactccgagaagaagacgataaagattgttcgaaatcgacaatgatcggagaggattcaatgaggaaaccggagaagctcagcgatctgttaaacttagcagtgattgagagtggtgtagagaccaagaagaaggaggaaacacttgagattctaaaacgtgttgttaaagatttacaagcggaggcggaggcggaggcggcggagaagaaaatagcggcggctagtgaggttaggttgttagcaaaagatgatatagaggcgagagtaacacttgcgatgcttggtgcgattccgccgttggttagtatgatcgacgacgagtcacaaagcgaagatgcgctaatcgcttcgctttacgctcttctcaacctcggaatcggcaatgatgtgtaagtttcttcaagtagattttgagttttgtttcctttgcattgcatgtttctcttgcatttcaaatctctcattaggttttgtgaattttatttgtgaatgttttttttgttgttggtttgttttttttaggtgaaatgatagatagagtttaatagttattttcagatatgtcactttcaatgctattctttgttgttggtctgttttagtnacatgtttttctgaagccaagaatctgaaaaagttgaagcattaaattcaatcatttgtttcaatgacatatgtttaaattctctgaatttcaggaacaaagcagccattgtaaaagcaggcgttgttcacaaaatgttaaagctaattgagtcatcaaaacctcctaatcaagcaatcgcggaggctattgtcgctaatttcctagggttaagcgcgttggattccaacaagccgatcattggttcctcgggtgcaatcatcttcctagtgaaaacgcttaaaaacttcgaggaaactagcagctcacaagctagagaagacgctcttcgagctctttacaacctttcaatatatcaccaaaacgtttccttcatactcgaaactgatctgattccttttctcttgaacacattgggagacatggaagtgagcgagaggattctcgccatcttaaccaatgtagtatcagtccccgaaggaaggaaagctatcggggaggtgattgaagcgtttcccatattggtagatgtgttgaactggaatgattcaataaaatgtcaagagaaagcggtttacatcctcatgttaatggctcataaagggtatggagatcggaatgcgatgatcgaagcgggtattgaatcttcattgcttgaactaacacttgtaggaagtccattggcgcaaaagcgagcctcgagggtactagagtgtttgagaatggtggataaagggaagcaagtctcagctccgatttatggaatatcttctacttcttcattgggaagagagagaggtcatgatcttaggatgacggatgagagaaaagcagtgaagcagttagtgcaacagagtttacagagtaacatgaagaggattgtgaagagagctaatttaccacatgactttgttactacttcacagcatttctcaaagagcttaactttctgaatccaagaaacaaagtttgtatcaaagagcttaatcatttccaataaaatttgttactaggaaatatcttaagtattaccaccacgtttatttgaaaaaatgatttttttgtattttagtcagaatttaaaatctaactaaaatagttatccactgattacgatgataagttttctagttttgattgttatttataaaggctatttttatttagttgtttcatgctatgtaagtttttaacttcaggttaactttctacccaaggttaggtcagtgacagtggcatcaagtttaattacggggaagataaggggtactaattccctctaatttggatcttcacatgcataaataagatatatatttttcttcatgtcatttctaagcccccca

SEQ ID NO: 35735 - DNA, 2586 bp, Arabidopsis thaliana landsberg
gacggaattgctgagaggaatcaagaagtaattcaggatgctacttttttttatgagtttttgtttctagaagatttgagaggagcgttgtgagattatgaggcaaaaaggataaaggacttaaagatatttggaagacttcatgaaagtgaagtttcatgagaaaaaagacaattgtaaaaagaaaatttactttttcttatggaaaaaagaaatcttctcctatggtgattagccaatcgttttggctatataaggaggagctaagacgtcttggagaggcaagagagctgaagcataaagaagaaacctttgagagctttttgtgagattttgtgtgacgtagttttgcggtgttggtgtttgtgtgatcaagtttgtttggtggtgtgtgaaggttgttcgagagacttgaggaattgaagtctaggcttagagggagtttagctcagggttaggttatcctgataaaatctagacttagagagtttagttaagggtagagattatctttaaggtttctcgttaatagaagggagcggtaaataaagagggttgtgcttgttttacttgtttgcgaattggttgtaatttgctttcttgttctagtgaaatcgaatctgtacttgttcccggttctgtgtaattatctaattatatctaaaacaagcacactctccagtgaaaatacagagtgtgcttctagcgggttgatgtcagcactctccccactttcctgtgctaggtactcctctatctcttctcctacttttccttcgattatttctttaaaatcttcaaagtgtgcttcactggtaaacgagcattgaatttctcgagagcttgtttcatctactgattttgcaggcaacagagtgagtatcgatcgacaccacaccaatgtcgatcgacaccagatgctgcacagagacgatctgtttacacaccgccttggaaggcgagattgcagcacaggtcccatgttcccccatccaagtcgtgaactccgccaagtcaaggtattgactataaacaagcgtttatgggaagcaacccactggtaagcataggtcctcatgctttatttcatgcatttgagacgcaatgataacactagattgtaacctttttaagcccttgtttttcatgcatttagcttagtttcatgtctcttttcatgcattcttagtctcttttccttcttttgcatattatgcattgcattgcatagcatacttgcatttggagtattttacaggtgaatcaggtacttttggactcaacttggaggtttttagcacaagcgatggacagactcgagttcgggggatctaaggaaagacttgaagtatactcgacttatatactcggctggaggccgagtggagcacacgtgaagaacaaggagtctactcgaccaaggcactcgactggaggtcgagtagtgcacttaaggaagaagagaagatgctcgaccaagccactcggccaagacccgagtgatgtgaccaagaggaagtcactcgacttttctactctgccaagacccgagtggtgcagcgccgactttcccattttgtctttttcccaattagggcatcctaggattgcctataaatagatctcttatgtttttgcccaaaatatctttgctttgtctgttggatattaggcttttctagatttctattgcattttcctactattgggttaagaatctaagtttgatttcttctacaaagttgtttatcttgttgagatctatcacttgctaagtttataatgatttctgggttttatgatttttctgggttttgttctatgatgttcttcattgttattgagtagtgttcttcaaagttcttgaatatgggttaggtttaggtagatacctctgttcttttagctagctaagtttataattgcatgatttccttctgttttaggagtttttaatgctatttcctttctgatcaattggaaattgatttcagactttctcaacctaattagtgtttgatgaaatgtctgaaccaactaatttcagagatttgtagattctagcccaagacattggatgtttagaaaacttatttttcatcaatgaaagttgagattaggaagtggtaaagttatgaggatcattgtcatgagagtgtattgatcttgttttgaatctattgtttagggataacttgattgagtttgttagttagctaaatggattgaggagtccactagaaccaattaccccattcttaagagctctatttcgttttattgtgcataactcgtgtctttagtcttctgctcgttctgtttagtttcttgtgcaaacttggtgtttttagtatcttgcttgaccggttttaatattatgctcggccgagtactttacttggtgcttggtttaactttctagttcatgcatttgatagttcttggtctttaatttcattcctgcttctatcacttgtgttctttactttctacttagtatagtttcatttctaaatctgatttgcatgttaatctattgcttaggtttagtagaacaccaaacccactcatacttggcttgactta

SEQ ID NO: 35736 - DNA, 461 bp, Arabidopsis thaliana landsberg
aaaaaacccccccccccccccaaagggaaaaaaaagggaaggtaaaaaatttttgaaaccccaaattttcccgggttttggaaaataaaaaaaaaattggcgcccaaccttttcccacaaacttcaggaatgggtaaactctgcaacatgccacccggcacctgatgttcagccttaactaactagcatacatcgcactctgcgacccaattagctacatccctcttcatcccgacccaatgataataccgcttaaggtctcgatacatcttagtcgctcctggatgaatggaaaacatgctcgcatgagcctcactcaagatctccccgtcgcaactcctcatccttaggcacacaaactcgcccatacacaaggatagtcccattagctgcaaactgatactcagagccctctgccttagaagccgcaatcaacccctcatccttcttctgagctaacc

SEQ ID NO: 35737 - DNA, 2446 bp, Arabidopsis thaliana landsberg
cagaccagaatagtatattatgagttcatatgaccaccactccaggctgcaacccatatataatttagtttttaacaaaaaatgtggaggcaatgagaagtgaaaaaggaacagagaaaagtgatgtaccaaagcatagccgcagaaggaagagcatatttgataaactctttaacgccgtcgaatatctccatggtaagcggcgcgcgtgtctcataacaggcagaggagtagtacatgaaagatccaaggaaaatggcatagagccagtttgacaagctgagagccaaagctcctccaatatgaccaagccctgacttataaaccaaaagccagcagagaggaacgtggatacaaaacacaacataggaggtgatgaggagaggtgtgatcaagttctggttttgaaagtagcgagtgagcggctgtagaacagcgtaagcaaacagtcctgggataagccaggtggcatattttccggcttcgtgagcaatagaagggtcttggccaaggatcaaaagaagcttttccatgttgaaccaaatgagagaaagagggagacacactaatgcaagacagaacatagcagtgtaagtctgaactcctagtttccggtatagcttagctccataagcttgaccactcaaagtatctaaggcacatgacaatcctatctaacaccacaggcaaaaagtaacaatcatcaaaataacagagataagtgtatcaatttaggggaaagaaggaagagaaaacagacgatgaagctgaagccagtgacgttgcagaaggaggaggcgagagaggcgctagcgagggagagattgccgaggtgaccaaccatcatcattgaaacgatttgtaacatgaactgagcgataacaacagcagccataggagcggcgaagaagataagccttttgagttctacggtgaatgaaccatctcgcagatcgctccatgtcacgttctcgactctctctaccggcagcagcaagcgatccttagtgctctctgcgtctcccatggctaaatgcagagtgatagagagagaatgtaaaacagtaaattttgatgatttgtgggggaaagggtcaaacaaaggcggtgagtgatatttgtgatttgtgcctgcatgtcctccttcgacgaatcttcccaaaccccgtaaatgaaataatattaaactttggcttagatttcaatgaaatatttttattttaaaaatgcaaatttgtttgggatctcggtttttgctgctatgaatctgtattttgacctttttatcatccacactctttttcaatctattagtcattctattgaatggacgaaaggtagttcgttataaaatactactatatggatgcgaagctggtaaagtttcttggaattttgctaaaaaaataactaaattgctggtccattctccaaaggctgtttttgttttgttttctcttttatacttgggtacacttacacaagtggtgaaagaagataaaataatgatatcctgatcgtccacgtgtcaaaacatatgaacgagaatcaaattaggtgcatagagctaaaaaataccgaaccaatcggaccgcccttttctaccgccgacggtcacatagagacccaaatctctccgccgtgtcccatgcgcactttagccactccctctcccccatgtttatcgtgttccatgtttagccatgtccgcttctgccgcaatagccgtgtcgtatccaccgccgccgtagtatctccagctctgagttctggaaaattgttttaggttcgtcgatactgttctttggtggcattgccaatgccttctcctccagctttgattctcttggtaaattacgcacgagtgtataatctctgtcgtctatttttgagtgtgttcagaacagagctgtttttcaggtaacatatgaattgctcatctatgttacgctctacttgaccacttagggattgaatttggcttgacactgttggtttttgcaggttccagtaatgctgtcaatttggagatatgcgttgcagcgactgtattaactccattaacaccacttcttggtctctactttggttctcaagctcactggcagctgaatttgttcggtgaacatataaaaggctttgttggcattattttctgtccaaggtatttctgaacaacaagaaataaatcttgatagaaacaacgattgataaaggctgcttcttattactgtcgaaaatcatgcagtattcttacaaaaagactcgttattagcggtgtgccgctagtccaaaagtagcagagaacgatttggctgctactaagatggtaaaaccggaggaacgtatggtccctgtaatctttagttgtgaaattctgagtcgaggagaatttgtccgctgctagcgatgcccaaggtatgctcataatgatatgtttcattca

SEQ ID NO: 35738 - DNA, 459 bp, Arabidopsis thaliana landsberg
agaggaaatcctccttttaagctattgttccttaaagaccattggcagtaatttttaaaaggtaataaaagtcatttgccagtgggaaaaagggctagaccgtaaattaccacactcggactcaaatcaaaccgtcaattttataatctgaacggttagtaaagaacccaaggagatgccctaaaggcatataaaccacctttacctaccattttacagagatggtagatagagagaaagacgcttgtggtcaggtttcgttaaacccgtcggtgaaactagcgactacgggggtcgaacccgtctgacgtcgtagaattcatcgttgtcttgacttcctttcttccccgacaaaaacatggatctgagattgccaatcatattcaccggaacttctatgtaacttgagaacaatttgcagagctgacgcttccttgtctaatttctgttcacatcaat

SEQ ID NO: 35739 - DNA, 1685 bp, Arabidopsis thaliana landsberg
actcctcccttaagtggaagaagagagaagagaaagaataataagaaaaagaagaataagaagaaagagcgacataatcaatgagaggttctgtgaatggtgcagagagatccgggcagacgataatggtggctctcgttcttatggttggatcattttacactggctctctcttcggaaccaaccaacccatttacgtctctcatccttcttctcactctggtcccttctctctcactcttactctctctctctctctctgttttttttttggtaaaaggatcactctgttcttccttcttcaaaagttttttttctgcatgcggttggatttttgtagatttggctaagttttggtctctcgaggctaaatttatcaatgctcagtcaaaataattagagtgattcttgttgatggggcagcttcttccaaatttgcaaacaaaattgagctaacttattgaagattaccactagtcacacctgaaactggggtgaatgtttgtccattgaagttcaatgagtatataccttgtcacaatgtcacgtatgtgcaacagcttctcccaagcttgaatctttctagaagagaagagcttgagagacactgtccgccactcgaacagcgtctgttttgtttggttttttcgcctaaagattataagataccaatacgctggccgactagcagagattatgtatggagaagcaatgtgaatcatacgcatcttgctgaagtgaaaggcggccaaaattgggtgcatgaacaaggtcagttatggtggttccctggtggtggtactcatttcaaacatggagctccggaatacatccagaggtatttgaaattatcatgtgtttcgatttctatattgctttggaattcgagggagaagaaggttagaccgggttttatacttttgcctaatgcattcccctgaatttctgtattgtaatacaggttaggaaacatgacaactaatgaaacaggtgaccttctttcagctggggttgaacaagttcttgatgttggatgtggagttgctagctttgcagcttatcttcttcctttaggtataaagacaatgtcttttgcccctaaagatggtcatgaaaaccaaatccagtttgcattggagagaggaatccgcgcaatgatctctgccatagccaccaaacaaatgccatatcccgcggcctcgtttgatatggttcactgttcaagatgtcgtgttgattggcatgaaaatggtatgtctcttgtgttcttctttttgtttctcaatgccttgcttggttttgtattatttggaactaaagagagtcatttgggtttgattctgcagatggtgtcttgatgaaagaggttaatcgtcttctccgacccaatggatactttgtttactcggcaccacctgcgtacagaaaggataaagatttccctgtgatttgggataagttggtcaatctaactagcgcaatgtgctggaagctcatttcccgaaaggtacagactgcaatatgggttaaagaagatgacgaggcttgccttaggaagaatgcagagctagagcttataactatatgtgatgtacaacccgtttcgaaagcttcatggaaagttcctcttagagactgtgtggacattagtgaaaatagacaacagaaaccctcttctttggctg

SEQ ID NO: 35740 - DNA, 5129 bp, Arabidopsis thaliana landsberg
gattttacgtttttttggagttacgaagagaaattttacttgcaaatgtgatagttgaggtggttttttttacagtgggagattgtgtgttaatgcgtccatcagatgctggtaaagctccttacgtggcacgtgttgagaagattgaagcagatgcaaggaacaatgtgaaggtgcattgtcgatggtactattgtcctgaagaatcacatgggggaaggagacagctccatggagctaaagagcttttcttgtctgatcacttcgatgttcaaagtgcacacaccattgaaggaaaatgtatcctttaaaaactacacgaggcttgaaaatgttggagtggaagattattactgtatatttgactataaagctgctactggcgcgtttactcctgatcgagttgctgcgtgagtggatacatagtaatgaaacatgcctttttctcctgtagtttacatagagttttgatttatcttcttttggattttgataaaggtactgcaaatgtgaaatgccgtataactcagatgaacagatggtgcaattaatgtgaagagtgaaaggactcgtaaatgctaattttcatcattctattttcatcttctttttatttcaagtattgttgcttaactagtaagatatctaatgctgaattctgatgattataaactcttagatatttgttattcctaatccggaacaacttgcttgtgtaaattttggatagaaatggtctcctctctgtttgaggtctaatcgaaatagttattgcataatatgttctttttattaaattgtaggagttactactatgtcattgtagggttcacctagcgtgtgtaggcgtgacgattgaagaagccaagaagctggaacactttgtatgtgttgaatgcagctctgacgaagatggagtcaaaagatatcagaacgggtttgcttcatcaacaaccaatgatcttaaggtatatgttttgtcttcttctttttattcaacttttgttattactttgatactgtcatagcaataacctctgccaccatcattggctctactttttaagtacttagtaaagtcacaaaaagcaaaatttcattggcttgatgtttgtggctaaaaaaataagatatgtgactcgtacattgttaatctcttctcttatcctgatcaaatccgattgtttttactgttttacctgaaacaacatgttcttgtgttaacaaaaaacttgtgtgttcaggtggaagccaagcgccgaaaagatgatcgatgtaagagcctcttatgagttatgagtggatagtatagtttacttcaagctctttgggagcaaatttaagataattaggattttgtgttctcgtcgtttgatgatgtgaaaagagaaaaaagagagaaagaagaaccagagaatgtgcaaagagcagtatagccgataatttcgtggggataacatataaaagtttcaagcacctgagattgttttactgtggattgattgttttgagagagagattctttgcacacacaaaaaagaaaagatagagagagagattcaagacatgagctgatgaacacattttgcctctgggcttgtggccaacataataagtaaatatcagatccccactcctcagagtctgataatcaggttgagttttgtcatacgaatgcgggagtgtgataatttggtcggtttcttggtgattaagagataagccacagctaaacctaagtcagagttggaatacaagatttattactgaaaatttcacttttaaattagaaagtacggattattgagtaagttatttgttgaatttgtgactggaagcgttttgatgcgtcatttgtcaatctacttgattagttacatttttaacacatgatacaaattatgtgattgttgagattggataattaccactattatcatcttcttatcacttactccctaagtaccttgttctccaattaactaaagtctatcctattatccaaatctacctttcttcccaagcaactctaatatatatacgttagttctctttacttcattgtaagaaatagaagtcagtaataagaagtccatttcattactttctcgtcacttttttcttttgtcgtcaactagttttttttacataaaggtgaattggagcccaacaacatatatctaactaaagcccaatcttagacccaaaacaaagatgacaattgaaacatagggtaagaaaaggacacgtggataaacacgtgttgcacaagttgggatggagtcgcatgacgacagatcaccgccatctccaccggcacggaaccaccgttcagatgtaaactacaagaaaacctaccatttgcaattcccatattggtcccaaaatggtcgcaaactaggcgtttacgactacttaacgacgatattagaaggtcgctaaaaaaccgtcgcaaaatattgcagtgcgaaattggttgcttatgagcgacgaattttggacacaaaaggttagtcgtaaataagtgaattatttgtgacaatatcaagaagtggcagatatgcgactaaactgcaacgatgtacacttaggtacatatgtgacaatgtagtcgcaaaatagtctttccctcttgcgactaagttacaacgccttataatgtaatcgcaaaatagtaccgttttagcaacgattgtgccactttgtaacaattttgtgtaatttgatttagtcacaaattggttacagttttgtaatgtgtcgatcacattattgtcacatattttgaataagtttggtcacaaagtggtcacaattatataattggtttggtcacaaattagtcacatgtattgttttggtttattcacaaattggtcttatgtttggaatgataagcctcatttatatcgattcaaaagccaataatctctaatcatgttaacattaagacactaattatgtttacattaaaaaaaccatagtcatacaaatcctaaacaagtttcaacaaaaacaacaggaagcaacatatgatcaagtttaatggttagaagaagtgttcgaaataggaggtgaagtggagactaagggtgtggtgcctgcaactatgatggctggtacggtggttgtggtggttggaagtgtggatggagttgtggtggttggatgtgtttctggttcaggttcagtagaatcagttgacaaataagcagccaactcaggatctttttctttcatgaagaggacgagcttctccaagctggctatccgagattgagattggtggttctcctcattacgttttgcattttgctcctctagttcaaatatcttgagatgcagctgctcttgaagctgcgcaacagttgacgtagaagagctcgcataactctctttccttcttcttttgttcagtgtctccataagcgatccaaggccaaaagggttccctttgccatctgtatgagtgatatggttcaaattacctagaaatactctctcaaataagagatcaattgcagtattttaggattgaatttacggagttcttttgttcaaacagtgagttaaatgttgagattaagctagcagggtatgagtgaattagtaagaaaacaaagtaagaaaatagcagaatgattgggttgtaaacgattaggaaaagagctacgaacagggtattctcaggaaactattggttagtagatctaagaaagctaggttgttatcgaatcattcttaaactaaaactctaattatggaataaccggtgggcgtgccgcgaaactccctatatccatagctaataataaccgaagaagccgagaaactattaacctaaatatgcattcttaacgagttcaattgttcatcttagtagataggccgattcttattacacacctataaaccagactcatcaaataatagatccaactacagatacctatggcgggcatatctattgtctggattcaagatctagttaattactctagatctagcattaagcataattaaagatgaagaatcctatagataacctagcaagggggcaatctactaaatcatatgaatccctaatgagaaaccctattcctaacaagcagattactcagacatattgattaaagcaaacaacattattgagtatgaaagcataaacacaacaaacagattaagggaaagaagggatctcttcattgtattaggaactgaatcaatctctgacaacaatcgatgaataggttatgtctctcttaaacagggtttgcaaaaagcttgataaaaacttgataaacaaaacttaggtttaaacaatgtatataaaccctataaaacatctaaggattaataatgtaaatagagaagtcttctggggcaaatttcctcttctgtaaacttgaaagcatctgggactttgctgggccgaaactagtgtcaatcgagactagtagtgtgtcgatcgagactagtagtgtgtcgatcgacactcctcttaatctggaactgaaaatcttccttagcttcctttttcttagtttttgctccaaaatgtctcctcatctccattgttgtcccaatgcataggatacctgaaaagacactaaaaagactcgagaaataacataaagactcaaaatcctaaccctaagacctagataaaatcagtaaaaacaggattatatcagtaacatcagaggtttaggtttaattggctccctcgtttgggatttcttcttccttgtttgggattatcttctcttcccgactaagttaatttttgttagtttggggttgaacattttgattatgtttgggttttctctcatcgtgtagtatgcgatgttttgcttaatttattgatcgttttggtgttgaaaggtctaagtggttttccattatcttacggttcatccgggagacccttgaaaaagaagcatcatttatggagaaggccaaattccactatcttgttattgccataggttttgaagaagcccctcttcatagtttgttgtgcgggaagtccttgtggtgcgcttcgagagcttcgtttagtctcgagacaagatttgtttggtttttacaatgtattatcggaaaatcccttcctctcctgttgt

SEQ ID NO: 35741 - DNA, 4628 bp, Arabidopsis thaliana landsberg
caagaccatatacatatctaacaacttgtaaagtctgttgtgtagtaaagtccatgtggttgagaattttgtttggctgcttttgatttaatgatctatggaagggtggactttgatgattctacttgtttatggaactcgtgttgccttgcaggatgccagttaggaactacaacgattctgctgcgtttcaggctgagagggattcttcagctggtcgtggcttccaagaaccatcatcgcccaaaatggctaagtctccatctcttcagagaggtcataatgttttccgctcccaggaattgtgctttaatagtgaagaatcgcccaatgatcatagccctgcaccagagagactgggagaaaatggctcgtcgttggatgttggtgagaacgtaccgacagtcagagacaagatagtttcgagatgaggttgccacaccttcctaaaattgacgttcagtgtcccaacaaaaatcaaacggctcagagccagagtcccctgtttcaccccttttgacatcagatcctaaaaacgagcgttcccattcgcagacgtttagtcgtcctcttagttctcctgatgacactaaagcaaatggtaaggcgtctaaggatgctcaacacaaggagtcaccttcgttttggaggttggcacagcttagtttcccagagtggctttatgctgtattagggagtcttggtgctgccatctttggttctttcaatcctcttctggcttatgtcattgcgttggtagttacggaatattataaaagcaaaggaggccacctgcgcgaggaggttgacaaatggtgtttgatcattgcctgcatggggattgtgacagttgttgccaatttcttgcagcatttctattttggcataatgggagagaaaatgacggagagagttaggaggatgatgttctcaggtattggaaattttttaaattcattataatttactttatcccattttaactacttttacttgcctgagttcattaatttctctgatgtttcagcaatgctgcgtaacgaagttggatggttcgatgatgaagagaacagtccagatacattatccatgcgtttagcaaatgatgctacttttgtccgagctgccttcagcaacaggctttcaatatttattcaagatagttttgctgttattgttgctcttctgattgggttgctgcttggttggcgtttggcccttgttgcattggcaactctgccaattctcactctttctgccattgctcaggtttgcatcgcttcttctataaaattgtttgaaattatttatattttagtcaatttgttttcattttcccctgtcacatgtgtttctgactttgcaatacctttccagttcaagtagcgattttagcatatgcttctttgttttctgccatctcattctcaattcatgtagctcaaaaatgtttgtttattcagctgacacgacattctaatcattctcaaaacgaatttgcagaaactgtggcttgccggattctcaaaaggcatacaggagatgcacagaaaagcatctttagtcctcgaggatgctgttagaaacatctacactgttgttgctttctgtgctggtaacaaagtgatggaactgtacaggatgcaactccagcggatactcagacagagctatctccatgggatggctattggttttgcgtttggtttttcacagtttcttcttttcgcctgcaacgcgctcctcatatggtgcactgcgttatctgttaaccgtggatatatgaaattatcgacagctataacggagtacatggttttctcatttgctacattcgcccttgtggagccatttggattagcaccgtatatcctcaagcgacgtaagtctctgatatcagtgtttgaaatagtcgatcgagtccctacgattgaaccagatgataactctgctctcaaacctcctaatgtctacggaagtattgaattgaaaaacgtagacttctgctacccaactcgacccgagatactagtgctgagcaactttagtctcaaaatcagtggcggacagactgtagctgttgttggcgtttcaggttctggaaagagcacgataatctcactagtagagagatactacgacccagttgctggccaagtcctactagatgggagagacttaaagttatataacttgagatggttgagaagccacatgggtttggttcagcaagaacccataatcttttccacaacaatcagagagaatatcatatatgcaaggcataatgcaagtgaagctgagatgaaggaagcagcaagaattgcaaatgctcaccatttcatcagcagcttacctcacggatacgacacacatattgggatgagaggcgtaaaacttacccaaggacaaaaacagagaatagcaatagctcgggtagtgctgaagaatgctccaatactgttgattgacgaagcgagttcatctatcgaatccgagtcgagccgtgttgtgcaggaagctcttgatacattgataatggggaacaaaacaacaattctgatagcgcatagagtagcgatgatgagacatgtggataacattgtggttctcaatggaggcaaaatagtagaggaaggtacgcatgattgtttagcgggtaaaaacggattgtatgtccgtttaatgcaaccacattttggcaagaatctacggcgacatcaactgatatagagttttgaggctccatcaatgataatgattttggcatctctgatcaatgattctccggaggattacaagatgttcaaaaaaaaccctatacaaccacgggtagttctctagcagatagggcctgtagatgtagatttccatagtcttcgagctgcttattctttttttggagacgaagcatcagaagtaggtcatggtcattgcttcgttctccaaagtatatcgattttgtctattgaatctgaatattttaggaggttggtaaatcattttggaggctgtttatttgcctttcctttatatgtgtctgtgctggtttgttcttgcaaaaacatggatgatgtatgtaaagcttaagaaaatagttgagaatgtgtaaatgtattcatttatcattgcacaagcacaagcacaagatacagggttcaactttcagagagatgaaaagataggcacaccgggcaatgtagcaccggaatcaacaatgtatgtattcccggatatatattgagaagagtcatgaatgagatagcgaaccagagaagtaagccccggatccacagtctgttgcatctttaatggtacaatcttttccgtaaccttctcgagccactctttctggaaaagaccttgtgtgatctctgacctgaaaatcccgggtgcgatcgagttcactctgatattatgacacctaactcaatagccatcatccttgtcatggtgtcaacaccgcctttggaacaagcataagcaagtccaccgggcaacataccccggaccccagcaaccgatgagatgtttatcaccgagccaccacgtttagcgtcacgcattaaaacacaaacatatttggctactaaccaaggtccctttaagttggtattgaagacgttgtcccattcgtcctcggacaaatccaaactcaacttgacattgcctctgattccagcattgttgatcaatgcatcgatctttccaaagatgtcccaagcttccctgaccgctttttgaatggtggctgcgtctgatgaaacgtctaactcaagagctgcggcttggattccagttgaactgaagctgttgatttcagagcagagagagttgagtcgatcaacacgacgagctgctgcaataacctggcaaccagctttggcaagatcaagacagatctctcttccaataccagaggaagctcctgtcacaagaaccactttgtctttaagttcacaccatggctccaactgcttcaacacctgcttttctcccccaaaaaaaaaacaaaatacaaaaatcaagtaatttcagattacaaagacaaaaacacatgattgacaatttttccatatggaatcatatggtaaagaagataacagaaatcatatttaaaggttaaaagcatggtaatttgcagagtggtcttatataaatggttatatgaatagttttgaagataaaaagaaagatgggaaatgagagaaaatgttatctcacagtttgatgattgctcatattgttttctctgtgtggtgtgttcgatggccaatggggaaggagaagccaataacatataacatatataaatacaaatgtcaaaaagatataatctgatccatctgccaaagaccgcggttctagagataccaagtagaacacgtcccataacaaaggacggtttatgcccaaatctgtagggtctaggtcctaattaacactttagtctactacatgtaaagcttacttcattaccagatcgacaatttaacgtgccaatgtctcgaaactgattcgtgggaaacaatttaggtttgatgattttatttattgttatctttattaatatatagatactccatctgttcttttttatttgattttctaagaaaaatatttgtgtc

SEQ ID NO: 35742 - DNA, 2540 bp, Arabidopsis thaliana landsberg
aatgtcagtgggcgtatactggttggtctcaggtggtggaacgagatcaatgacttgggagaaagtgtctggaaattcgagtctcttgatcaggaggttagcttttcttcacttattcacaaggatatgggttcagcctgtcgagaaatgtggggttgtgtttccctttccgttttttttttgtatactcatgtgttttcatcatttttctatacagtctttggctcggatgaacaagaaagactcatggcttttctggtggacactttaccttgcagtaagtatttcatatctaacacttcagttgcagcataagctaattacttaaaacccattcacaatcattgtggaactttagtggatgactaggaataagaataggcaaggataaacatgtcccttatagtggaataagaataggcaagaataaacatgtcccttatattgaagcatattgtgcaaaggtggtagataagaattgagagcagtcttttagaatcccatgtagacccatatatagatcgctagacacctgaatatcttcccccaagaagctaccagttaaagaagtttgcgacaaatggtttttccctctgcatgagtgggatatagcatttgacattggagtcaaatcacatgcgaagtcacattacaatatatgttgagtagggaaagattatctgctggaaccaagtcggccatttggagtatatcctatgatcttacactgactaagtataatattagttaaaacttggtagcttacaaacttatatgctcagttaccttacaagcgactataaagagtgagatgtagccatgagatggtagctatggatttgatgtctatggtactggagcgtagtaaacattaaaaacatgtggatttgtttgctgtctttttctgttgtcttcacagctaaatcttctccttttttcactcttcaggcagctgcatggtttatccttggggtattttctctgattagatttcaagctgactatctgcttgttgttggcgtttgcttgtccctcaatgtggctaatatcatcggcttcacaaagtgcaagaaagataagatcctcattagtctttcacaactgacctgattttgtgtaaaatcaaaccagctgtagatcaataggttgttagctttttgtacaaagaacatacgcatgtacatatatagaggtgactctaatcggcattcgccaattcttgttggcagatgcaaagaaacaatttcagcagtttgcttcgcagacaatcgcatcacggttccaatcaacagtacaatctgccttcacccttgtctgaagagaagaaagacgctttttttaagggctgtgagagcaaagacggtgtacaaagaagattgccaaaacgacatggttggttttttgactgattggtttcaaatgttttgtaagatttaagaggtcctatattcgtctttctatgtattttacattttcgacttacctattaacattttgcatctcgtatggtcttattatacgtatattagccctaaagaaaaatcagaaattttaaagtctctgatcctttccaattctgcatatgcatcttctgttcatgttgcaggcgatgcatctttttgttttggtgagctacttattaacactaagcttcgtggtgatttactaatgcagagcagagatcatgtagatgatgttggtttatgagacatgagaagagagaaatgatttgaaattactactgagtcaaggacattattatgaaaataatttacgttcttttaagcccaaataaatttggtggcccaagttaaaaaaaggtgaacttgggctacaacctctttttagcccatgatcactttttcaccaatctcagtatcttaccacaaatctattgagaatattttgggtttctgtttctgacgttaaaagctaaaaatctagagacttttgatatcccaaaagcaaagctttttgaaattgagaaatcaaaccccaaaaccctaaaaagctgattcctttctttgattctcactaccaattcttcccgccagtttcctttccccgattcatccttgacacttgcaacgccatgttgcggcctcgccgatctcttggggtttcatctccggcgaagcagaggaagaaagctgctcctaagaattccatggctacgagagcgaatcgaaagcgtctcccttcttacctcaaacctggctccgccgtagaaatcagctccgacgagattggattccgcggctcgtggtacatgggaaaagtaatcaccatcccatcttcctcagataaggattccgttaaatgccaagtcgagtatacgacgctcttcttcgataagaggggacgaagccactgaggaagttgtcgacatgagtcagcttcgtcctgcggcccgtgcaatgtctgagatagagaagaagaagaagatcgtggttggggaagaggtctacgcgttttacaattactggtgttgtgaaggttatttaatttttttcctaatttatttctttttttttctttta

SEQ ID NO: 35743 - DNA, 2564 bp, Arabidopsis thaliana landsberg
gctgtatcttcagtgggtagtctgtcacactgtcatgcctttaattccagtagatgagatcaacgtgtaacaggcagctggaattttcctttggagatagggttatcaacaaaagtgtgataatatgaacacttgcacaactgcctttttatttttgccataccagcagtatcacttgacttctcaactgctgatacctgatcatagtgatcttgacaagttttttttttctttttttttttacttgacatgggtcacacaatgcattgatctcctcagctctgtgacctcctattagacgacaatgttttacgtctaattggaatcggcatgacagacaactattttgcacacatttttatttacagagtactgagcttctattcatctttggatttcgatggcttgttcttgatcttttcgcccttgttttagatcagcacaactcacaaacaagttacatgttaaacattgcaatgaacatttgcatattacaaaatctgttagagtccaaaggtttggtaaataaatcagcgagttgatgtttagtacccacatggtcaatagctataaatttcgcctcaacaagttcatgaatataatgatgttgatgaccaatgtgcttagtatgagactgtcgaataggttatttgaaactacctacaacactttgattattgcacaaaattagtggagagtcaaagatcataccactgtcttgtttcatctacatgagttgtgtgcagcagctttcaagagcaatgagttctgcttcaggtgtggataaagccaagtcgttatgtttcttgttatgccatgaaaccatgttgtttccaatgaagaaacaccctccattagtactccgtccgtcctccagtgatccagcccaatccgcagtacaataacccatgagactcccggtagtgtctttaatgtagtataagcccaagtttgatgtagcattcacgtacttgaggatctttcttattgccgtcatatgggagatttttggtttgacctgatattgagcacaaacacttgctgcttgacagatgtatggtctgatggcagtcagatactgaagactttcaatcatacttcggtacatgcatttaccataccctctccttcctcatcagttgagactttgtcagaaacacccattggttttctagcttcttcattggccatcaatccaaacttctcaatctaagttttggcatatgtactctgagatatgaggatgccttcatacatctcgttaatctacaagcccagaaagtagttcagtacgccgtacatactcacttcaaactccttggtaatgctttcgataaatctttcaacatgttcttgactggtagaaccgaaaattatattgtccccatagagttgaactattagcatcccactgtcatttgtaagaacaaacactatcttgtctcgactgctccgtacatacccttgatcctcaagaaaagtcggcaaccgttcataatagatttccggagtttgcttcaaacagtgtatagctcttgtcaatctataaacatgttaaggatgacttgagttttcaaaaccttttggttgatcaacatagagttccttctgagactcatcacttagaacacctctcttaaccaccatctgatgtatcctggaatttgatgcacacgcgataccaagcagtgtcctgatggagccaaatctaacaaaacgaactgagacttcctccatcagagtatatccttgagcaatcaacctagtcttgtgtctgatagccacaccatcttcagtattctggttacggaagatcgtaccagaatccataacattctacactccgcttagcttgaactgttcaaactcccattgcataacatatgtccaatgaataacagccgatggatcaatagaatcatgcggtttgatgactcttcttccccctgaatctctcccatatcactgttcttggagagattccaacattgttggtgtcggatcctgcaccggagtttgggaccaaccgaagattgccacgtagatggagagtaagcccataaagagtaaggcccatgagattactggtcgaaatgaagattatgggcgaagtgatcacgccgcgaggtgaagacgacgtcgtagtcgaggacagtattcacgagaagggaatgagctgaataatgatgtagatctttttgtttaaacagacaaagatccttctcttgaaacaaaggacgatcaacaggttgaaacagaggagattcatctttcagattctgatgaagaggttgttataaatggacctgaagtgatattgggacctgggaagagacaaacacaacttcctgcaaagtttaaagattatgtgatgaacacaataattcaagtcaaatctgatgaaaagagtttgtatcctttgtcacaatttcttgaacaacaatttttccagcaccatgtcttgtgttccttgcagtcgtgagtgtgaatacggaaccagagacgtttcgagaagcagtggttgataaaaggtggagaattgctatgtaaacgaagttgatgcg

SEQ ID NO: 35744 - DNA, 489 bp, Arabidopsis thaliana landsberg
ggcgggcatgtgaacacggtggtttatcaaaaagatgagggcgaccagtttatgcaccggtatttgtactatgcggacaaccgtttgaagctggccgagagcagcagggacgggattatttgggacaaggacggcaagtatttttattacctgcacgggccattggccaggaaagagatcgggcagtacaaagtacagggcatggattatgcctataccctgcacggatggctcaagggcgtaaatgccaatgtgctggaccagcaaaaggagatgggtaaggacgcctataacagtaccgatgcaatgaacgggtattattacagtgataacctggacctgcaccgggatgaggccaccgatgcctttggctacagcctgagctattacaacggcaccaatgacgactacaatgccatcagtagcggcaccggtatgggcaacagctttttaacggatgcggagacttatgtaggtggcaacaacctt

SEQ ID NO: 35745 - DNA, 3219 bp, Arabidopsis thaliana landsberg
ttcgcaaccggtttgttccttacgtgtaccggtaatcacttggatttcctccctatcagcgaaaagttctgggaaatgacacccacccttgaagctggccacgcggttgcagagatggtgatgtatcacatcaaccagcttcacactgaaaatgctcgccgctgggaaaggtcttggaggtttgtccacccgccgagttgcgtagggcaatgcacgttccatcatggctgcagggtttgttttttctactggtacgccagggagatggctatattctactagaagcaaagctgctaaggtctaagctactctactcggctctactctcgagtcttttggtatgacggatgcacacatattttgcaacacatgtgtatgcttcgtttaaaaaattatgttttttgaatcgttccagtttatttatcttctcttatgaatttccctttatataaactgcatgtccttttttatgtttctggcttttgaatgaattaccactttaagtattactagatgtcttcgtgtacgtacactatatagtacattaaactttgtttatcgtacattgggaaattgcgtacacaacataagtataaatctaacaatttttgatgttgaaggcaccaaaactaatatacgtacacgatagcgtacaccagaaactatacgtacattgcgagaggatttgaacaataaaacaaggcacgtacataaaacaacaaattagattaaaatttaaacggaaacaagaaacaacaacgactgaaatgtagtttggtttttatggaaaccacatcaaggactgggaaagaaaacttaattaaaatgtagtcttatattatattaatacggagaataatggttcattctctctagctaaaaaaccaccatcgagatatccgcaacttctggtctgtccggattggcaaccacctttgaaatagcaccatggctctcaagcttcgggttagacagttcggttagacgccaaaagctgagtgcgacaacaaaatttcccttacccaaactctgaaagtaaccatcaaagtactccgcctgttgattgcgggcttcgcactccaagacttcactgctacgttagaaataaggacagttagcgtttagagtgacattgtaaataaaacaaatgaaaagaacacttactatctatcttttatcttgaaactcagtttgagaccgtaatagtctgtagtcaatccgcctacatcatccaacgctccaacgacatctagatgatggagaaacaaagataataattaaaaagtttcaaaaatgtaataaataaagcatcgggagaaatcctgctcaccgactaaaacgttcttgtaagcagatttctccaaaatgtagtcgaagggagtgaaatcgaaatttggaactggtggtgtcttcggtggggcctcaacgacgacggtctaatccataaacaatattccgtattcatgctttgttgctctgactgagtcagttcccttacggaccaggaaagaggtgatcgtcttccactcattttcagcgaatcggtctaagtaaaacggagcaaggcgacaatcaatggtggcctcaatacgggaattggatccctacagaacatgatagaatccatatttttatatacaagttaagcgaatgaacgagaaagaacacataatgatttgacggaaattaccgcgtaatctgccaagataaggccgagttcgaagacgttgggcgatataaccttcttgaagactctcacgacaaagacataaattcgccacccagtgatcagaggacacaattctgagaccatatgaaacccctccatctcacggatagcaagaacaagcgaatcgaaagactaatttttttttttgtgaatgatataactgctcgattgcagctgctagagcgtgttcacatgggattcttagcttggtgtacctaagacacgtacacgtacactggtccagaatgacatgaaaatgctcaccggatttacttgtcacttgatagctccacggtccagacatctttacagcgtatttacctaacgcaggcaactcttgtagaaatctctcatcaacctcaggtgtcacagaagatttgcacctagcaactttcttcctcttcgatgcgaaccatcgcattaggacatcccgaatgaactcgatcatgtaaacaatcggataagtttttgcttttgttaacacatgattcatggactcagagttgttgctagacatgatattggagcgttctcctctacagtgagctcttgtccaatgctcaaatcctatgtcctctaggtattttgcgcatttagcactcttttcccttaacagttcaaaatatttctcgaaatccctgaccctataagctttggcagcgctgaaaaataaagcagacacaccaaacttaccataataggtggagatgtttcgctcaaggtgaacagcacatgctccatgatgcgctctcggtaaaccacacttaggcctttgtatatagataaatatctgtccgagacaatcattaaattgtcactgtctggaacaatctcagctaacttttcaaaaaaacatgcccaagaagcatcagtctcaccatcaacaacaccaaaagctattgggaatatttggaagttcccatcttgggcacatgcaataaggagacatcctttgtaaggtcctactagctgcgttccatctaccacaactaccttcctcatatatatcagaccttcgatagaagcgccaagagagacaaagacatacttgaagcgctgcttaccatcatcttctggtgtatagtgtaggtgggttattgtacccggattagctaattggagaagatacaaataggtcggcaaaaacctgtaatttgcgatctcatccccctttacattttccactgcaacctcttttgctctccaagcggtagaatatgaaatccgcacattcagatcatttaggagcaattgtgataaatcgacagctcgcggcccaccctgcgtagaattgtatctgctcctcacaacttctccgaggagcttataattagcatgtttattgtagttcttccgagagtcgatgttacacgtatgtgtggtagcatacgaagtgattttgaaactttctgaatccttcacgacgtgagcagtcaaatgccatggacaagtctcatcaacgcacaccatcttgaatattttaggacatg

SEQ ID NO: 35746 - DNA, 1845 bp, Arabidopsis thaliana landsberg
catgaagcttaaaacgtgatggggtttgggaaatttcaaggcaaatttaacttattgttttgctacacgtaaaaagatgaaacattttgtcggtaaccaccggcttggcctaaaataattttctaaaccctagatcatatatattgtttaattatttcattccctcgaacaaatgatgctgtaatgctgatgccttttctttttaatataaactaattggataatcacatgatgagaaattatccgtatattttttagcaagggtccatatacttgctgcatttccatatctgcattatttcatcagtcaaatacatgagccacacaaatatacctttgagacaatattaaataaaaactcgagatcgtgcacgatatctatacttttttatgtgtcgacctttatcgaacaatgaaaaaccatgtgttatacttttttatgtggtggtttagaattataaaaatcgcaatggtttcaagttttctatactattttcggatagatattgtcatcttattcatatatggatatccccttacttttttcggcatcatcagttctttgaaacttagttcagagacgtacggttccaatataaaaaatcaagaattatgtactagtgtagatatataattataaaagtcgatatctaacacatatagcatataaaaagaaaaaaagatttcaaactgtaaatatctttttaaccagaggacgatgtaaagtcgtgacccatgcatggttccaattccaatcatcgggaaaatacaaattacaagtataaaagtctttttttttttgggttgtcaatttaggtataaaagtcttacattgcaaaatacgaataaggcaagaacacaatcgacccctatgtatactaattaataatatctctcaacccatcaaataaatcagggaggaaaatgtgtactttatacatgttactacttactacactgcccaaacacaacattacgtattattattataattattattattattattatttaagagagaccatcgtaatatatccatagtcgtcataaccgaagatttgccttagaatgtaatatatcattcaaagaaattaagctttacttaataatttaaccccaaaaaagcattacttttaatatggctataccttttaatgcaaccctgtagcgagttagtggctagattctccagcacgtggacatgactcaaatcctaaaccatatggttaagttcttttgattcatccatcatctacaatttgattaatcagagatgatgctcaaagaggttgaaaatgcaaatccagtttcagttcaattcggttttgaagttgaaaccattgtctttagatgcaaatctatactcatcacatataaacagattgtgagaaaaatgaagctttgttgaaaacgaaggagctatcttcagtcctgacacagatagggaaggatcaaggatttaatcggggtcattaacaaaaacaatgctgttcaagattgatacctgcaataattttagagtatggaaggatgagagggtagatatgtatacactcttctttttctatccatgactggagtggatgaattaatcttctattatctatactataattgagtgcttagatctgagtactataattcgatgttgtaaatcatgtgaacggtgccagcaccatcacttcatgtaataaggtacggtatagctgcatagagaggtacatgtaggcgtagactccgtgtgaaacacatgctcttgtggttccgctatagccgaacacgagggaaaaatcctttatactgacactgagaagatcgttttttcgggcaatggtgatactctaa

SEQ ID NO: 35747 - DNA, 1297 bp, Arabidopsis thaliana landsberg
atcttacacggactgcagtcctcaactcggttggggatgatacttgaacacttttagatggaacttcgcagttttaggtccctggtcttccgctcacattccaaataggagacttaggttcccttacataagacgatgacctctgacattctattcttaaggtgcatttattcatatagatagatagagagagagagtgtgtgtgtgatcaagcgtagagctcaatgccccaaaacttggctgtttggtgcgtgcggtaattcctctccatgcttttgatcacttccatgtcctctttcgatagttggaagtcgaaaacctgaaaattctcttccaatctttcaggcttcgatgtctttggtatcaccaccgtgttcctctgaattccccacctcaggacaatctgtgccactgtctgtttgtacttctcggccacatcctatgaattcagacagacaaaaggtttaattatttaactgtttcagtccaaacttttaaggtttagaggatggggcttactttgagaactgggtcatccagacatgacacggtgccaaaccattcggcattggctgtggcacctcccagaggagtatgagcagtgacacagataccatgtttctggcagaatttgactagagaatcgcgttggaagtaaggatgtgtctcgatctgattcacagcaggtttgatcttggagtaagccaagcaatctctcgttagaaagacatcatagttactgcaaaaaacctaatggtcaaataattcatatattggcgactaaacaagagaacttgtaatgatagtgagagaagttgaacctgattccaatgctgcggactaaacccatagaaacaagcttttccatgtcgtgccatgtagtttccagagagattgttgtatctatgtccaataccccatcatcccccaaagcactatcggttgttcctattcctgcacaaggcttacatgttacagcttattactctgtgtgccaattgctagagacttgagaaaacttaattttccagccagtaacaaggctgaaatgcaatggtctctactcgaaactgataatattcatgaacaaggctgaagcctaacccgtgtgttttgtagctatgggtatatgaacgaggaaaaggtcgaggtaatcaagttgaagtttcttgagactgtctttgcatgcctcaataacatggccatggtctgaactccatagctgcaaaaccaagacagagagcattcgatctgaaatgaactgatatcaaaggtatgtagtagtttaacttaaagc

SEQ ID NO: 35748 - DNA, 1646 bp, Arabidopsis thaliana landsberg
gaatcgctcaatttttaattgatagtgacatctgaatagaacgaaaaagattgaacactaactaagcaatctaccaaaatattaaaccaaaccacataatatcaaatatcttaaattataaaatagcccctatatttcctctttatctcataaaacacccgtttcttcttctaatcttaacttcttcttcatcaatcacacatcatctaaaagaaaaacaacctacgataaaattcagaaactttttctctgagacaccaaaaaaggaaggtgaccctccttctctaatcgattgcttaatcatttcggccgttggattgaatcgaaaaagggcgaattatttaaaaagcttcagaatttgaaatcgaaatctgcgagtactgttgtgtttgtggaagagagagttttggggtttaataatggcgaaagctggagggatcacgaacgcagtaaacgtaggaatcgctgttcaagcagattgggagaatcgagaatttatctcacatatctctcttaatgctcgccgcctcttcaaattccttgttcaatgcggtaaacctcactctctcacttatttctctgcgttgggttttgaatccaattgaccaattttggagttttctcgatttcgtatttgctaaatttagaaactttgttttagagtttttgtcaaagtaaggtttttgatgattgggagatttgattttggtggttggttagtgaaaaatttcacctttttaattgttgagatgatcagatttcatttgcatttgtatggtcttagatccatgtgctaagagagatctttgtaatgatctctttgatcttctcagcttcaattctagctggttttagacaatgttgtgtgtgatgaaactctcttttatgagctcatctgattatcgaagtcattgatgtctgtgagtttgcaatttctctgcgcgtttcataatctaccacaaatagcaagttggcttctttgaatgagaagttggatctgttggaacgtcgcttggaaatgctggaggtgcaagtaagtaccgcgacagcaaatccttctctgtttgcgacgtgaaacaccgtagacgatatcgaaatcgaaaccgagcctgagcctttggctttaacagaagaagtctgttgttgaatgtgtaccattgaatgattctttctttcttcacatagctgtggtagtaagtaaactagtagcttaaaatatgaatctattcataaatatgtgtatcttttttctgtccattaagatctcttttgaatgacaagtcatttcgttgaactcttgaagtttttgctttcttctgctgttgatttataaactttgcagaggtacccttttcatcttctatgcatcggatttgtatattcgtcttttctcttaaagtggaacacatgtaaaacgctcttgttgcccattttttctttttcatcaatggaggaagaaaaaaccgaaaaagctcacatctcttttcctccattagattctgtctgcatttgtgactcacattgtttttttgagttccactcggattcatcgagaccgacctaatcgtctccacccgtacgtactatgagatcaccccacggatgcctacgatatccaggggtcgcggaccagccataggacatag

SEQ ID NO: 35749 - DNA, 1956 bp, Arabidopsis thaliana landsberg
ttctcgtttcggatttagtgatgagctagtaaatgattatttattaacaaaacttataatatggttaatgttttccatctaccatttacgaaaaaaggtaacaaatttttgtcactaatctttcgataaacacaagtatgcaattttatttttattttttgtattctctacatatgctaagaatcttaattaaaacaataagaccttacactagttttgattatatttagaatacttatccacatcccttactttcagtacaaatgtcatcttcattcttccctagacattatttaagaaatatttacgaaattttacgtaatcaaattaataattgtcattgagacatttaaaagtttatcactaaactaattccctaattagggataaattttcatttcttatgacatacaaacagaaacgtgaaacacgtaggccctctttattaacctcctcacattaataatttgtcgtaaacatcctcacattaacacttcgtgaatgtttagttctaaagagaagaaaaactttaaatatgtttagcatatatttagttaactttgttctaagaaattttaagtaattatttttgttttacttataagctatttaatctacattaaattaaattttgaattacttgattttttttaccacatacttaattaattttatttttataaagagtatataaataacatatgatttgatactattggtttatatttttttttatagaattttcaattgtagatctctagaaatacaaataaaatagaaataattggtaacagcttgtcctgtggaaaggttgttaaagggtgaggtcttgggttcgaggaacgccaaacgcaccaataacttacatgtgggctttggtggcccaaggagagaggttagggtcgatgcgctgcagagccaacaggattccacgtggtagagtgtggccacgtgtgcgggtcgttacaaagattgtataattgtagtttgattgttaattgtaggattcatccgtaatataccatattttattaatatcgactcaaatccgtcaattctaaaactgcaacaaaagtataaagtttaaatgtttatacaaaagaatcgagatacgttttaaaaaacaaattaagttatatttattttgttaattttgtttgttttgtttagtatttaaaattatataaatatattttgattattaattttagaatttcacgtgttttgtattattatcgacaatgaatacacaaataataaaatacaatggatacataaatcgtaaggtgataagatttgtttgactgggattgtcaaataaaatgttgtgcatgcactaaataattttttttgtagtatgtacaaaacaattaagttcacaaaaactaattaatttatagtgtaaagaccataaaaagtcagcttcatcattgtggaaataagagattcttgtgtgggatgttgaaacatcaagaacactcacggtagatgcatagtgtaggaggtctccagctactaaaagtggaccagttctcttttcacaacactgtaagttcaaaccggtttaaatagccggtccggtttaattttgaaaaccactaaaccgtgactattggaaacaacgtaaagacgcaattttttctgaaagcgactttttgtttttgcctctctatctctcaacgagacaatggttggttcctaaatctctcacctcaacaaatcttctgatcagggtttctcagaatctttctactttgttgactcggttgcttatctgactcagtgatttgagttcatcggtgaacgagttaagagtatcctcgcacactctaggcatcttttctccacttgcgtcaatggtattctctcaatcgttgtttcaatgcttctctgttcacaatttgtgatttaccttaagttagattctcgaattcgattagggttacacgaaaagtc

SEQ ID NO: 35750 - DNA, 1834 bp, Arabidopsis thaliana landsberg
gaaactctgaggtacatattgaatctaccattcctcaagaacctccttaaccttcttatgcctcggatagaagacaaaacagattcccgaggcgacaaacacagcgaacacagcaagcgttaagcagaccgctaaaatcttctttgttctgtcagacgatttcttcggatatggaggaagggttgggactacgatgaactcccatgttggattctcaacttttggagtagcgtacgaactcaacatataatgaaatgctccaatggatccagtcgatgccgtgtagccataatacatctcctccaaaaaatacggggagagatctcgattcaaagacagcagtggtttccgtggcggaacagggatctcagccgggaataaagtaacattgagctgttgatcaggatgactataaacgatagaaagccgcattacctttccgctgatcaaagaaagatttctgaagcttccatctttatcatcatagtaaccagcagaagcagaggcaacagatctcaaaccgttaatattaatcccaacatgattatcatcaatatctccaaactcttcgtctttatgaatatctaactcgatagctataacgttattcgaggctttaccgttgtttgttttgttaaagattccgaggtattgatcggaggaagctccgggaaggcctcttgtgggagagatgacgaaagccataccgtgtgagccttgctggttatgttcagggacgatcgcaaagaagaagttgactgagaaagatgagatgacacctgtcgatgagttcttgatttcaacgtgctcgttttcgaaagcttgaccgaatgtgtgttttgtggtgttggttaaagtgaagtaaccgttgaagccgattcctacagatccttgtgagacgaagtagccatgagaattgtaaaacagagtaaggaacagaacaagaattggttggcagagaataataagttcacgagacattggtgggtgttttttaggtttgtgtgaaagattttgatcatctgtgaatattatcatccatctcttgagtgttgagaagaaacactgaaaagtcaaaggtttgacttttaggccattggtcaagatttacaacaaggctttgtggattaacagtgtgaaagcaccaaactaaagaagaaaacaaatcaattttcacataatttcgtggaacataacttatcaaactaagttgatctgacttttgacatgttgcaggaaatcatgtgaacatttcttgatgatttgaatttagctaagtaatcactgataccgcatacccaagccatccaattcgaatctagttaaaagaaaaaatatagcctacaaaacgtattatagttgaagtttggcccataagaaaaggttaaagtttgttacttgggccaaaagacagataagggatttacaagcagaaaaacagaacatcatactgtacaatccaaatcctctgtttttgttgtttactttttattattatgttacatctgtaaaattcgtaatcaagaacacaaacaacactcaaaatcatcagcactcataaaattgatgtaagataaacaaatcaatgaagaatcaactgggaaaaaaaggtcagattttttcacagaaaaaaagaagaaaaacaaatcacgcaaatctgttaaaagccctcctcccaattgttgcaggcatcgaaacagtagaatcaatactcaaatttccaacggatttgagggttttgtgcttctcaagcaccacagcaccagaagaagaagaacctggacccttgttgttactgttgttgctcatgaacaatgaccctttgttccatttg

SEQ ID NO: 35751 - DNA, 4865 bp, Arabidopsis thaliana landsberg
agccatcagctcttcccatactagctagtatccttgccctacaaaacgagcacggaaagtaccactcttcttgttgcttgctatagcaagttctgaaatcccttctccactgtcgattccaacagttacatcagaatcaatatctgcatctgcattgtcaaccaaacgagctccacgaatgtatctacacatgaagtactaaattcagattggacagaggttccacacatatatggtttctagaagaagcattacctcccggcgatacagacatatttcagctcaggagtgtaaacagcttttgcacaattctcttcgacataatagagaagacctcttgtttgatcaataacccccggaagtcctctcggtggtggtctaaacgggatacaaaaccatacatggtcaaaacatcgaagcaatatctcttgaaaggtctaaaaaatgtaatcgacatgtatgttacctacaagtgaggcgtaccaagtgtcaacaacaaggagatatcagagtttccgtattcttccatgtaaactcgagcaagccatcctccagctgagtgtccaatcaaacacaatccttgacctataaatgacgcaaaactaccgagttttatggttaccgcgattcacaactgaaactagcagctaagtctgatccaagaacaaaaagcttcaaatcaaatgtgagatttaccttgagctagctcattggcttcacggactgcatcatcaattctattcaagtacctgatcaaccatataaaagactcatcatttgaaaccagtcaaaaaattcaaaacacaaaacaagtgatacattcattgagcaatcagtaccaatcaagaacaggacgagggcggagcgtgccacgccagtaggctggatcaaccaaaccggctgcatttctaaaccaatcaagccttgatacagctgcaaccacagcaggaacaccgtattcacccaatgttacctccagcttcttgtagtctcctgtattattccctaaaccctaataaaccaattccacaaagcagccatagtgacactaaacccaccattgaatcatataacacaaaaaccaagttttggactttaaatatgtttctaaaggaaaatgcaggacaacacttaaaaatataagaaacagaaaattcagtgaaaataataaaaaaaaaaattggaaccacacattttccgccatagttgtctcaatcaaaggacggagattatttaccgggagaattacggcgggtcggtacttgacatttccggcggtatgtagagcaggagggtgacgtggctgcggtgaagtttggcctcagcctgagcgatgtaaccatcgccgaggccatctttttggttagtggctatgatgagctcaagcggagaaagctggagtttttaaaatccactagttcttaagcattttaatgtatttacacaaacaccccatttatttcgattcttatcacattaagtacaaaactcttgaacgttttctagattgagatcacagctttcttcttccttcattgggtttaagaagccggagaagaacactaaaagaaaacatttttatggtctggaattgaatccaatcctcctctgtttctctaacaaaaatggcttctctatgtcaagcttgctcttcgtcttcagctacaccattgctcctggcgaaaagggtgttctccttagcatcatctccgtttatcttcatgagggaacacaaaatccctcgccattgtaacagctttagagcatttaatgccgtttctgcgtcttcgtcagcgtctacctcagtttgtgtcgattttaaggatctgagaagcaatgaattggtggaattggagtatgcagaacttaacctcaatcataagatatctgaagtatcctcctttcttctctctccctctgtttttgcttaccctaaatttgtttccttttccagtctttgctttctgggtattgtttttgtttcgattagtgttcttttctctttttgttccaagtagatagcttttcatcttcatagactctggtctatcagtatctctaattagtggttgagtataatttgtgtttctctctgttttatttgcaggaagtgggtcatgtaagaatcagacagcatgttaatcctctcagttcctctttctctgtaagttgatgatgttgcaaagtttgtgacttttgaaatgatatgtgaaacactaaaactgatttatactgttcttctttctgatagaaaccagctccagttcctgtttgggatgaagtttataaggatccatcacttcctcttatggtggatattggaagtggtaacttgtgagcttgcttagacttgtgggacttatgctttgtctcaactcaaatctatttatatcttcttctgaaaattgatatatacttatgcagatcctgttttcttagttaagttacattatacactagttgttggagacttttggttgcgtaattggtataattccctggaatctgaatttgaattttgagtagtcaaatagctctcctttatatcgttccctggtcttgcgccctctttcatgcttgaatgtgtttcaacttttaaaggccgaaaagttttcccattgtgatgtaccgttctatgccgtctctgccttgtaatgagtttttgaacttggattcttctactaacctgtggctacgtcattatattttaggtagtggcagatttctcctatggcaagccaataagaatgttgaatcaagaaattacttggggctggaaatacgtcagaaagtaaggatctatctccttttgactgttttgatgttttccagctgatcattcatctacttaagctgatgtatctttcggtatctttggcctaatgaagtttaatttgtcacatttctttgcagctggtcaagcgcgccaacttttgggtgaatgagctcggactttcaaacgtgtaatctctgcatcccaaaaccttaggaaaggttttttgaatacacctatgttatatactctgttgataacttctttgatggatgggtttcagacacttcatatttgcaaacgccatggtttcttttgaacatcttatatcgagctatcctggaccattggagattgtctcaatcttggtaagtgataaaagaaagttgtaagcatccgagaaagctatatttaccggctctttcttcaggtggtgatgataatccaacttatttgttttgacgtgtaaaaatgcagtgtccggatcctcatttcaagaaacgtcatcaaaagagacgtgttgttcaaaagcctttggtgaattccattcttcaaaacctaaaacccggtggaaaagtaagtgttttgcttactgcctaccaacactactggttcttttacagtttaaacttaactatatacgttttctttgttactggttgtgcacagatatttgtgcaatccgatgtgctggatgtggctcaagacatgagagatcagttggacgaggaatcaaatgttcttcaacacatggacacagttgacacagaggatgggtggttaacggaaaacccgatgggtataagaacagaacgagagatccacgcagagttcgaaggtgcaagaatctacagaagactttaccagaaacgtcagctattaccagaaacatgacctattacctattctgatcaatgaacgttatccaattcagtttggtttggtttctactttctaataatgctaaaccgaaccgtaccgacctcttgttttatttttcgctcttttgattttagattatgtaaaagtcacgtgactttaaaatggtagtaaaatctgtaatggattaggtgtattaatttgactggaatcagatcctatcgtaataacatttttcaatatctagaacttattcgaatttttctttcctcatataaacaatagaagacatatgttttcatttttgaagatactgtaattaatactatatattatcttgaagaataaaagcaaacgcgtagcgtggaaactacggctcgattagcagcgtctcaggcgtttcctctgcttcgacgaaggcagaactatatatgttcagacgactctttgtcatctttcttagcgttatcccactctgagaatttcgaaatcaaatcagttctcgttgttaaagaccgtcgcagagtcgaattagcgggaatcagaaagaaagaatcaaaaacccttaagcttgtggtacacaaatctttaatcttttgttttgattcgtatttttttttctgggttttgtgtgttgaatagcattcaatcttgtgatatgagaatctttctgttgttttacattaaaatgcactttgttctgttagagcagggattttgaaaccctaaccctagaaatcatacctagaatgttttaatgattcttcttgttatttagagaaggactttgtatgtgtgaaaatggattttaatgttggtcaagtttcttaactatagtcacaagcatcttctgtgaacgatatgtctccatctgtagagaaaaagaaacagctgtttttgcccttctcttaacctaatgccaatgtgtttgatgcaacaaggtatctgttttccttcataacctaatgccaatgtgttttcttgtttacagtttaggaaccgtttattctgaaattgaagtgtgaagaaatgggaaatgatcaacataaccacagtgacagaggattcttccacaacttagcagggtttgcaggcggccaatacccgcctcacggtcatggttacggtcatcatggtcacggttatggatcttcttatccatacccgcctcctcctcctcctcatggctatccacacagttgcttatcctcca

SEQ ID NO: 35752 - DNA, 918 bp, Arabidopsis thaliana landsberg
ggcatggagccttcacagggcagagggcctctcctcccattgaggtccagcaatgcaaatgtgcaacatcctcagtcatcaggagaatgcaaatcaagacaactttgagattccacctcactccagtcagaatggctaagatcaaaaactcaggtggcagcatatgctgcataggatgtggaaaaagaagaacacttcccccattgctggtgggattgcaagcttgtcatcccactctggaaatcagtctggcggttcctcagaaaactggacatagtactacctaagggcccagctataccactcctgggcatatacccaaaagatgctccaacatgtaataaggacacatgctccactatgttcatagcagccttactttataatagccagaaactagaaagaacccaaatgtccctcaacagaggaaaggataccgaaaatgtggtacatttacacaatgaagtgctacccagttattaaaaacaatgaaattcacaggcaaaaggatggaattaggaaataccatcctgagcaaggtaacaaaagaacacacatggtatgttcttaatgataagtggatattagcccaaaagctcagaatacccaagatataattctcagaccacatgagctcaagaagaaggagcacccacagtcagctatttgatggaccacagggcccccaatggaggagctagagaaagtaaccaaggagctaaagggatctgcaaccgtataggtagaacaaaaatatgaactaaacagtaccccccagagctcatgtctctagctcgtgtctctagctgcatatgtatcagaagatggccatcactgcaaagagaggcccattggtcatacaaactttatatgccccagtacaggggaatgccagggccaaaaagggggagtgggtgg

SEQ ID NO: 35753 - DNA, 4815 bp, Arabidopsis thaliana landsberg
ttttctcctcgaatttggttgtttgttgtttttaaaatggtatgcttagaccaatgaatgaaataaattgatgaaacgattttcttatctgttggcttgttcacaatctgtcgtttttgtatcatcttacgacttacgtttctgacctcaattcttcatatccactccatgtagacagtttttttcttctctttttgcaattctcttacatctttccaactttaaccatgtgttttttaatccacattaaggttatgaggaaagtcacaccgggcatgaaagaatatcagatggaaagtatgtttttgcatcacagctacatgtacggtggctgtaggcattgctcgtacacatgcatttgtgcaacaggggataataggtaagtttggtggataaatcttgttattgctgaatatgcagaaatattcctttttcaggtgtttgtactgaaaaactaacaaaacgatgttaaattgtttgtagtgctgttcttcattatgggcatgctgcggctccaaatgatagggtaaagggaacacacattcctcgcttttttagttctctcattattccctgtttgaaaatgttttaatacttgttgcagacttttgaagatggtgatttggcattgcttgatatgggtgctgaataccatttttatgggtctgacataacatgctcattccccgtgagttcttctagcatcaaatctattcttaattttcctctgaattgtctttgcaccgcattgacttgcgtttttaatcttgtttacatgaacatcataatttgctgaatgtagttatctagagaaagtggactctaatattcatcaattggtgtgcaggtcaatggtaaatttacaagtgaccagagtctaatctacaatgtaagtgccttacaagattggtgcaacgtggatggattagaaatgtgggctctattttttgccttcccacaatccaaagtttggtgaggctcttgaagctttacatctgaataagtttctctgattttcccttcctttcaggctgttctggatgcacataattctgtaatctctgcgatgaagccaggagtaaactgggtggatatgcacaagtaagtcttactgagatgctatatagctctgttctactatgcatgcagatgcagtaattgggattgacaatgtaagcgtaaactcagttgctttggtccattttgatttatcctcttgttagggagataaattgaaatacatctccatatggttattcagctttctttgtcgactgaagcaaattaatgtacaggttagctgaaaaaatcatccttgagtcactgaagaaggggtccatactcactgggtaattctctctgtgctagacatttcaatactcttttctaaaggttaattcattctcatggtttcgttctctgttcctagtgatgtagatgacatgatggtacagcgcttgggtgctgttttcatgcctcatggactaggtcacttcatgggcatcgacactcacgatactggtggctacccaaaggtacatcaaatcttttttcaacccaatagtatcatcacgtaaataaaaccacagtccctgtgtcttacccgttgctttgatctttcattcttttagggagtggagagaccaaaggaacctggattgaagtcattacgaactgcaagagacctacttgaaggaatggtaagggccgattgtttcaagtagaaatgcttttggttcttctcatttatcgtctctgttcattgtcctaatcgtatttatgtcaggtaataacggtggaaccaggatgctatttcatcaaggcattgctgttcccagccatgggaaacgcaacaacctctaagttcttcaaccgtgaaacaatagagagattcagaaatttcggaggtgtcagaatcgaaagcgatttggtaatgtcaaattcatattcactacaacgtctacaagttaaaacactctcaagagtaatgtcatatacaataatctcattttgttgtatatgtgtgatttcttttttaggtcgttactgctaatggctgcaagaacatgacgaatgttccacgagagacatgggagatcgaagctgtgatggctggagggccttggccaccgaccaagtgatcgtagctactcttaggcagcttatggaaattaaaaacttgataagtaaaactcaataatacaacctttatttttgttaatgggaataaggaaaaattgcctgtgttttactaatcttgtacatgtagtttattttgtttcagtgtcttgtttgtgtggttggatattaaaccgattgaatgttcaagtggacagataaaatctaaccggtttggtgcttgtcgacgaaaaccgaaccggtacagaaaatatctttgagcacaattttagttctaatataaaattcattaacaagagagaaaaaaaaaacttcaaattaaaagcttcgtgtcttcataaaaccctaatctggcgacttcgtctctatccccaaaaaccctttcctctcttccttcttgtgtgagaccgagaaaaaaagatgactaagaacagtaaccacgacgagaatgagttcatcagctttgaaccaaatcagaacacgaagatacgctttgaagatgctgatgaagacgaagttgctgaagggtctggtgttgccggcgaggaaactccccaagatgagtccatgttcgacgccggagagagcgccgacaccgctgaagtaactgatgataccaccagtgccgattactacttcgattcttactctcactttggtaaattcccttttttcaagttctatttttttccttgtgctctttggttatgaattcttactaagagttgaatttggttccacttttttttgcaggaatccatgaagtaagtatcgaggacaaagctcagttttttttgttgtagtttttgttctagaagtttaatgtaattcattgtgttttcttctgtatatatctgatgactgaattgagaatggtatcttacaggagatgttgaaggatgttgtgagaacaaagacttatcagaatgttatttatcagaacaagtttcttatcaaggacaaaattgttcttgatgttggagctggaaccggaattttgtctctgttctgtgccaaggcaggagctgctcatgtctacgctgtatgtcttcaatctttcagtctctttttttaataatcataagtaagaagaatctttttcaattttgactgatttgattgaggatgtttcttaataggttgagtgttctcaaatggctgacatggcaaaggagattgttaaagctaatggattttctgatggtaggtcttttatccatgttgagttgtattcaaatcgataacttctgttctgtaacatgatttttgttttatcgatgcagttattacggtattgaaagggaagattgaggagatagagcttcccactcctaaagtggatgtgattatatctgaatggatgggttactttttgttgtttgaaaatatgttggacagtgtcttgtatgctcgtgataaatggcttgtaagttacagctccaccttgttacatgagattcttagttaccaaaaccaattaaatgaaatcttcttggtcctgtgtttttatggataggttgaaggtggagttgtgctaccagacaaagcctctctgcatcttacagccatagaggattcagagtacaaagaagacaaaatcgaatgtgagtgcattgatttgacacgttttctcgtctttttttttccaacattgatcttgatgtctgttgagatttgcatttttaatttcttttgtgttgttctgctacagtttggaacagtgtgtatggttttgacatgtcatgtattaagaaaaaagctatgatggaaccacttgttgacacagtcgaccaaaaccaaatcgtcaccgatagtaggcttctaaaggtatataagatatcatatgatgatgattagtagtatctctttacctgtgtgactaatgttcatttcattattcttatgggtttgtaacagacgatggatatctcaaagatgtcctctggtgatgcttccttcacagctccctttaagcttgttgcacaacgcaatgactacatccacgcccttgtagcctactttgatgtatcgtttaccatgtgccacaagctgctgggcttctcaacaggttcagatctctacaatcttatgctagctctgagtattctatttttttttggtgcaaagaaatggcatgttatcgaataacttggtttgaagtttaaacatagcacattgtttcattatgatctgaaacttgcactgaacaaccatatgtgtcacatgcaggaccgaaatcccgagctacacactggaaacaaacagttctgtatctagaagatgtgttaaccatatgtgagggtgagacaatcactggaactatgtccgtttctcctaacaagaagaatcctcgagacattgacataaagctaagctattctttgaatggccagcattgcaagatctcaaggacccaacactacaaaatgcgttaaagttctctcataagaagcagaacttcagaagatacaattctcatattgtgatttagtttttatatttctttttctccagattacaactttccatttgcttcacattgcaacatttgcttcatctcaagttaaattaatgattttgctctaaaccatctcgtgtatgttccttgttgatcacaaaactgatgtctgtcaacacttttcaatattttctccaaaagattataggaactagagg

SEQ ID NO: 35754 - DNA, 1189 bp, Arabidopsis thaliana landsberg
aaggacaggagttttagaccctgaagttgagtaaattgaccggagagcctctttgttccgatggttatcaccttcaccggaaagctcttccggcggtggctgcactgaaggcaagacagcttcacaaaagctagctaaagattccatctctgccaccgtgatgtccgggagaccaaattttccggcgactttgtacttatccatcacacagtttgctttgatatgattaaaaaacaaaactgggaaagttcttaagatttcgaagcacaaactctgttagtatatatatagacacaacgttacagctgtcgcgttacataaaaatagacatataaaacaaaattgctaagagaaccccaaaacttgtttttaactctttttgatgattacgtatttttatctgtcgttttagaaagtagatgtatgtatttttctaatatatacgacagtttgtcgtattactaattatgatgataattgacaatttaaatgtatatgaaaaagttggaccaaaattgaatttttttttgggttgtaaatggtgcatatctacccacgttgttgtttctttcaaattctacttatatgccgaattttattggtatcatctgatgtagattgaatatatttcttacgtacaaattaagatgatggttattttttagggtcctcatgtttagagtccctaagatagtggttaaaaacacttaaaattgcaaaatatagggactagtatgtagttagcagagactattatggggaaagtctttttcagttttctagattacaacatgtgaaaactacaggcaacgaaaatcgattagtaattaataattaagtaatgattgaagaaacataacaaaggcacaaaagaagaaaatagtcagaaaagttctcatagttatggaaaacaatcacgtgtgatactctttcctttttttttttttttttttgtttgacaactgcgatgctctaaacaccacaatttgaaacttgtgatagccaacttgtgagttaatgcacaagccccgtaacgttttacacaatctagcttttcttattcgatatacgtgtacttgatatcttctcacaaaaatttgtaaatattatatgaagaaattaatacacataaatatgtatatacaacatctgatcggttatcacgtatatatcaaaacatattatatct

SEQ ID NO: 35755 - DNA, 1371 bp, Arabidopsis thaliana landsberg
tttggaattgaaggtaccaatggagttggtggatggaaaggccagggtaactatcgggtcctctcatggctgggtagctactttgaaagacgatggaatagtgcgtctccaagacgatctaaacctggttgcatctgatacagatccgaaacgcattcccctgcctcctcttgtgactctgcctcattgccaaaccaaagttgtcaccaacgtcgccatgtcttcttcttctcctgaggatgaagactgtgttgtcgctctcaagttcttaggacctcagctcagcttatgtagaccagctcaaagaaactgagtggaccaacatcagaatcgaaaacccatgtttctactcatcccctgttatgttttccaagaaagacggcacgtttcgaattcttggatctggaggtcacctcattggatcatgggatctccacaaacacaagaacaaacccaagattcagaggttgcgattcaaaaaccttcccgagctcaccaagaccaaaagggagctcttgcattcgtgttgcacgagcgaacacttggtagagtcaagaaccacaaatgagactttcttggttaagtggtataggaaggacacatccaatggcgtggtgaaaatgaaaacaagagctgtaatggtcttcaagctatacgaagaagggaaagctgtttacactcaagacatcggagatctctgcattttcctgtcaaagtctgaacccttttgtgtcactgctagctcctttcccggcatgtgccctaacgaagtccacaccttggatgttgacgaacacgcacttgtcgatctgtctgattcctccatcattagtgggatttgtacattcgggtccccttactattttccacctccaaaaattgactcttagtcttaggctggaattgagttcttgtcctagaagagtcttgttgtcttttcttagacctttcaaatatcaaaatctatattatatattttctgtgagattgagatgcatatgctcttggatatagcaaatttgtaatatctgcgatgactcgtcttcatgaccaaatgaatatgatgaactagaactctgctctttggaaaatggttcttttcctacctttgtcaaagatgcacatgaataagtacatcttgtcctttgtgtcgtgataagtagacttgatttgaatctcccaaacacaaccaatgacctttgtttgaaattggaaccaaattgattcactcattcttgtattaataactgattttgtaaaaaagtacaatgagattccatctacgtatagggttagaaatactaactctaacaaagaacatcccactcaaactctaatgacacattttcttttcccatattaaggcttcat

SEQ ID NO: 35756 - DNA, 521 bp, Arabidopsis thaliana landsberg
tgacacatacttgtatgattagaaataatggttccctcagtttggttttcaaactcgagttttagcttaacttgtgtcgatgaaaataaactgtacacgtatgtattaaaatatttatttaaagcaccaactaaaatgttatgctatttgataatatccaaataattaaatcaatatcacgattcacttcctatatatatagggcttgcggaccgaacaacatatcgtgagaactaagaaacacccaagaaaacaaacaaactttttaaaaaatgtccgtttcaacacatcaccaccacgtggtcctcttcccttacatgtcaaaaggccacatcatccctctcctccaattcggtcgtctcctcctccgtcaccaccgcaaagaaccaaccatcaccgtcaccgttttcaccactcccaagaaccaacctttcatctcagacttcctctcggacacgccggagatcaaagtcatctctctcccttttccggaaaacatcaccggaatccctccggcgtcg

SEQ ID NO: 35757 - DNA, 3355 bp, Arabidopsis thaliana landsberg
atcattttgtactctccaacaatccacccaattaactcttggattagaaacgttcaaaatcacataaccaccgcgatttttatgtgactttcacatattttgaaatgcttaagaattttggtatgcacaccaagagattatgaagaagacgttcctccattattcaaatttaacatttattttattcaaaacaatttaacatttattgaatttgtgcatcatatcatatgcgatgtgttatcatcgtatattcataagtttgtacataaagagggatattcaaaaagattcgcattatgttaccaataatggagtaacattaaacaaaaaataatataaatgatacgataagaaaagcttgtggctccacctcctttcgtatggtcataaccatcatatcaccattatcatacttacttttctccatccctaaatttatatcgctccataaaatcaaatcgtttacttgcttttctccctcctttaatcataccctatcacaacgtggctttttattgcaattatataagttttggatagcctttcactttaccgaaattccggactagtctcttagcccatgtgtagtagtcgaatttagataattcatgtagacacatattcggggctagtttcgttgttctaactatatgagaaaataaaagaaatagtgttttgcctaataaatttgtttacaaagttctgttctctaacttacatcccaaaatcacatttaaagacgaatccattagaaccaaaagatagctacaccattgcaaatgcataacttatccccaaacttcctgatttaccgatttgtttctatttacatgaatgttttggagtaaaactaaagtagctctgagctaaaccgacttgaatttaaacttcaactctacaattcccgacttcggccgtaactaccggcacatacatttttacttagatttcggtgatacaccacacacacacattttgtcggcgtatccaaaaagctccatgtattataatatgttttctctctcttaatttccaaaacatcttcattgtcatttgtcaatacgatgccacacgtaagtaattcttctcagagacatgcccaacatgttttcataagtcatgcatgtacttccacgtaattatattagatgtcaatgcaacaccgtgtgatgtaataattgcatacataaggtatgtatgcggtgtttaactagtatatacatgtatataaatctaactacgtagccttccaatgctgctataatcaccaatcatattgctatctaatttaatttgtccattatgtatttataagtctcttatactagtaaaacgtttcgatggaagttaaacttttatttttgagcaactgacggaagttaaactaagaagtaagaatgtcaatttatgaaaacatcactgcaaaaaatgtatgaacaaaaggaccaataaatctccacaatcatttatgattttgccctaaagagatactataataattaggtagagagagagagagagagaaagtcggctttctttaagacaactatatgggttccaactaatttcacattggattctacgattttatgaccgttcgctagacttccatttcccattgttcttgttcatgttcagtggccataacctgacacgtgtacggtggaagatgcaacttcacgcacgtgtgtgagctttgcctaaacacagacagattacgtgcgatctctcgtgtgcgatgctactagagtagtagttactagctgtcacatatacaaaaaagcgtggctcatccatggttggctgacgtggatttaacgacggtactcaagattttaacgcctcaccgtttaagttccccattcaaagaagacaaaaacatccttgttcccaagggggaaaataacatttttgctttcatcgagaggggtaaaacagggaaatttgggagattaatgtggaagagatccccaaggttgtcttcaaaccataaacaccacgtgacagagagaccaattatactcaaaaaggtaaagaccaatttgaaaaacattacaattttaataatgctcatagactcatagttaaagattacaagaaccaactaactaattgacattatcattcatcaaaataaaaaccacctaattgggaatttatagtcttacagtgggattggtaagacgtttctaatatgctttcttttcaactttagaccttcttctctcatttctcactaagcaaaacttgtttaacaaagaaaacaaatcaaaagtaaactataaattgctaatcatgcatattagtatataattaactaactaaaaaagggaatggggtggggccattggagcgagaaagtgagaaaaaaaaagagagagcctccactatctctcaaagcagaggaagagagagagagcacagacagagagagattgagagaaagtttggattttgatatgtgtggttggatttttgttacaaggcaaaaccagacccaccttcaaacttgtccccacgaactacattatcattgttttgttcgaacttcttcttcttctcgttagggttttctttcattggctctgagctactctttattgcttaggccttagtgtgtgtgtgtgaatcttctcagcgaaagccaagttcttttctttgttggtgtttctgggtttattgcgacaatgggagctgagcattttagcctggtgaagttcaatagaggtttctttgtgtgtttatgggtgatgctctcgctatcttgcgcagcagcgagctatggctcttcaaggcaaaagtttgaggtgaagaagcatttgaataggctcaacaaacctcctgttaagactattcaggttctaactctctttcttctttactactttgtgttttctcgttttgagtttgatgggaaactgatgatttctgctctctctcctgttactttttgtatgttaattggcacagtaatgaagttttcactcattcttagtctacaccagtgttttagtaactgttcattagttaattctggataaatcagtagtcctgaagtttttgaattagtgagttcttatgttcttctttgtggttaaacagagtccagatggagatataatcgactgtattcctatttcaaagcagccagcttttgaccaccccttcctcaaagaccacaagattcaggttcaaagaaataaaaaaatactaatgatttagtactttcttgatatgtttggttctaaatctggttttttggtttcttggtgtgttcagatgaggcctagttaccacccagaagggctctttgatgacaataaggtatctgctgaaccaaaggggaaagaaactc

SEQ ID NO: 35758 - DNA, 3416 bp, Arabidopsis thaliana landsberg
  unsure (1)..(3416): unsure at all n locations
acttgtctcagcgcgagccaacgcgcagctgatcgaggccctcgaaggtggcggagtcctggagagcgagaaggagcaagttgatgagtggttaaaagatttcgccgatgctgaggtaaatcttaatcgtttcatggctgagctgaaagacgacctcaaaactccagctcccgagcccgctcctctgagtccgggtggtcacagatcagtcgagtcattggccgtcgaggcgggaattacggatcaagccggatctctcctccctgcaaaggataatcgaccatccgaagatcttgactagggacccgaggcggttttttgtttttcttctctttctgctcggttataatacttatgcctggatagctttatccgttatgtagaacccgcctggatggctttatccagtttaagtcatttttttttgaaacccaaaagttatggtttattaattctgaattgtttttaaaaaatgtatagagtgagtctctcgcttgcgacccgatcgtattcactccttgaccagcgtttagaaacgagctggggcaccggtgttaagtataaccgggtttcagaagatagaattcatagcctgctcggaaaaacattcgagcagattcttatcttgaatatttatatagcgcgctgtaaccgaagcggtgtaatggatactccgagccgtcgctcattgtattagatgagtaaaaagttgaattttttatttgtttcggttcggaaacctataagataataaaatgggagtatgaatatacggacccactccccccttttttaatgggggggtagctgaactcgtccgaagacgagctgcctacgtacccttttcagggatcaagccacctcgtagtacaaatttagtcaccttggatttagttgtagtatttccttatgtgcattgtgttccatgatcttggaacggctttaccgtttaagtcagcgagctcatatactccgggtcggatgactttagaaattaagtatggtccttcccagttcgtcccgagttttccagcgttcgattcggcagtgttctggaaaacttttcggaggacccgatctccttcgtggaatcttcgttgccgaacatttgaattgtaatgacgagccgtttcattctggtaattttgtattcgaactagggccgaatctcttcgtttgtcaatcagatcgagttcgtcgaggagcctttgagagttatcaggagtgttctcgggggataggcttcgttgtaggcttggaactatcatctcggccggaattatgcactctgtcccgtatactaaggcgaaaggggtttctcctatggctcggcgaggagttgtccgatgcgaccaaatcatgccttcgagttcgtcggaccacgagccctttttagcatcaagccgtttctttaagccgtcgaggatcgttttgtttgcggcctcggcttgaccgttcccttggggatatcgtggcgttgatttgctaagtcgaattccccatttatcacaaaagccttggaaacgggtagatataaactgcgagccgttatccgtaacaatctcatacggtattccgtggcgacattagatatgtttccacacgaagttttcgacttgagcgtcctttatgctggcgtaagatttggcttctatccatttagagaaatagtcggttagaacgaggactaactttttttgcttcgagggatgcataggtccgattatatccatcgaccatcgcatgaagggatatggcgaggagattgatgacaagagctcggctggttgatggattgtcggcgcatgcctttgacatttttcacatcgttttgaaattttttcgcaatccttgaccatcgttggccagaagaatccgtggcgttttattttgacggctaaagcccttccccagagtggtttccgcacgaaccgccgtgaatttccttcatgatcttgcaagtcgcttttccttccgcgcaggtcagcaatggtccggataatcgccacttgtaaagttttttccctattaagacgaaacgtgcagcctgagctttgagtttacgagccctccatttatccgagggcaatttcccttcggatatatagcttatgatgggttccatccactttgggctgcattcgttcgggtcatcttgatccgtgctgatttgtatcgggaggacgtggtcttcttcgccgagctcaatacttggtttttcaatgaattccactgggatgattcttctcaggttcgggtcggaggttgaggccagagcagctagggcgtcgaccgatgaattttctcctcttggaatccttgttatcttgaattcgtcgaaatgttttgctaacttttgaacatgaatcaggtaggcttccattttttcgtcccgagctgtatattccccgttgaattgattcgcgacgagctgagaatcgcaaaaagcgtggattttttcaatctttaacccccgagctagattaagtccggcaacaagtgcttcgtactcggccacattattggtagcttcgaagtttaacctgaatgactgctcgaggatttcacccgttggcgaggtgaggcggatgcctacacccgagccttattttgatgacgagccgtctacatgtaggagccaagttgtgtcgagtgggttttcccgagcttctttggtgggtaattcgacgataaaatcagctaggacctgcgattttgcgcatgttttgttccgatattcgatgtcgtattcactgagctcgattgcccacttagctagacgtcctgattggcttggactgtgtaagatggcgcggagtggcatggatcccattactacgatggaatgggattgaaaatagggtcgtagcttccgagccgacattacgaccgctaaagcaagtttttccatntgcgcgtaatgacattccgtgccggtaaatgtttgtgagacgtaaaagatcggcttttgttcgcctttgtcttctcggactaaaactcagctaaccatagtatccgatacgacgacaaacaagaagagtggttctctgattacaggtttcgcgcggaacggtggagttgccaggtatttcttgagttcctggaaagcttcctcgcatcaggttgtccattcgaattttttgtttccccgaagcacgtcgtaaaaagccaagcacttgtcggtagactgggagatgaatcggttaagggctgcaactcttccagtcagacattgtccttcgtgtttttttttaggcgatgccattccgaataacgcctcgatttgctttggatttgcctcgatgctgcgatgcatgaccgatatccgaggaattcaccagacctttctccgaagcgacatttggctgggttaaatttggagttgtagaggttaagctcctggaaatattcgcgtt

SEQ ID NO: 35759 - DNA, 1936 bp, Arabidopsis thaliana landsberg
caaccgcaaacgcttgcggaaaagagcttttgaaatccagcgattttgaacgattcgaaacgatatggaacagttggtatgattagtaccaaccgttaacaccacaactaaccgctaacaaccacaaccgaccgctaacaactactagacagttgtcagcggataaaccaatcaagcccttaaaattctcacttttataatttctaaacatcatataggtctcgtacctttttggtaacaattattcccataaaatcacatcataacctttccacattataccattaatactcgaacccaaatatcaaaactctaactacaaaaaagtcgaataatcattgctaataataatcaaactgataaatcaactaaatgacgaaaacacccttcaccgaaaaacacgtttgcaataacatcccgtggacattacagtctttcgccacgtaaaccatctcctccaggttcatcaagcaaaatttggtttaatgtcttcttcttcatcaccttttcgtctctccactcacactaaaaatcactctccattttgattttcgtatctctcgtgtcacactcacacaaaacacaatcttcctcaaaaaaaattttgtgcaatcagaaaaatttcaaacctcatctgatttgattttcactgtctttctaagtttcgaaacggtggattttgtccgtacgtggttttgattctcgtagatgtcgaagctctgacgtaagattagagtttcgatttctaggtttcttataactatggcggtggaatatgaatgctgcgggaccagcttcttcatacacatcgctgtgatagtgttactagtcttgttcgctggactaatgtctggtcttactttgggtcttatgtctatgagtctcgttgatcttgaggttcttgctaaatccggtactcccagagatcgtatccatgctggtacttatgattctcaagagattttgattgttgtttttgctttatttttggaatcttaaaggaatcagaatctttagcatgtgttagtttgggtttagtgcttctctttgatggttcacaagtgggttttggctttgatgcagcaaagattttaccagttgtgaaaaatcagcatcttttgctttgtactttactgatatgtaatgcagctgctatggaggtatatagtattaggacttgaacttatttggttcttgaatgttatttttatcttagactcttagtaataataatgacttttgtatttcaggcgcttcctatatttcttgatgctcttgtgacggcttggggtgccattttgatttcagtgacgctaattcttctctttggtgaggtgagatttgatttttttacttctctgtgtatttgatgccaataagtcaaagttcatgtgtctgtaatgtaattgtgtgtgatgaagacaattgatggttgatttcgttctgcagatcatacctcagtcagtctgttctcgtcatggtttagctattggtgcaacagtggctccatttgttcgtgttctagtttggatctgcttaccagttgcatggccgattagtaaggtgattatatgcacacttgatagcgcttattagttgtgcgggagggtccgagagcgagtgcctgcacatagattctttgtcctgatacaatctttgctgctgtatatatttccagctgctagactttctacttggtcatggtcgtgtagctcttttccgaagagctgagctgaaaacacttgtggatttgcatggaaatgaggcatgtcttcgaattctctgatatctcaaattttgagttttgtacaataatctccaatgtctttttatgttttgttgttagccgaataacgtagcatgccaattctttcaggctggtaaaggtggagaattgacacatgatgaaacaacaatcattgctggagctcttgaa

SEQ ID NO: 35760 - DNA, 524 bp, Arabidopsis thaliana landsberg
acctgtacggacaggtacgccagccgcgccacgcgtccgggcacctggtcggtattgttgtaggcctgcgtggaaggctgcgggctgtcgtggtactgttgcgcctgcacgccggcgatgcccgccagcagcgcgcacacgccaaccgccaccaccagcgaacgcggaaaacgaaaacgggtcatggtccactcccgtgggtccgggcgcgtcatgcaggcatcggtccggcgcccctcggccgacgtggctccccgcgctgtggcgggcgccttccgcgggccgcttttcgaagcgcggaccgcgcatcttcagttcaacccagcgaggctgaacatgggtatgacgggacgagggtgcaacacgctgtgtaaccatccggttaaccggcggtcatgcgtgcgtccgttgcgcgcccgatgcccatgtcgttaccatcccgtctccggcgcgggtgtagctcaatggcagagcagaagcttcccaagcttacgacgagggttcgattcccttcacccgctcca

SEQ ID NO: 35761 - DNA, 3202 bp, Arabidopsis thaliana landsberg
  unsure (1)..(3202): unsure at all n locations
cgaccagggttcagattaaagagcatgctttgtccaccaggtaagtaatccacgttcggagacctagccagagtagccgcaacctcccttgaagcttcaatcctcctaagctcaattagtcccattcctgctttagctgttgcatctgatatcaactgagcagcttcactctcaccttctgctcttataaccgcagctctcctctcttgatcagccttcatcaccacaaactttgacctttcagcttcctgctgagccacttgcttcgcctccactgccctcgagaactcagcaccgtacgataagtgagtaatggctatgtcgtcgagctcaatgttaaattccctggcacgcttgataagagcatcacgaacaagtgctgatacttgaggacgctcagtgaggagctgatcagcattgaaattagcaaccacagctttcaagacctcatttccaatcgatggaagaaccttctcatcgtattcaagacccaatgtttggaaaatgtacgggagacgcgaaaccttcacagtaaaataaccacaacaacttattcaatccctcaaacaatcgaagccagtatagatatgcaccaaaagcttctataataagagtaacattcatcgaagaaaccaaattacacataaggattatcttcaactctagatcttgtacacaaacttcaaattccacgaaatcaaacacagaatcgataaatgattgctaaatcgaacgaacacgatcatcctaaaccctcgatcttgtaaacaaccaatgtatacaaaatcaaacacagaatcgagaaattgattgttgctaaaatcgaaattacctcagggcgaaagagaacacgaagggtgagattaaccatctgaagatccttagtaccagatttggaggagaaagtgtgaggtttcgtacgaatatcgtatatgtgcggcgtctggagatacgggatcaagaaatgagtcccttcgccgacggtctgatccaacactcccctgaatcgatcgaacaaaacagctctctnnnnnnnnnnnnnnnnnnnnnnngacgagtttagtgccgtcgccgccacacctaacccaaacgccgccttcgccaagttcgtcagaaacgaaatcgctacttgttgacttcccattttcttttctgacctcacaagaaaaaagcttcgaaggagagaattgagaaaggaaagatttaggggtttgttagggtttatgaaatgattttggaacttggaagagagggtttttttggccgacaattattgaatatgggcttgtttaaagcccattaataatataaactacttcggcccaataataaaaaaggaaaaggaaatgatgtaatataaaaggaaacaacggtttggaagattaaacccgaatttgattatttgcccataaacgaaactaaatccggagaggaagacagagacgaagagcgtgttgataacaaccctgcagagattttggatcttcttagagagcaagatgaaaatgttcttcctccacctcctccttcaccttgattagagattttgattagagtgaataagcacaaaagactaaaattgatttttctatacaaccagtggaaaatgttatatacaagaaattctatataaagacaatgagacctctgactttggacagcaaaagtagataaaaagaaacatctaaggctgcttccacaaattgaactaaatcgtcgatctcttcatcgtgtgttttcttcttctttgctgcgtgtggactcagatagatcttgcacatagcataattgccctactcaaacaaaacaacagaagtcgtcacaataaaaaccaaaactcaagagtctcaataacttggaaaccaagtaagtaaacgtacatatatactcttaccagctcgtagttattaatatcatcagaagacttaagccagtgttcatgcatcaaccaaccctcttttacgccattttggttgttttccaatgtagtactctagtgagtatttgtagccgacaaggccttcttctccagcatgaatcttcttggcagagatgatactaccctccagtatcctccattgtctctacgattcattctttttccacatttccccatcttggtcctcccagatataaagaaccattccgtcttgttacccttcacaaactcctccgtttcgaatcaaaagaaagacgccgttttacatacagaaaacaccagaagaggattaacgatatcgccttatatctttattacttggatttcaattctggcttggactaagctaaaaacagagactgctcccacaattctttggaaattagtaggagttgctcatgctacagcttaccatgtttggaaacaaatgaacaacttgttgcacaatagtgtctccgtttcgcctttggccaccttcaaagaaatcgacggagacatcaaaaaacactattaccgctcgcataaacagaaaagcttttcggaatctgatgatcttgtaactccgataaattttgttgatggactcattttatatctttttggcaagattacatttgtttggttaagctatttttaaaacctcaactttcattaatatgataatcacattcctatactcgtaataccctcccttaagatgaaatctgaattaaaatctaaaactttgatgaatcgatgaagatcagtggaatatatcagtttctctcagattgagatcgagagaaaaacaagtgggagctatttaaaatgacacttcattctttaatcaccactctttgtttactccttcgggttttgatgatattgtaatttgtaaatatgggcgaggtcagcctggcgagacctacaccaagttaaattcatctttttaggagaaaaaatccctcccaacatgctttgaactcaacacctccatctaggagatttactattggaccaacagattgttgatgtcaaactcatccttcaagctacattttgtgagatttcgaaagagtctaactctagacttcatggaggaacctctaacatgtgaaatctaacagaccattcccctccaattggtttggattcgttcaattatccatctcttaactagaatcttaaagcatgtttatcttgtggttgtttaaattttaatctatcttacttcctaacttaatttgctcaagaaaaaataaatgaaaaaaagtgttaattaaa

SEQ ID NO: 35762 - DNA, 1068 bp, Arabidopsis thaliana landsberg
aaaacccttttaatgatggttaaaaatatatatatcaaaatttaattttagctgttacaaagaatggaaactaattttgtggagctcggtcaatttccttaagaaatcatattatttgacctaattttattgggcccaccacgaaaacatctgttgggcctagtttaggtcgtaaacgagttacatcttctatatataaaggaaattcacttccatgtctctctctaaacctattgtttacttttgatctctgtcgacgaaacgatgaagccagagtcaaagaaaatttcagagaaaagaaggattcagatcaacgatggcgtttgcgactcttcgtttgatctaagtttgctcaaagaggctgccaacaatgcaagcgagaagccacttctagtggagaccattgtcccaaagactaagaaaaaagattcattcgatttaacatcgatgtcgcatgcattatcctctgtgaatcgttttaatagtcggaaactttatatcaggagagctatggcgaggaagagcgtggcggagagggaagctatcaagcagcgattactaattctaactacgatatgcgaaaaatattcatgtaaacattaattagggttttattgatttaggttaatctcttttagttgtttaatttcgtttgtttcgatgatgaggcggctatagattattaattgctaacaaattgatttgaaaaaaaaatagtcaaatctaaatatatattaagatcatattctttttgtcttaaattataatcctcagaaaggtataaaaatatataggaaataaattgatataccaattaactaaagaaatcctaaaataaatataacaattttcaaccataagaaaataatttcttatttctatcaaagtcaaacaaacaaatatttataactatatatatttagataatcacacgcattcagcggagtaaaaccaaatcttctataattaaattaaatatatattcccttctttatcagatttaaatttatttttgagcaaaattttcttaagctgatgaatattttttccaatttttggtttttctca

SEQ ID NO: 35763 - DNA, 4706 bp, Arabidopsis thaliana landsberg
  unsure (1)..(4706): unsure at all n locations
aaaattactgacacattaagaagtgtgacccttcttgctccttcttagccatttattagattacattttttgtctttgtaatctcaaagaaagatgtgtcattatgtctctttacctttttgttttgcgcattgactttatagaaagctattccaagaaatacaataggtactgagaggtgtaactaactctagcagtccatagctctaatcaaatacaaaactaaacctaatcatccacaattgaggtacacacttcccatggatcatactgcaaagattgtgctacgagagaaaaagcaatgaagcaaaaatctagatcaaaggattatcctttcttatcaatcatacatcaataagagtcagtgctaagctttgcatcttgagtatagcaacaagatcaaacagattcattaattcgattgagaacagtctttacatcttgaggatagtaacaagggtaacgagacccctaatacgatagaaaatgagtaaaatctaatctgacaagagatgagaaattctttgaaaagatcaaaccctgagaatttgcagcttagtagagaaagcaattgcgacccaatcaggctgagaagaggaccactgaagctgctcaatctcagcaccagcagtgtaagctagaatagggtcaagaccaccttcaacatgctgtcccatggatgaaatatcccaaatcaaagcttgagaatcatctccagcagtacaaatgtgacaagagctatgaggagcccaagcaatggcattgacactagcttgatgtcgttgaagctcaaccacaggaagagccggaaaacgaatgtcaagcaccacaactttagcactgtccatgataatagtagccatgtacctaggatcctgtttgttccaaccaagacgcactaaaggagtatcaggctcggagctctcatagataatcgtcgaatgttccttatcacgaagatcaaacaccctaacggagccattctctgagacagaggcaaagacaccaacaccaccccaagcaatgtcataaacctctttatcatgagcaataagctgggtatcaacaacttcacgctctatatcccaaatagtacaagtggtatcaatactagaagtaccaattcgtctaggctcagcttcattccaatcaaatgaagtgattggaccactaaactcactattcttatcactactaagacaagacttaagctcaacacgagattcatcatcagagattcgccataaacgaagaaaatcactagaagtagctaaaagatcgggtctttgacattctttatcgggtatgaaactggttttcgttggtgggtaaggatgttcgaagcagagatttggatctgaacgaatctcaccatttgattcatcaagctgaacaatttcgacgcgattcggatattgctcgatgaggcttgtgattgcgagccgatacttcttgtctcgacgaatgctccagttcattgcgtagatctgccatggtgcttcgtatgtgtaaatctctgatctttttgattgctcttcagaaccattttggatttgatcgctgctcgtaaccatctttgcttcaatgtagcataaaccctagattcctttgcttcgtcttcttcttctaatggatatttactatttcttctttttatctaacaaaaacgacgacgtttaattagacacgtagaatcgatccggtttggttcgaaatttctgtatttcgtttggtttagtggttcctagtcgaatcaatctggttatgcttcctcttgctacacaataaaccgaatccgaaccaaatcagccaaacttcggtttagttttgtttatatgctcacgcctctgcagcttcatcatcatccacacacgatcaatcgaggaaagagtgaatgtgagaatttggtgatttatcgttaaatccatggcggctccgtcgccgtcttcaccaccaaacctactctctcctccaccattccgatctcccgaagcttcttactttctccgaacttgttcaaatttctctcaattgaaacaaattcacaccaaaatcatcaaacacaatctcaccaacgatcagttactagttcgtcagctcataagtgtttcttcttccttcggagaaacccaatacgcttctctcgtctttaatcaacttcattctccttctacttttacctggaaccttatgataagatctctctctgttaatcacaaacctcgtgaagctcttcttctctttatccttatgatgatctctcatcaatctcagtttgataaattcactttcccttttgttatcaaagcttgtctcgcttcttcgtcgattcgtttaggtactcaagttcatggtttagctattaaagctgggttttttaatgatgtcttcttccaaaacactctcatggatctttactttaagtgtgggaaaccagatagtggacgtaaggtgtttgataaaatgcctgggagaagtattgtttcatggactactatgctttatggtcttgtctccaattctcagttagattctgcagagattgtattcaatcaaatgccaatgagaaacgttgtttcatggactgcaatgattacggcttacgtcaagaaccgtagacccgacgaggcgtttcagctttttaggagaatgcaggttgatgatgtcaagcctaatgagtttacgattgttaatttgttgcaagcttctactcagttaggaagcttgtctatgggaagatgggttcatgactatgctcataaaaacggttttgtgcttgattgtttccttggaaccgctttgatcgatatgtatagcaaatgtggaagcttgcaggacgcaaggaaagtatttgatgtgatgcagggtaagagtttagcgacttggaactcgatgatcactagcttaggggtacatggatgtggtgaagaggctttgtctctgtttgaagagatggaagaagaagcaagcgtagaaccagatgctatcactttcgttggtgtcttatccgcttgtgcgaatactggaaatgtaaaggatggtttgaggtactttactcggatgatccaagtttacggtatctcacctattcgagaacataatgcttgtatgatccaattgttggagcaagccctcgaggtggagaaagcttcaaacttggttgaatccatggattctgatccagacttcaattcttcatttggtaatgaatacacggatggaatgaatgaaacgaacgaaactccgagccaacatcaaattatgttcaccaagtgggatacaggccgattttgaaggttcagtgtctcttgacatatatattttcgtctattaaacagattcattgatcatctttgtaactatacaagaaaagctccttcaaaagtagtgtaatgtcatgtacttgtaaaaggaatgggagcttaagcagggaaaatagtaaattcgatttgtaatagtgtcatgtattttgtaaacagattcatttatctttttacattatgattctcaaaatatcggccaagagactcaagactgtataattgtcaccctttagttatggatttgtgataataataaactcgattcgaacttgtttacatttgtgttttatgaaacacttttttagtatagctaatggcctcttgattatgagtctgatatagttaaagttaaagaagatcactatcttataagtagaagcaatcggaaacgaaaatgcagaggagattttattgatgaaactgagagatattacataaaatcagaattttgggtttggctaagtttggtttgagaaacagcaatctcagcttgagttttggctaattcattctgagttttctgaatctgagttttaagtaaatgaataatgccaacacaaccataaacagggtcatctactctgcattttgcttcaaagcacaaagattccactgcttcagctcttgtctgatcaggaagttgctgtcaaaaagatcaccaaaatccaaccatgaatacacttacttatatatatgcataaagtgtgatcttaaataggatattagaagaagatacacaaagatgtgtatacctgaagcattttggaaacgtttccagcaccatagattctgtggacacatgcaaatttttgaggatcgtttggagggaaatatggtgagaatacgcaatcttttggacatcttcttctcagatacttgcaagctgcacatctttttggattcatctcagattttctcagacacaaatataaacaaacaacacaaaagaagagattgtgaaatcttacacaaagatttagctatttgtattccctttcgtttcctttcttttccaataatcaaacggctagtttccagtttctgaaatttgagaacatttacttaaggtaagactatttatgttgattctcacttagactaattagactttatattaccgttaacattactgttaaggcaatattaatgtttagctaattctcaaataggcaataagaaatgtcttcaaaatagagtataatgaagctcaaatttctcatacattttaacataactgtttcagaaaaacttaaaagcggcaacagaagataatagagagagacaaagtatatcaaacaaaagttcatagtctttctttntttccccaaacttcaaatccttcttcagatcttaaaccacattttcttttacttaatctgagtc

SEQ ID NO: 35764 - DNA, 3165 bp, Arabidopsis thaliana landsberg
gatcttatatacttgaaaaagttttcgtatattattattattgagtagatttgtgccactcttaaaatccaaacaagtgcatcagtaatagattagatgataaaataagttgatcaaaacaaaggatcaataccagtataaaaatcatcatcaaagtgaagaatatcatcctcgttctctaaccaacttgcagaaccagaagtttcgccgccttcaaattcgtgagtttgattcgtctttgtctcgtcgttgcgagtctgaagaacttcctcctcctgatgatgaagaatctctaaacctccatctctttgagtactcttcacggcatcatttaatcggcatctcacattgttcaacatcctcgaaacagcatcgaccgcctcttttaactcctcaacgttctccgatacgtcaaaacgtttgtcttcccaccaaaaccctaaccctgacctgttgtcttggtttgccgtaagaggaggatggtcataaagcagagaggagacaacgttatcgacagaggaatgaccgaaagagtagaaagaagcgtgagatttggaagtcataggagccgctaagattgcgatttgagtggctggagagaggagacaaagctgtgaagctttgcggaagagaccttccctgcgttttgtgaaagcaaccgtttttgcgggtttgtttatgatcttcttaatctcaatctttgtttttttgcctcccatgttgaaacacttgcaagaaagaaaccccaattacacagacaggagacagagattcttctctttatagtacattttatttattcttcataattaattgcctgttccccattattggtcttattccatattcggagaatttccataatctgagatgttttttaatattacctttctttaactattttcctaaaatctcttagcaaaaaattagaaaaaaaaatacacaaaggtagagaactcttttcctttcttttgtggtgttcttaatgaactaatatatttactttcccgtggaggaaaaaagtaaaacaaaaaaatctaattttatttggttcactttttggagcgaagataattttttttacagtattgtaaacccaaatccaaaacctcttgcattcccgcatttattccatgacccatctgcgaaaaccctaaccctagagataatttcttgcgggccaagaaacatggtatctgatgaacagaggagcgtcgaagacggatagtttgccaacgcagtcttggtcggagattatataaatagttcgcggtggagacattttaggcattgttgttaatttgttaatcatttggtgttaatgaatgatcttttcttttgatgagtattgtgataggcaccattttagagtaaaaataatttgtatactgtaatcaatatacagtatatttgggattataaggaagtcgtaaaatgtggtactagtttattggtttgatggaacataagcgtgtttctgcttttccataagcgccatatgtaaacattttggagagataaagcttcgagagatcagggggaggggcacatttttttgtcgaaaccgaacgggcacttaaacggtggtttatagttgattttcgttcgttggctcaatcttgatctatgtgtcgattctatgacaaatttgtcactaaatcagccaaactttaatgcttccgcataatagaataacaacatcacatacatatcttctttctaaaaccgaatgacgcatattttttatgtaattttttcgtacttttaggtatcccaccaatatatatatatatttttttctgttctaccatcaaaccaataaactagtaccacattttacgacttcctataatcccataaatatatattgattacaaattacagatacataaactagaaactacctataattcataattcttcggcaatagtaagtagtaacccatatgtttatcaaaggaaataattattcattaaaatgttcttgacctactaatcctataacatggggaccaatactttgacaatcatcgtcatcttatcatattcatcatcatcatcatcgatcaagatggatgaaccttatttccagctgcagtcttccaagctgatctcatagacgcggcggctgatcccatcgccgccgcaatatgtcgtttcgcggcaattgccgcgctttctccattaaattcccgttctccgagcagtctccgctttctcctcaagctctttcagctccgccgcctccatcctctccatctcctccaacgtccgcctatactcctccatcccccactccatatccctgaagaaaccataaaaatcagatctctccagatctatgaaaattccatacaagaaaagacgaaaatgttaccgattcaagttcaagttcagcttcacggagagattcttcagcttcttcgagttcttgttgctgttcggattcgagagctgcccaagctttgtatgaatcgacttcaaagagacgcatgaggtcctcgattcttgaagggtcgaatgttttgtcgacaagagcttgatcggagaggagagtgaagtggtgaattagagcttccatgttttggtgaattttgatggagaagaagaagatgatgatagaagagaatcgaatgattcttgtaatgtggaactttgcaacaagtggatgacaataatgtaaggcagagagtaaagtttaccgttggggatatgtatttgacgcaattgtcaaaagttgaaatgattggtgtgtggtaaaaagtaaagttggaacctaaaaaccttttattttattttattttaacctatggtttctatgaagaccgttactttagtttttttctaaaaatgaaagtaaataagcattatgaaaaaagtaattaagtcatttgctttaggattttcgttggaatttaatcctacatgtatggctacggatggttgcctaaaattgaatggattaaaagtattgagttgaaaagttttggatcgaatatcattcaacttattcatctccaaaattgtagctgaacaagttgaacattttgttgttataacttgctcatttttttcaattttttaaaattgaatgggttgaataattttttcaactctttcatctcaaatggtaaaaaactagttgatgaatgtacatgtaaagaa

SEQ ID NO: 35765 - DNA, 1510 bp, Arabidopsis thaliana landsberg
ttccgtcgctaaaaccttttagattcttctgtaaacagggactgaaatgaaaggtgttcctgaagaatattctccaatccttggcaagtattggtgccaaagatacctcctcttctccagatttgatgaaggcatcaagatggatgaggaaggatggttttctgtcactcctgaacttatagctaaacatcatgccacacgctgtaatgaaggcatagtcattgactgttttacaggagttggtggaaatgctatccagttcgcatcaaggtgagtggacatacacttcttgtactgatgttttgtagttcttagtagtaattcacacggtagcaggatctagtttaactaatggaagtagcgttttgcacattttgggcaatttccctgacttattttctgctgtgttttgcttttttaggagtcactatgtgattgcaattgatttggatccaaagaaacttgatttagcaaagcataatgctgccatatatggtgttgctgataaaatcgactttgtgaagggagacttctttgacctcgcacataacttgaaggttttttaattcaactcttctcaaattttctggtcatagagtagccattgaaaagaattcaattgtgcaggcaggcactgtattcctatcgcctccttggggaggccctgattatcttaaagcgagcacgtatgatatgaagacaatgttgagacctcgtgacgggtatgtctctcgtgttgattttttaatatgtagttacgagtcttaaactcttactctctttccatgataagaaatatatccttactgttcctgaatgatgcagagatgctctatttaaggcggccatgaacattgcgtcaacaatcattatgtttcttccaagaaatgttgatattaaccaactagcagagcttgccttatcaacgtctcctccatggtcactagaggcaagtgtttttttcttatcactttcctatatggtcgattatatatatgagcatattctttggaatctagaaaggaattccaagaaattggatagattctgatgcttattcatgatgactttccatcatataaaaccagtggggtgttttctgttacattgttgaaaaaaattggttatttgcttatcacaatggaaacaaaccttgcaaaattttcttggctcttagtaacacttgttctaataggcgaactctaatgttttcaggtagaaaagaactatttaaatgggaagctgaaggcggcaacagcgtattacgtcagacaagatgattgtaagaagcttaaaagaagaccacagtagggaaaaggtagatgcaatctgcgtttgtgctggcttgttgaatccaggtggatcaatattgatttatgatcataggctatgcatttgtatagacaaaatgtgttgtcttaagcagtacaacaaaatacacttgttaattatatttcttacacaaagagcaacgtcatcatttctactagacacctgtggacaaaattaa

SEQ ID NO: 35766 - DNA, 3596 bp, Arabidopsis thaliana landsberg
actttaaccggggctcacttgggaggaagtcccatgactatccttgtaaataatttttactttcttgatatttttgatttgttttagttgtgtttgtagttttcagagacaagagaacaacgcggagatagagtaaaaattcaaaacatttactctacagaagacctggagatcgagtgtacagcccgttggagtacaaaattttgaaaatcttctgttgcacctggagaccttgcactcgagtacattggtcgagtatgtgtgatgtttaaaacccaaaaatatttaaatcatcattttactcgaccaacagaagctacagagacttgcagaaatttcctacagtttacagtaggttttctgcaaaattttctcaatcaacagtgtgtggaccacgcgctgaggataagctggagagagaatctaaaattcaatctagaccactcattttgaagcgctactcgaccactccaaatccactcgaccttcctcttttcatttcaccgccgacactctaatctccctactccacaaatcgccgtccaaacagctactcgacctctgataatttcactcgaccacctcgccgccgtcaccagctcatcccctccgtcacccaaccaaaccacttcactcgattccttctgtatactcgaccaattcatccacatcaaccgccgtctctttcataaaaaatcgctcgacctcgcttcccggtctcgtagaggcactcgaccgacgccgtcctaaccgacttcaagaactcactcgacctcgagaaagcactcgacccctgcaaaaatctactcggcttcttgttcgagaattcagtggagccttccaacttcagagaagctactcgaccactagctttcacgattcactctatctccacgattcactcgaccggctgtagcattgcaactcgacctctgagaagatactcgattcaattcatctaagctcaggaacagctcaggttactcgagtacagaattgtactcaaccaattcaatctgtttcattgcctattaacaataattttggtttcattgctatctttgagactaacctattgacatttgagctttgagttctaaatccctacaggagaatcatgagcaattacagtggcagttcttctgttgatcctgactagaacatggatgagacagaatcgtcatcttcaaggccagagagagaacatagagaatacgaaagtttcagaaggaaagctgagatagcccgaggaaagagagcgatgacagagaggtatgagcttatagacgaagatctggaagacgagtacatgcctgaacagactcgcagagctaccaaacttctgcacaagctcgacatattgcctgctgaggaatatgttaggcttttcaagctgaatgagttctgtagaacgaggtatccttgctcgacctcacttgcacaactcggattgttggaagatgttcagcacctgtaccaaagttgtcatctggacactctgatggcttatccttatgtagcatatgaagatgagacaatacaattcctctccacactacaagtagagctctaccaaggtatgatctctgatgagttggattgtgaaggattgggattcttgcgattttctgtgtatggtcatgagtataggttatcaatcaagcgattggaaggattgtttggcttccccagtggaacgggaactaagccaaagtatgaaagagaagagctgaaagacttgtggatcaccattggcagctctgtaccgttgaatgcttccaggtcaaagagcaatcagatacgcagccgtgtcatcaggtacttccagcgttctgtagccaacgtactctactcccgagagattacagggactgtcactaactctgatatggagatgatcgcaatggccctcaagggaactcttcgccaaactaagaatggtatgcccctccagggtgaaattaatgacacacccctagatgtatttcttctgatccatttgtgtggatacaagagttgggctgtcaccaataaccgcaagagagcacgaggcgctctgtgcgtaggtggcgttgtgacaccgattctgatagcttgtggagtcccactcatttctgctggactcgagccgcgagcaatggatatcgagcacctacgtctctacgaattcctggagtttgcaatggttgacgatctccacaggttcaggtttgagcactctacagacaggagagctaacatccttctccctagccctgaggtcacacggataatagagggagataacattgattttaggcctgagattggacgcctctactatgagaacgctccgccattggatgaggatgatcttcttgaagaagctgcctcggatgggatggatgaagatagggcagtgaagttcgacactagcatgtatcactttgctgaacatgtacctccagcgaggcagagcaagagcttgactgaagctcataaaaataacagtaaattgcagaagtggtgcaagaagcaggacaagctgatcgccaagtgtttcaagcttctgacagataagctgagttgctcttcctccaccactgctattccacaggtacagcctcctatggagatgccatcgaggagaattaatgcacctgcgcacatgcctgagcttagcgagcagagagtcccacatgtccaggctaggcatttgtcattcaagtctcgggagcacaagagaagaaggaaggctacactcactcgatctagcagcagatcacgcctcattcactcgaggagatcactcgaccgcggtgctggccgcagaagaaggagagaggtcgagtatcctcagagcggtgttggccgccatagagctgatgaggtcgagtagccacctgctggagctgataaggaacaaggtggttcgtgtatggcctgggagcaatcacaggcagccattgacgagcaactacgttcattcttcgactgaggtaagcgcctcacttcaccattgtattatatcatccgctgtgatttgtttctttattttgtttctgtgattggatttgtccagagtactctcttccaagtttattcgcaaagtggactgtgtgatttaagtttgggggagggctcaggaagtgtgtgttgcattgtgtatatttttgagtctgcattcatctaaggcatagaaaaaccagaaaaaatttgaaaaatttcacaaaatgatttcacaaaaaaaagagtgttcatgtagttgcattacatttaggatcgagtttagagtgtttcatttaggattgttgcatatgcataagggataatgatgagatagccttgtaagcattgtggttcaccggataaactcagtgccctcgatgctaattgtctgttgcgtagtcaatgcaattggagtaaaactgaaccatgcctagattgcactactcgaccatgctgtcatgatctaataccattccctagcaagttgaacctgaatctgatcgttaaatatcaggtcagcaccaaatttgaactcatggatcccgtgcacacttggattgtcttattcatttaaatcgaaaatgttatgctcgtggctggctctcctt

SEQ ID NO: 35767 - DNA, 7987 bp, Arabidopsis thaliana landsberg
  unsure (1)..(7987): unsure at all n locations
tcacggcaacgaccacatctccagctacctcctatgcacgtagattcctcctcccatggagaacagtgagattgttttgtcatattacaagtctgacatgtgaggtcaggtcctggctccacatgcttgcatatctgacatggaattgtattttcatagagaaatgacgtgcactgttccattgcctcaacctgagggtttgggttatccgtgattcctgaagcatccttgtcatctccatatccatcgcactggccactatcatctgttgtgagcaactcggtcagcgagaaatatgtttgaggttcgaattccatgtcttcgtagtcaaacataagctcgccttcattcatgttgttgctattgccagatgcatcccattccatgacaggaaatgttggctccatttctggtttcacaacaggcattgattcgggatgcattgtaaactcggtataagaaagattattattcccgtccgtgtcttcacgttttactggtctcctcacttgtagcttctgtggtcctggcacacaaccatcctcgttccattccacatccaaactatttggtgtaatttgttcgacttttgaaactgacaccaagagaggatcatcctctggaacaaacgtatcttcagagagaaatgagggagtggagggcaacgagtctttcggttcagacattctttcggaatccgaatcaattccggtatttccttgcccatgcttctgcctcctgaagaatacttgtttcatctgcttctgttccttgagtttgggatccatgtaagggcaatctggtgatcgtatacgacgacatctgcaacacttgaacccaaccacttcaggaatttttgactcctcgagcttgaccgcttcgatgtggtaccacactgcatagagatctaggattagaattataagagcaaaatggtggcattgacgaaatgtacaattcagtatagaatttagagtgagtaaaaattttcttactgtcacaacttgtacagtgaatatatgttaggccaggattatacggcaatttgcagatccagcaaactggttgcagattcggctgatcagatcgtccagccaacataacattttcatgtctgaaactaacacctgtgtctgccaagttctttttcctccatatgactccccaagacaatgtcttgtgtttacttttcggtgccaaattgaaatccggagtgatttgtttaactcctgaagcattgtcgcctgttttggaagatggtaactgttgattaagacgcttaatctgtgtcttcgtgtttgaagtggctgcattttgaagttgaccgttgatcaggacactgggtgttgttggttgtctgtgattgatattgatttgtgaacgtgctcttgcaaggtagcaccgtttgcaggttaccaaaatttccaactgcccagttgtgtgttgtgaactcatagtacattccttgtgacagaaacctgagaggcaaagagtaaatccacaattattcagataaattcccaaataagcaaacgtaatattgccatgttgtcaaatccatcagcaagcgagtgtagtgtaccttggcaagtactgcatgttattgaatccctatagacatgtagaggacgggaacacaaataaatgagctacatcagattttttaagaagcatcttgaaaggtgaagaaagctaaaacaatacctcaaaaaaacatcgagatggcatgatgcacaagaacacttctccgtgttgtccctccgagaggctagataagaaaatatgtttgctcgagaagcttttagttgccttttctggagctttgatatttttcttgatggcttcttgataaaaggtatgtgtaccaccctatgcaaactttcttcatattctttgatcaaatataagggaacgcgtgcttcatgaaaccaatacttttcgtttctatcttcagatttctcgacttcaatgacattcttcatgacacgggatggaagatgcttttgattcccaaagacaactccgtatctaaccttgttatctataatcttcttgacacaaatactagcgttcctgaaaatagtggcctctgtctctggacctttaacatcttgcacgttttgctctgggcgtacaagttcactccatcttatattcatatccaggtatctaacctggccccaattcagttgaatttcaggggattaaaaaacaatcatatacacagaatcatttgaataagcattgataatagaagacaaacctgaagagcaagctgagaaatgtttttgctactttcaactgcggctttccaaatagaccgcctgcttcttttaggaatgtaagaaccatcaccataattaaattcaggaaactttttcgtaccacctaatggaataaaaaaaacaaaacaaattagcactatccccagagtaaaactcaaataagatatctccggtcgaagtatcaaaaaagaaaaaactataagaatgcatacgtgagaattgttcacaagcgcaaaaagcataaccaatcaggtttaccttgccaagctgctttctttatcttaggcttcgacaagactgccttgaggagtataatttttgataacttcccccctcgccaccaagtaaagctatcatcatcagaaccttgggccgtattttcagcctggttcctctgcttcctcctaccaggtctacgtttctgtgtggccccaacagtaactggagcgctttgaaagatagaaagttctatcaaccaatcgtccattagtttaagccagtcgcttgacagagcaatactgcaaatattttcctcaagctgtgaacaagcaaaatgaaccatatcatgccaatgaaaacacgatacatatagtgacaaaccaaagatatcactatatatagttgacaacatcaaatctgaacagtgcaaatgacaagaaaaagtacaattatttttaatagcaaaagaacgtgaataagaaccgaacagttttagaatgaaaaagttttacttacttcaagcaggagggctttcatcgctttgcatgttgaagcttcctctaacttcttacgccactggtacctaagactctcactaagaaatggccccgcaatgagaccacgtaagctttcctcgagatatagggcatatgctgcgatactagaaagtaccccctccccgttctttagaggaaaaaggccactgtagattttcatagcactcttggtggcccctgttacagctgcatttaacatgcatcctctcctacttgctgatgtgagtttgcaagaatgacaccatccacacctttctctggtaatttccttcttatcaggacttggccagaagaaactcgaggctactatcgaaaatgctttcatctgtagcaagatgttacttgatgcagctttcttggcattactaaatttgtgtagatcaggttcatgggtttcctctgacattaggatagccaaagtagcagcagctgatgcagccaattctccatttgtgtaatgattaatgtaagaatgaggtttaaatgataaacccaggcaggtaacacgagcagccaattttttcccctgtattccacatgaacctcctgtaacagcactgttggtattacccaaagtagatgtagggaggtcaaacacagtctgggtatgacttctattggaaatatttgcactatctgacttagtgatctctgaaaccttgccatcctctctatcctttgcttgagttaaaccaatctccccttccctcaaggagataccttcaggaagatcccagtattgggtgatcgctttgcaaatctctacatattctagtgtatggtttgatgcagatataagcactagtacaacttttgatatgtcattaacattgtagtacttgacaactgcatctccattgacagatatgttaagcctgtgatttaagagaaaagaaggagaatgctcatcagtgtcacaacaagcaaattcaaatgttccagagtaatgctggctaaaacctgttagcaactatttgcctaggaagtaatgaatcttaaactatgtagcaggggaatagattgaaagatcaggttgctaattccaacaaatgcaaaacaaattatgtatgaatggaggcaacgaaaacatacaccagtaagtgattgcaagtacccaagaagagtcgcccatgtggatccattccaaactgtacagctcctctaagtgaggttccatgagcaatcttcggcccctttttgttaatagtgcactctggacaataccacggcccatctggtatatacattttgaccacaccaatgcatcttgaatgatatgctaaagggcatccatcacaacacagcaacgttccatccatgccacagagcctacattcatcactgtttgcatccagatctgggctatctccattaggaccaccatcagtgtatcttgaactccaattttttgagtcgctcaatgaacttatcccatggttcactgcaacaaattcactaagctctttctccttggaagctgaggttttagcaaatctggggtggacccttctaggtccattttcaggaagttcagcagttactccatcagtatcaaatccaacttcagattcttctctgttatcaatttcagctcttaaatctgctacatcaaagacgtcatcacacagaatttgcaggatcttcaacttcattactacaggtgacgagcaatactctttctccacaacaaattcattaaaaaatctccagagaggcccacttgcatgtcccatggcagcaaagtactgaaccaaataaacaggccaagttagcgcatcgagcaagctccaatcaatgcacctgcagatggcaatgcaacaaaacccccgaattgttatccactaaaatatgggataatgggagacctaaaacaagtttcacctaaactatgaataagaggcttatattgcagtccctgtacagccataggcctttttctcccagctgttataaaaggtttgttgcatgtatgcatacataagataacaatgtatatttttactagcttgaaaaataatgtcagcagttctgcttccttgaaattcagatatccaacaaattaattttactgtttcacagaaataactcggaatatatgaaagataactagaagcatctgcaagaggaaacaaagaaatatctgtatgaaaactgtggatgacaagtgttgtctgtgcttaccataagcattttgaagccacttgagacccttctgaggaaagtctctctagatgacccttcaatgcccgcaacaaggccacatgaacagcatccaacaaagaatttggtcccgagaaatacaacgctcccacaaaatcattgagttcaaatgggcagatataaagctgaaaactaaatgatcttaagaacccatatacagataatagatgtgccacagtctcctcagggataccaattgttcctgatgaagaaggcaactccactggtggaacaagaggagacatactttcgaaatctggatctatgtcatcttcacactcaggcaaaccacaagatgaataaccactttcaacttctgccacagaacttgggctattacatgtgggcacctcaactcctttgttcttcaggcaatctgttttcttcttttcgtccttcttcagaataaagtcgtctaatttactccttctagcacgtaattcatcatcaaagtaactatccccaataattaactggcgaagataacaagtttccaaatcctcaaaatcaccatcctcatattcaactctgtacaacncagtattgtaagaaactatcttcccaagaaaaactccactgtcatcaacatctttcaacacataacgaccaagaagagatctaggtacagccactttcacctcgaaaaccggcctcttccctcgattagataccccattaagatcctctggtctggggcgtttccttggtctacctctaggtttagccacctttccttccatcagatccaaatcaatccccagatttcaattctcgtttatccctttctatgattccaaaaatctaacttctttttataaaatcgaaccatatacccacatcaaaatctaagatccaccgataaatctgaagcaaaagaaatcaaattcaaagctgaagcaaaagaaatcaaagccgtgatccagcgataaatctgaaatcttttcacgtctgagcttggaaatggataaacatatggacagaattgaagctaaaaccttgctagattttgataaccaccaccatcaatgaagcatatggacagagagcttacgtaaccaaaagagagagacatagaaataaaaaagatgagctttttcaatcgtgtcgaatggttctactacacttctcacttctgagttaatggcagatttttgtggtctaattgttaaactgagttcaactcgggatgcgggttacccggatctagacccgttagggattttaaaacgtcaccgtttttgaatttacctttctattttcatcacttgaataaaaaaaacaatataatggcgggaatttgagagactcgtcgctaatttacgcgcgtttctcgggtccggcagatttcgtacgccgtcgtcgtcgatctacttcaatttctataattcgccactgtactacattggggttttccttttccggcgttctttagccacaagctcactgaaatttcagtaaagtttcaaaatttccctggaaaattgtaggattagggttttggaaatgggaacgaaagtctcagacgatcttgtttccaccgtcagatcagtcgtgggttccgattactcagatatggatataatcagggctttacacatggcgaatcatgatccaacggctgctatcaatataatcttcgacactccaagtttcgccaaacctgatgtagccactcctaccccgagcggctctaatggagggaagcgagttgatagtggattaaagggctgtacttttggtgacagcggaagtgttggagcgaatcatcgcgtggaggaagaaaatgagagtgttaatggtggaggagaagagagtgtttcagggaatgagtggtggtttgttggttgttctgaattggctgggttatcgacatgtaaaggaaggaaattgaagtctggtgatgaattggtgttcacgtttccgcatagtaaaggattaaagcctgagactacgcctgggaagcgcggttttgggcggggaaggccagctttgcgtggtgcttctgatatcgttaggttctctacaaaggattcaggagaggtgtgtttcacatcttttttatttgctatgttaagtttgttagatgggaattgttaactaactatgatgggctcttgtggtagattggtagaataccaaacgagtgggctcggtgtcttctgccacttgtgagagacaagaaaattaggatagaaggcagttgcaagtcggcgcctgaagctttgagcatcatggatacaattcttctttctgtaaggtatgcatacaaaacttttgtgttcccgtttacaatttcaggatagatgcattagtgtttgaagtggtgtgagtttgtttttgaaacagcgtgtacattaatagttccatgtttcaaaagcatagtgcgacttcatttaagacagctagtaatacggcagaggaatcaatgttccatcctctcccaaatctctttcggttactcggtttgatcccctttaagaaggtaatggttattccttgcctataacttgatatgcggattcttttatagattgcagtttgtagttcccatatacttctcatatgatgtgactgaataatcttgagatgacgaagaaatttttccattcttcatcatatttaggcagagtttactccagaggatttttactctaagaagcgacctttgagttccaggtaaatattacttattatattagcatctta

SEQ ID NO: 35768 - DNA, 4377 bp, Arabidopsis thaliana landsberg
tgaccactggacatatacaaccactaacttttttataatttttttttgattaaaacagttgttacgtgcttacgttatttcttccattaatttcgttaatataacattcattcccattaatttcgtttaaattccatggcaaacaagaaaaatataagaaaaattgttgacataatttttgtttcagcatctatttttatacagacaaataattacaacaaaatattcttcaatattttgtcgccacaaaaaatcaatattcaatgtttattattacatgcgatattttctagaaaaagctataagtcttaaagaaaggttaagagataattatgtttgaagaaaaatctagagaaggatattaaaataagaaatgaaatatcgagaaggcgtaattgactgggcatgtgcactgcaacgtgaccggacttcaaatctgaattcaaatcaatttataatgcttttaaaactggaaagcgacatctggaagttttcaaaactaattaatattttttttctaaaaatgataataaaaaaaccagaaaaagctttaaaataaaaagaaaataaaaaggcaagggatccgtgattccaaaggattcgctctcaccacgcgcctcactatccgtcacatctcacgcgttccttctttctctctctatctctctcccctactatataatctcgtgttcccttcttcccattctgcacctctatcccccacttatttcgattttgccactgattcaaaaaaatacgtttcaccgaacacacaaagaaaaacgtaattgccaaagctatggagaagaagttgttggatataactcggactgactcggctgagaaaaagcgagtcagagacgagtcattcgacgaagcggttcttgactcgccggaggtgaagaggttgagagatgatttattcgatgtcctggatgactcggatcctgaaccagtgagtcaagatctcgactcggttatgaaaagtttcgaagacgagttatcaacggtcaccaccacgacggcgcaaggttcctctaccgccggcgaaactcagcctgatctcggatatcttcttgaagcttccgatgatgagcttggtttaccaccacctccatcgatttctccggttcccgtcgcgaaggttgaggtatacgacggagacggtaacggatttggtacgagcgtcttctgattcgtcaggaatcgacgagatttggggatttgaagatcacgtgtcgaattacggtggtttagattttggttccggcgtcggagatggtggagattacgtggctgttgaggggttgtttgaattttccgacgattgttttgactccggcgatctgttttcgtggcggtcggagtcgttaccggcggaataaataaataacaaactttttttttaattaggtgggaaatgaaacgatatcgttttgttaaagcgtttggctctccctcgcttttttttttaacccgatggttaatatgtattaactaaaattattaggatttaggaaaagttaaatattttgttagtaagggtaatttgctagattagtattagcgaattcgtttgtttgttcttccagatctttttttcatagcttttgttaatgtgaaatttcagaatgaaaaactctctttgtcagtttttattatacgttcagtttcacatatcgaacggtaagtctgatttcattttcagactggtgtgaataagatggcccatgaatcatacgggatatagcccaaaaggccccaaaccaacaacaactacaaattaaggattgggtctaaccgattatgccagattaaaagattggtcaagttaactgttcaatctgtataaataaaatcattaaatccgagaaccggtcaaattaactggaaatataagtaaacctgggattcgttgatttatatatccggttaaggctaccgcgtaaccatacaaatcagttaaatctggtaagtcttttttcacggatacacaaattgagagagagcgcgcgacaaaatcgaacctaaccctaattttgcgattttcccctaatttcgacgatctgatggtgagtgacaagcatgtagaatcaaaccaccgcaaacaccgacggtcgttttcgccgtccgacgaggtctttaaatctccgaagcggcacaagtcccgtcatcaccatcgcaggcatggccaccgtcatcatcgtgatgaggaagttcaatataacgatgatgagaatgttaacggtggtgatcttgatatggaagaaggtgagatattaggaaaagaagggattggggagacattgaagaagaaattagagtccgtcgacgagtttggggatataaaatctggtcaattccgggagaataatctggtctgttctattcgcccttttacttcattttattgtttccggtttgctagcttatcttcttctcggatggtggaatcaaaaggcttttaattgaaagtagggaaagtctagatttttctttcgtaatatgtggttttgtgccatttatcttattataatgaagttcgttcttggtctgtgtgtgggattagataacctgaatgtctcatgcatttgtaagaaatgcaaaagcagttgcactaggcgttcaatggagatgatggctttcccttgatttgtaagagctggatacgcgtttataactatctttcatataaatgtcatgtatgctcatgcttatttattctacgccatatatttctcttgtaaccagtcttttaatatgttgtggcggtgattgcaggggagaaatcagcggagggaaagagaatgtgagaaaagaaaagagatagagcctgaccgtgaaaggagaaaagagaggggaagcgttgatagagatagcaggggagacagggaaaaagattacctacgggatagagacaacgacagaggtaggagtagagataaagccaggtatagtagtagagagagggggagggagaatgaaagagagagacggagtgaaaaagatagggataaaggacgagaattccagagtgatagagagaagcataaaagtcttgatgatggatatggtgaagtgaggcataaacattctggacactcaagacatgatgcggaagatgacttagagttaagaagcccaacttctgtaaatggccatgatcctaacagtggcgatgtcaaagaaactcggggaaatgttgaaaggtatattcacccagaaaaaactttgtcttgtgaatgtttaggttggttataaatgtgcaacaccttttacaatagtgtttgattgtcttatatttgaaacaggaccagaattgataatgatgataaaggtgacgttgttgtttgggaagttgaacaagaagatgaagagctaaatttaatcgaggaaagcaggaggagaacgcaagccataatggagaaatataagaaaaagttggagcagcaaaacggattttcttctcatggtaaggggattatcagttttcttaatgatcattgctctgaacagcgcatgcatgaagaatttatatttgctcatttagtatatgggtgttgttcaaagttgccctttctctactttgtgtgtgtacttgttacatttagtttacattgggtttctgttagtcgacatgggagtagtcattttgttcaaatcttttgtattgtgtaccgaaactatcacttatgagcaacttgagcctttcaagttagtatctgtgggttgtaattcgattagtagaatagtcattagattttattaattgtgtcactgaaagtgtcattcatcttggccaaccctcccacatttacttacacaaatattttatgaatccagatcttgagctagcaaacattcccaagcagtcctctactgtggcagatgttcttggaagtggtactctggggcctgttacttctgcagttaatcaagctaaagctgggttggatattgatgccgtagatggtgaagtcgccaagctttcatcggcagttggggaatcacctgcacagcttgtaatttcagactcagataggacactagcttccacagggcttggggaaggcagcccaaaggtgcgtttgcaaaggaaatttgtttgttggggaatgctttttgtttattttattttccccggtcttatattatgctatatttttaggataaaatatcagatgacatgttcactgatgatatctttggggagtctccagctgatagtcagaaaatggtatgtactcttactcaaattattgaccttgtctttatagagttttctaactctggtttcatctgctttgttttccccgtacatcatctgcaagatactcaagaaatggacttcagttttgtcactacatttttgtagtg

SEQ ID NO: 35769 - DNA, 2674 bp, Arabidopsis thaliana landsberg
agtaacgtagtttctaggaagatacgtttatggattttttttccctcttaatcctaatagattgttacgaaagcgatctgctaaaacagaacttatcaagatattttattttaagagaaaaaacattttaagctgcttatctgatcttggactctgttgcaaaatagttgaaacaatgatttacatgttctgcaatgtttctgaacaatgtgtttgtttacgtgataactgcagatatcattagagactcaagtgataagagtcaacatttctactttcaactgtatgactgaactggatttatttgctgacttcaaggtgatgcgacaaagtcaaatttctgcagaatagcaagaaatgttcatatgagaatcgcaaaaagttcggaaattgcagagaagtgtgtgtgtgtgtgtgtgtatgtgtagatacatacctttggaggagtttgcttcttctagaggagtttctgatgtaatggatgaggaagaaaggctacttgatccccgagcttctgtaatcatagcgaccacttctctcatagttggtctactagctggagaattgctggtgcagaacagtgcaatctttaggacaagagacatttcatgaactgttctcttatcatttgtatctagcctcgcatcaaacatttcaatggttggaatcatgttacggatcgatcgtcgaacccaattgactagatcccctccttgctccagcggttgaactgggggctttcctgttattagctccagaagcacaactccaaagctatagatatcacatttctctgtcaccttcatcgtgtaagcatattctgaaacacagcaaaacatcaattagatatgttagataagcgattgtgggaagaaagaaaactgtgatgttttactcacctggagcgatgtatccgtaagacccagcaacagctgacatggactttgagtaagagagatcaatcaacttagccaggccaaaatctccaacatgagcctggaaccgttcatcaagaagaatgttgttcgattttatgtcgcgatggactatttgaggtctgcaatcatgatggagataacacaaaccctctgcagcaccgagggcgattctataccgagcattccaatccaacaaacagtttttctcacctcgctgtagttgttcgccgaggcttccttttgacatgtactcatacaagagaagatttgaattctggtgatagcagaaaccatatagcttcacaatattccggtgccttatctttccaagagttgatatctcagctctgaaactattatcagaactagctccttcaccgcgagaattcagcttctttacagctatcacctcgccacctgacatttcagctttgtagactgttccacacgctcctctccctaaaaccacgtcttcggaaaagtttctggttgcatccacgaggccttgatatgtgaaaccttttttagggaaatagtagctgtccatgacatctggttttgtttgatcctcaagtgcaacaaacgctggttcccgccgctttattgtccaacagagaccaagaaaagtgataagaaaaaccgacccgattacaatacaagtgattgtcaagatcttttgcctttgcgaaccgttgattaaccaatttagctttgaatcagaatgtgggacaagtggttgacaatggcttctctgagagttacacaaaccatggtttccagcaaagttcgatgaatccatccgctggaacacggctgtgtctggtactgttccgaccaagttattgtttgagatattgcagatgaggaggctcatgagattcccaattgatgcagggatctcacctgaaagcttgttgtcgttgaggtaaagtatctccaacatctgtagatttcctaaactgtctggaatagtacctgagagattattgtgactaatgttgagggagatttgcagagaggttaacttcccgagctccactgggatgttttcagacaagagattgcctcctagttgtaactccatgagccgagtaagatctccaaagctatgaggaatttctccggtcaatctattatcagacaatctcaaaatctccaaatataccaactgaccaagctcttgtgctatgtatccggaaaacttgttgccactaaggtcaagcctctggatagtgacacaactccccaactctttagggatgtgaccagtgagctgattggaggagatgttaaagccaacaatctttgtgagattcccaatctcaggaggaatttcaccagtaaaattgttgttagctagacgcagtctttccaaattcttcagctttcccaggtctgcagatatattccctgataaccagttttggtgaagctctaatgcagtaaggttctgaagattaaataattcaatgggaaggcttcctgttagctggttatcgcctagcattagctttgtcagtgacttgcaggttttcagatcacgagggatgtttcctgataacttgtttgaaccaagactcagaagtattagcgtctgaaatctgcagaagtgggcaggaattggaccagacagagaattggcagacatgtcaagaacagaaaaattgctatagaaaccgattaaaggaggtatctcccgttccagctggttgtcttaaacctgcaggtcgtccagg

SEQ ID NO: 35770 - DNA, 1867 bp, Arabidopsis thaliana landsberg
ttgacggcttaagtcatccacaagtagtttcaacacgaaacacagtaccacaacacacacaattcaagcatattataaattcctgcaaacttattacgttttgtaacaaattacatttaagatttgaaaccaactattatatataaaagctactaaagtacaaatttaacttgaaaatacgtcgaattctgtttttgtttcttaatactactaatcattgcggatatatgtacacttaagttgctgattaaataattaagttaattaattggaaagtaaaaggcaatcgaattttggggtcgagcagttcatgtgcagttgagccaacccacaattacacaacacacaattatgaatcatgatcctagttatgtatacaatatttagttataatgatattagctaaaacgaattaaatatataatatcactccctatgtttgcgcctctttctaagaaactttgatttttattttggttatccaattatttgatcaaaccattattaatcttgtgattagctaataatatgtattcgatgaagttcccttatcgtagtttgtaactgtagtctaggtctttgtagtatagtatactaataaactcggtgacagcaatttataaaattcaagaaacacatgttttttaatattcattctacataatgagtttcttagagctggattgatatccaacttttactcattcaactctatacacattagttgtctttggctctcaatgattatcttttgctaacgtgttactatacatacaatagatcattaagaagaatatttttgagtgtattgtgaagctagtatcatcacaattttaaaatgaataaatcaggaggaattgatttaagtcttggcgtcgaggattgtgtgtgtgaaagagagatagagaattgcttggccgccaaaagaagccattacttgccaactagctagcttcactactcaacctaagcaaagcatatactttataaataaataaataaaatcataaacataattagtcgtcacccatcatacattcatcatcaccatcctaacaaaaccttttttacaaggcttctcaaaaaccgttaagtagttgttgcaacttgcaaggatcacctaaacaaattataccgaaacttgcacaattgaattccaatattttaaaaacatttttcttttgtcatttgaagcatataaaatggttctgaattctgatataggtgggtggaacagagtcttcccccatatagcaaatccctcaacggctctagaaatacgttttaagcttcacgaggaataagaagatttggaatatatgggcttaacgcaggcctgaactaaatttaaggcccaaccgtttgttcgcgggtttagtccggttcaacattttttttgttctgtttaagagattatatgggcttaaacgcaactaaatataaggcccaccagtttgttcgtaacttatacacgataggatttatttagagatgtcccaaaccagaataaggggaaagaacaaaaccatcttcaaacctaaatccctagatctgaaaaatatctccggaaccagcctagcagtcgatcttgtcaatttatcaccatggaagaatccgccattaaagtaatcttcttctgctttaacctctgtacgtttctctactaattaatggtttctttctgcacaagaaagaagaaaaatatatgaagtacgtatagtagtaggatttctgattagatttttttgttgtaacttagcgtctgaagtcgctggaattgaacgatagtgataaacagtcaacgtaaatttatttacatatatttgtgtgaaattcttgtttaccgtgtgatcatattatattaact

SEQ ID NO: 35771 - DNA, 1511 bp, Arabidopsis thaliana landsberg
ctagatgatttatcaaacataacaaagtcttgatttggtgcttcttttggattgggtagctatgtcgaggcattagtacggaaacacgatgttgatttcaatgtaaggtttctctaacactcggaattagtatttatatatttggtgcttgtatgtatattatatttccccttattgtaatttacaggtagttgtgacccaaatgagtggggaagaccatacatcagaatctatccacttgtttcatgttggtaaaatgaggataaaactttgcaagggaaagacagtgattgcaaaagagtactactctagtgcaatgcaggtaaggatactactttaccccgagaaaattgtcatatttttagtgttacacggtgagatctataatatcataatctttgatgatcatattgagtagctatgtggagtgagaggaggtggaaatgctgcagctcaggcattgtattggcaggcgaagaaaggagtgtcatttgtgatagcttttgagtctgagagagaaagaaacgctgcgatcatgcttgcacgaagatttgcttgtgattgtaatgtaagtatatctaagatggagttagaaactttggtttttggagagagaggtgttgatgtaagtatgaaactgatgtgttgcaggtgacacttgctggtccagaagacagaacagagacgggtcaaagcccttgaagaacggctcttacctaagttgtgatttttagtatccgtaagagcttatttgttttgtagtttatataggttttaggcatttgtttgaattgtacttgtattgtgtgtaaaaatatcgagcagtgaagtaagaggtgatggtgaatctatatgtaacgggtggcttgtgtttattcatttgttttgatcttacttgcccttgaggtaatataacggattgcttgttttggactggatcccaaagcatacaatatattgcaagtgaatcacagccaaaatcctgcaacaaacccgaaaatccatgatcgtcgatcattctcactaaccgatctcacagagattccaatgttaaaaccaaacaacaacaaaaagatagaacaaaagagagagatcatcacaactacatgatcaacaactaaagtagactagggttttgttccttcatgcacaagaaacagttaagttgtcatgcgaaggaagaagagcaaaccacattggtccaccgtccacctcatcactcttccttctgcgaatccagctgcccttagatgcatatcaaatttaacatgtgacaaagtcacaaagttttgatatagtggaactacacaaaagtagtgttatcgcaattgtctcatcaacaaagccaacactaaccctcaaaatcaaaaagctcgatttagaggtttgaaacgcagtttcgaaggaagagaggaaaaaaacgggaatgaatatatatccaagtgatttatgggttttagattccgtcaataaacgaattatgtctttagattagtaaccaaagatttcat

SEQ ID NO: 35772 - DNA, 1600 bp, Arabidopsis thaliana landsberg
aatctcatgaagcagatgagcagttccagtaccaatctggtctctaacttcatatatagatatcgcattcgcgtccaccatgtcactcaatatactcgccgagataacttctgcatccatctaccattaccacataatttatcaaatatcaattgatagagcttttcaaataacaatgtcacagaactcacttaatctcagattctagttctaacttaatgcttcaatttcgtcacagaatcaacaacaaaacctaattcatctaaacaagaaactgtgaaaaatgcaaggatcgagagtaaacctggagatctgcgagaatgatagagagtgagagagccttagaaagaggagagcgaccatcagaggcaagaggaagagactgtaaaatcggaatcgagagcttgagagctttaaagagtaacctagacgaagacgtcgacaaccaaaccgaattcatcctctccgttacttcgttgaaagctccaacaagctccaccaccattttccctcccgctgcctccggagaccgagccgtcgattcaatcgcagtatcctccacctccgacctcggattccaccgtcgacgtcgtcgctgaatcaattgaatcgaataaagacgacgatgcagtacctgagatctgcatctcggaattggaatcggagaaggacgaatcacagacatttgagaatttgagattgattttgaaaattgaggcaaaattttcatgtaccgttttgtttttgttttatatgtcgcaatggataagccacgtaggattttgtttttattatcgtccacatattataaaaagagggaaataaataatattgagactctctttctgagatagaggctttggttatcattttgtcgcccatctaaaaccctacgcaaaagccttgagagttctggtttctgcatctctctccttcttcgtttagactttagccattgaaggtcgcttcgattcgaaatcatggcggccgtaccgagaggcctcctttctcgaatcaatcagtttctatcaatacggtctataactccttcatcctctgaatctcttcctcattgtagtagcttctttctcctccgacgattcagctccgatactgggttgatggacggtggtggatctgatattatcggggctcagacccgaatcattgaggcgaaacaaggtgagatgtctagtagatccaagaggactgggatcatcgccgttaagtgtgggatgactgcgctctgggacaaatggggaaagaggattccgatttctattctttgggttgatgataatatcgtctctcaggttaaaactgttgagaaagaaggcatttttgcgttacaggtaactccatcgcagtttactcattcccattttggccatgtagtttgtatctcctggatttattgatagggctcttagtggtaacttgatcaatcaatcgattgctgtaactttatgtgtgggtttatgaagctcatggtttagtaatttgtttggcatggggtggactgttagcatggatcggatgtggccaaatgaacactcgagcattcgtacacatgcggctaatgcttacaatttagagtaca

SEQ ID NO: 35773 - DNA, 4521 bp, Arabidopsis thaliana landsberg
acattgcaaataagtcctcacactaatgtgagaaacgagactataactcaacaaaagaaatatgatttataatagtttaaaatattattacaaaaagttagtgataataatgtaagggcaaattatttcccagtatctacatggatattttagtttgaagttcatcgttgcataatttttacagaaaaagatggaaacaacttatttttgaaccctaaaaaaagtctcagtacacaagcatgtatcatttcccctaaaccaatcctaagaaataacaaattgcgtcaagtaacgcagattataccgtatagcattagcaatagttcttcgaagattagtaacctcatgtaagacgttacgttagaagtcctagtcagagttagagaaaataaagtgattaaaggttgagacttgctgaaacataaaagtgacttctctgacatgttcacgtcattatcgacttgtggtttctcaaccaagtccatttgtcagccactagatcagtttctttttttgacaacataaactattggatgatgaaatgaatcagtaatgatctattttttcagttcagttctgtagtagttatataactatctgaatttaaggtcttgattgtttcttttttacttgtgattcttttatgttaattagtagaatggttcatctttttttcccaatttttgtttattttcctattcatactatgaaaatgtcactaatttaagaccattgaattattttctacacgctttagtacattactttctactaaactaatacttacgatttttaagtaatcataattacaagcaaagtaaattgatttgaaaacgtttcatgagtattattagtgtataccactcagaatctcgtttatattttgtaatcttgtgtacgcatgtgattgtttgtttacatacgtaaacacaccctgtcaaaaaacattcaacacatgtacacgacacatataatatataattgtttgcaatttcaattaaatatatgtatgaattatgatggacttgattatcgtcagtaactcaaaatacattctatattggattttattttgaatgtaaactgtaattcaccacgaacccacttgctagctaattgctacaatctaccatatgcatgcacatttgatcactagcatctcacgaataaatttcttaatttttttccatctatataaccattataatatttctattaagagctaaagactattgagccatattttactacaaacccgtcttcaccacatctagatcattctgcgaaactacaaaaataatcctagctactttggttaaaaaatcgtttgtaaataatccagagtgattcctaataagagtcgcaatcaccttttttgattatcttgtgcgtgttacatatgtgaatgacgttaacaccatcttaaaaggtacaattcatatgcatgaacaagcaatttgtgaaaaataaaatcttttagttttctatatataactatataataaaactatcaaaatgttattaattaagagtaatttaagactattagaccatattttacatctcttttttacattactatcatctaaagtagttttctagtttttaaaaagatggttgagtctatcataagtctttctgatagtgaatataagagtcacaatcaccttctttttttatatatatatttgtagtgttgattgcgtatgtgattgaagattgacgtaaacaccatttaaaaagtacgatactaaatgcacacgacacaacacaacacacaccagaccggctataaataagttaagattttgctcctcctcttctcatcacttttccaatctctcaacataaaatcccacaacaacacaacccaaaaaaagacagagacaatggcacagcccatgcgcttcatgctcaatcaaatagaaacagaatcctacggcgctttcacccctcaaatccttagtccgctgatcaatcatgcgattccacacactcgagctcaaatctcgggatcacccgtcgtagctgtcggcggaggatcatcaggtcggaccttctttggcgtcaatgtggaattaccaggtctgcctcttgaccactccatccacgccgaacagttccttatcgccaacctcgccctccacttcgagcaaaaactcgaatgcatagccttctccactaacggctcctacttcgaccctccatgtccccactgctgccaacttcttcaagaaatccgaaatgcgtctagtaccaaactcttgatcacggacccatcccgccagcgcgacatgtctctttcgacctaccttccgcaaaaatatttctccctctacaatgaggtcccgaaatacttcttcgctcgccttctcgacgaaaatcgcaataacggcctcaccctcattaatcccaatcccatcagagactgcctagattccgaaatttgtaaccatctaggctgcagggctctaaaggcggctaaccgatcgtacgcgccgtatagcaagtctccgtctggagtggcgctcatggattttcaagggagagtgtacagtggatggagcattgaatctgtggcgaaccctattttgggggcagcacaagctgcactggttgacttcatgactaatggtggcggccacgagttcaataacatagtccgagggtttctggtggagaagagagatgcgaagttgagtcacttggccacggcgagggagattctaaataagatagcccacttcagcttcattttacgtgtcttacattgccagtagccggtgaagtcctcagaataatgtgagaagcgagacgagaactcatccttaaacattaaaaaaaaatatgatcctataagtcctcagaaatatgatacaataattatggcaaatgtaagggaaaatattaacctagttgggctagctattacatttatatcagttatgaaactgaagataataaaataatatgatacatttatataagtgttttcttcttgggttcatggtagtacgttaatagcatcaatgcacttagaaatatcaccttctttgttactgtattacattatttgattgacattgaaccatatatattaatctgaaatgatacatttgtagactctctctcttttttcctaaagcaaaatacagtgtttttttactcatgaatctccatcaatgagagaaaaaagaggattttgcaaacatattaaagtagagactaagtgtacaactggtgaacaatgacatggtctcagaatttttattagtttgaagttcatgaatgaataagtatgacatgttctcatgactcctatttacacaagtatgaaaataaatttggtttagggatataaactctaaacgacgccgtaatattcatcatgggacaatctacaaaaccggcgacgaaaaaaccctaaaatttattttaagcgttaattacaaagtgattatttgtatctcatggattaggtattgcattatttattcacgatgctagtgaaccacatgtttgctgtcatctagagttttgtttaggatatggaagcagtcgacgaaccaccgatgcgcaaacggaaagttgccgagttgatgcacgtagataaatatttgtctctaccactgatttcagggctcaaaccttgagttgatgcacgtagataaatataattctagattctgtgcccttatgacttaccatataactgctgaggctgttgatccatccaacgattcacgtttcactttccagacacgtgttacgagagctacatgtcagaaagatgaagacctgaggatactgactgaagtctgtagaattaaaccaaagatttaaggtgaattgctttatggttttgattagttgattgttctttttgttatcataatgttgctgatgctggaaaatgttgtaaaaaggtactggagacaaaacaaagcgatggaatgacgaagctattgatggtttctacaaaggctatctacctaagtggatatcggatgatattttgatgccatgcagtgagtaagatcagttttatgaggtgcaagaatcagagatccgagaacacaactggcttaatctatacactgaaatcgcattatactcgatgtgggaaggagacatgaggctcgagtctgtgccgctgcagataatgaaggtcattgtagagactcgtgaagctgtggagtcaaatgaaaagttgatggctgggaatgcaatcttctacattagtttcaaatacttgaatgctcctcatggcccacctcaataccacagagccattgtaagaagaaccgttgatgggattccaggacatgtttctcttgagttgaagtgttggctccatgatctgtgaaaagagaatccagttctcgaagaaaagtattatcgtcaaatttgcgaatctggcttcagattctttatatgacattgttattagtgttgagagagtggcacattctttataaacaagatttcagaagttcccttgtcttaatcgaagaagtagtt

SEQ ID NO: 35774 - DNA, 2707 bp, Arabidopsis thaliana landsberg
ttcaagttactgcgatctaatctcattcctaaaccagggaccttgttgttgattttcaaatagattgcttcatctggttggacacggatcacaagctcatttgtagcttgatcaagatcagaaccagtattccggttatacaaattccccggaacatgcctgaactgcacccttatctctgcactgtaattttacttatcagtaagagtcaatatacaaaattccacaagtgcgaagttctaggtacctacctcctggtgtgtagtgctttgcccgctttcattaaaaagggcacaccgtcccatcttgcattgtcgatgaaaagagcagcagctgcaaatgttggagtcagactaccttttggtacagttttatcatcggtgtaggcaggatatgtgactcctccctttgtgtggctcttgtattgtcctattaccacatcttcaactcgaattggcctcattgaacgtaacaccttaacctgaattgtgcatgagactttcattatatgttttcttgaatcaaacccaaattgcaaagtgaaagaaattatcataccttttcatttctgatatcctctgcatccaaactaacaggcgtttccatggcaaagagggctaagatttgaagcagatgattctgcattatatctcttattattccgtaattgtcaaagtacctgaattaagcaaaagagaacaggaaggaaacataagctttcaatacagaagagacatgaatagctagataatggtaaacaggcactttaccctccacgtccttcagtgccgaaatcctcagaaaatataaattgcacgttccttatgtactgccttgaccatagcggctcaaatataaggtttgagaatcgaagaacagataagttctcgactagctcctttcctaggtaatggtctatcctgtaagaacacattttcattatcatatcagccaagcaaccaatagtatcatcattgcaacaaaatatcatatcagccaagcatccaatagtattatcattgcaacaaaacaaagctataagtgcatttatctttcacctaaaaatttgatcttcctccaaatactgcttgagggatttcgttaaagcagccgaggtttcagaatctcgaccaaaaggtttctcgacgataaccctagtccatccattgacagatgaagcagaagtgcttgcacatttcacagcatctacaaatatatttggagggatagacaaataaaagaggcggtttgagattcttccagcctacagaaatacaaaggataagaaccactatgtaaaagaagtagactccaattttctagtttactgatttgaagagaacaaatgttcaatacctcatgttccttgagcttcttatccaattcagtaaaatgttcctgagaatcatactgaccagaatggtaaaaacatctcttgagaaattcttccatcttttcaccacagtttgccctgaaatccaaatggaacaatgacataatactcagagttaattatcttcaaaaacccatatccaactgaattgaagcataaagacttgtcttgacaaacaaaaaccggaaacttttcagtagctacaattgctaacctcttatcaattctgcaagtgagggttttgctgaccatgtttctaagttcaacatctgtcatcttactcctagaatatccaaatattgtaaaatgctgccacacaacaaaatcaaattgtcaatcactagactttaatgtgcaaaacacacacacaggcgatcaaaatagcaaatcatagagaagaaaaccatcttcttggcaatacctcagggagacaaccttcatagtaaagggcgaaaagagccgggaaaatcttcttcttagcaagatcaccagaggctccaaccaccgtaatactaactgttgactggctttgaccatcagattctactccaaccttggctgcttcttgagataaagctgatagcacctcatctttcaatcccttaagagaagttttactctctgatgaatttgaattagtgactattgcacctaacacccaatccaaatgtcagaacaacccctcttctactgatatcaatatcacatttaattcacatatacacctaattgcctaatgaaattgtattcagagattcaagtgcagttaataaataagcttggttttagatttggtcaattctaatccggaaaacaaagatagaatgaaactaaccatcttgcataaagacagaagcacgaccagacttcctctggaatctaacacagaggtcaagaggattcaatccttgaggagaagcagacaggaacgagagtgatcgatgtcggtcaccgttaaccggtgagaaagaagccaaataaccggaatgatatgatcgggtggtgacggaggaagacaaagccgccatcgtcaaagatacaacagagagatggcaaactgaattgttgtctaaagatgagatttttagttaaaaaataatgatgaacataagaaacatcgaagaaggatttaaggggcgatactgcaaataagagaaccttttgagatctcccaaagggtaagtcttttgttgtctaaacaaaatgctcactggtgtggctggatggctacgttatgaccctctgctcacaaaaatatttttaatttaaccaatacctaaggggaccttgtgcttctcttctatctattttttt

SEQ ID NO: 35775 - DNA, 955 bp, Arabidopsis thaliana landsberg
agatatacatactattataccaaagtatttatgttagttgtgatttgagaaaacttaatttaagaagaaattttgggtgacttgtgtatggttcaaagatatatttactattataccaaagtatctattttttttttgtctaatccctagctaggtgtatatatattctactctagtgattcaaaaatattacatttatagggagaaggtgattatcgtgattatcccaaatgacttcttcaaatctttctcctattactatatctcaataataactgtatatatagaagaaaaactaattatcaaatttctctagttcacaggttaatgaaaatgaaattggggtgtgcacttccaatgacgtgcatgattttggcatgctatattatttgtgggagccttctaatgagtcattgccatggtgttatagaagaagcaaagacattaaaaagtaatgaagatcttgaaatagagcacaaacttaagcttatcaacaaacctgcagttaaaatcgtaaaggtttatcctctcaccatgttatagaataattgaatgtgtttatatatatttctaacattagaatccatatcctaagtattctcggatctctataaatattaacacgatataagttatgaaaatcatgtgtgatacattcactaacgatcatgaaaacataataatagattttcttatttatgaatctatagatctattagctggtgaaaggtatcgctgctgtggatatctacaaacacccaggacttgaccactcatccatgaagaaccacgcatttgaccctaaggtattgtagtaataatataaattatcttgagagttaccagtatttatactctatgtataaaaaaaaaagatggtaattgaaaaactgacaactgaaatgttcgtatccattatttgattgctgcatcaattgtaatgagataagttgcg

SEQ ID NO: 35776 - DNA, 6818 bp, Arabidopsis thaliana landsberg
agggactaacgagcatttttatttgttttatgtttcaaaaatgacacaaaacaatcgctaggggcggggtttttgcgacgacaacagaacacagtcgcattatgcaaccaataagctacttattaccaacgctagagttttgaatttcgaaatttttaagttcttgtatgtttatatgttttcttatacgttgaaactttaatttgatcgatattatatataaaaacataaccaaacacttcaaatctgaatattacaaaccaaacattcaaaaagacctaatctacatgataaggttcatgtgaattcattttcatgattgatcttttcaaacaagttctcaaataagtttgaaaccaatcatttgtatacgtaaagttctttatgtactaaaatggttgtttttcagtaatgtttatctatagaatggatcaaactatgtggatttcaaaagtttgtcttgtgacctattccaaaatgtcacaaaacagtcgctttgtgcaacttttttgcgacgacagcagaacacagtcgcacgttccaacgtttgtgtaactgttttgtgactaaattgcgacgattgtgcaacgttttaaaattttgttaaatttattaagtgtttctcgagtaaatattgtgcgaccgaatagggactaacgagcatttttatttgtaaaatgtttcaaaaatgtcacaaaacagtcgctaggtgcaacgtttttgcgacgacaacagaacacagtcgtactttgcaaccaattagctacttattaccaacgctcgagttttgaatttcgaaatttttaagttttggtacgtttatatgttttcttatacgttgacactttaatttggtcgatattatatataaaaacataaccaaacacttcaaatctgaatattacaaaccaaacattcaaaaaaacctaatctacatgataaggttcatgtgaattcattttcatgcttgatcttttcaaacaagttctcaaataagtttgaaaccaatcatttgtatacctacagttctttatgtactaaaatggttgtttttcagtaatgtttatctatagaatggattaaactatgtggatttcaaaagtttgtcttgtgacctattcaaaaatgtcacaaaacagtcgctttgtgcaacttttttgcgacgacagcagaacacagtcgcacgttgcaacgtttgtgtaactgttttgtgactaaattgcgacgattgtgcaacgttttaaaattttgttaaatttattaagtgtttctcgagtaaatattgtgcgaccgaatagggactaacgagcatttttatttgtaaaatgtttcaaaaatgtcacaaaacagtcgctaggtgcaacgtttttgcgacgacaacagaacacagtcgcactttgcaaccaattagctacttattaccaacgctcgagttttgaatttcgaaatttttaagttctggtttgtttatatgttttcttatacgttgacactttaatttggtcgatattatatataaaaagataaccaaacacttcaaatctgaatattacaaacccaacattcaaaaagacctaatctacatgataaggttcatgtgaattcattttcatgattgatcttttcaaacaagttctcaaataagtttgaaaccaatcatttgtatacctacagttctttatgtactaaaatggttgtttttcagtaatgtttatctatagaatggatcgaactatgtggatttcaaaagtttgtcttgtgacctattccaaaatgtcacaaaacagtcgctttgtgtaacttttttgcgacgacagcagaacaaagtcgcacgttgcaacgtttgtgtaactgttttgtgactaaattgcgacgattgtgcaacgttttaaaattgtgttaaatttattaagtgtttctcgagtaaatattgtgtgaccgaatagggactaacgagcatttttatttgtaaaatgtttcaaaaatgtcacaaaacagtcgctaggtgcaacgtttttgcgacgacaacagaatacagtcgcactttgcaaccaattagctacttattaccaacgctcgagttttgaatttcgaaatttttaagttctggtacgtttatatgttttcttatacgtggacactttaatttggtcgatattatatataaaaacataactaaacacttcaaatctcaatattacaaaccaaacattcaaaaaaacctaatctacatgataaggttaatgtgaattcattttcatgattgatcttttcaaacaagttctcaaataagtttgaaaccaatcatttgtatacctaaagttctttatgtactaaaatggttgtttttcagtaatgtttatctatagaatggatcaaactatgtggatttcaaaagtttgtcttgtgacctattccaaaatgtcacaaaacagtcgctttgtgcaatttttttgcgacgacaccagaacacagtcgcacgttgcaacgtgtgtgtaactgttttgtgactaaattgtgacgattgtgcaacgttttaaaattttgttaaattgattaagtgtttctcgagtaaatattgtgcgaccgaatagggactaacgagcatttttatttgtaaaatgtttcaaaaatgtcacaaaacagtcgctaggtgcaacgtttttgcgacgacaacagaacacagtcgcacttttcaaccaattagctacttattaccaacgctcgagttttgaatttcgaaatttttaagttctggtatctttatatgttttcttatacgttgacactttaatttggtcgatattatatataaaaacataaccaaacacttcaaatctgaatattacaaaccaaacattcaaaaaaaaactaatctacatgataaggttcatatgaattcattttcatgattgatcttttcaaacaagttctcaaataagtttgaaaccaatcatttgtatacctacagttctttatgtaataaaatggttgtttttcagtaatttttatcaatagattggatcaaactatcgtggatttcaaaagtttgtgttctgaagttttccaaaacgtcacataccagtcgctctttgcaacttatttgcgacgacaaaagaaaacagtcgcactttgcaaccaactaccgacgtattacaacctctcgatttttgcatttcgaaattttaaagtttggtatgtttatattttctcttagacattgatactttaatttgatcgatattagatataaaaacataaccaaacacttcaattcggaaatttacaaactaaacattcaaaaaaacctaatcaatataataagttccatgttctttcattttcatgattgatatttttaaacaagttctaaagtaagatacgaaaccgatgatttatatacctaaagttctgtatgtactctatataactaaaatgagtgctttcagtagtttttatcaatagattggatcaaactatgtggatttcaaaagtatgttttctgaagttttacaaaacttaatagaacagtcgctctttgcaacttatgtgcgagaaaaacaaaaactgtcgcactttgcaaccaattagctatgtcttaccaaccctcgatttttgcattttgaaattttaaagtttaggtctgtttatatgttttcttagacgttgatacattaatttgatcgatattagatataaaataataaccaaacacatcaattccgaaattttttacaaactaaacattcaaagaacctaatctatatcataagttccatgttctttcattgtcatgattgatatttttaaacaagttctaaaataagttacgaaaccgatgatttatatacttcaagttctatatgtactctatatctgtaaaatggatgcttttcagtaatttttatcaatagatatgatcaaactatgtggatttcaaaagtctatcccctgaagttttccaaaactttaacataacagtcgctcttgcaacttatatgcgacgaagacaaaaacagtcgcactttgcaaccaattacatacgtattaccaaccctcgatttttgcattttgaaattttaaagttttggtctgtttatatgttttcttagatgttgatactttaatttgatcgatattagatataaaaacatgaccaaacacatcaattctgaaattttttacaaactaaacattcaaaaaacctaatctatatcataagttccatgttctttcattgtcatgattgatatttttaaacaagttctaaaataacttacgaaaccgatgatttatatacttcaagttctgtatgtactctatatctgtaaaatggatgcttttcaataatttttatcaatagatatgatcaaactatgtggatttaaaaagtttatcttatgaagttttccaaaacatcagaaaacagtcgctctttgcaacttatttggcacgaaaaaagaaaacagtcgcactttgcaacaaattacctacgtattaccaactctcgatttttgcgttttgaaattttaaagtttggtctgtttatatgttttcttagacgttgatactttaatttgatcggtattagatataaaaacataaccaacactccatttctgaaatttacaaactaaatattcaaaataacctaatctatatcataagttccatgttctttcattgtcatgattaaaatttttaaacaagatctaaaataagttatgaaaccgatgatttatatacctaaagttctgtatgtactctatatcactaaaatgggtgcttttcagtaatttttatcaatacattggatcaaactatgtggagttcaaaagtttgtcttctgaagttttccaaaaagtcacaaaagagtcgctctttgcaacttatttgcgatgaaaaaagaaaacagtcgcactttgcaaccaattacctacgtattattaactctcgatttttgcgtttcaaaattttaaagtttggtctgtttatatgttttcttagacattgatactttaatttgatagatattagatataaaaacataacccaacacttcaattcggaaatttacaaactaaacattcaaaaaaaaaatctatataataagttccatgttctttcattgtcatgattgatatttctaaagaagttctaaaataagttacgaaaccgattatttatatacctaaagttttgtatgtactctatatcactaaagtgggtgcttttcagtaatttttatcaatagattggatcaaactatgtggagttcaaaagtttatcttctgaagttttccaaaaagtcacaaaagagtcgctctttgcaacttatatgcgacgaaaaaagaaaacagtcgcactttgcaaccaattacctacgtattactaactctcgatttttgcgtttcaaaattttaaagtttggtgtgtttatatgttttcttagacgtgaatactttaatttgatcgatattagatataaaaatataaccaaacacttcaattcggaaatttacaaactaaacaatataaaaacctaatctatataataagttccatgttctttcattgtcatgattgatatttttaaacaaattctaaaagaagttacgaaaccgatgatttatatacctaaagttgtatgtactctatatcagtaaaatgggtccttttcagtaatttttatcaatagaatggatcaaactttgtggatttcaaaagtttgtgttctgaagttttccaaaacgtcacatacctgtcgctctttgcaacttatttgcgacgacaaaagaaaaatgtcgcactttgcaatcaattacctacgtattaccaactctcgatttttgcatttcgaaattttaaagtttggtgtgtttatttgtttacttccacgaggatactttaatttgatcgaaaacataaccaaacacttcaaatgccgaaatatacaaactaaacattaaaaaaacctaatctatataataagttccatgttctttcattgtcatgattgatatttttaaacaagttctaaaataagttacaaaaccgatgatttatatacctaaagttctgtatgtactctatatcactaaaataggtgtgtcagtgatttttattaatagattggatccaactatgtggatttcaaaagtttgtcctctgaaggtttccaaaacttaacataacagtcgctctttgcaacttatttgcggcaaaaacaaaaactgtctcactttgcaacccattacctacggattaccaactctcgatttttgcattgcgaatttttaaagtttggtctgtttatagtttttcttagacgtggatactttaattggatcgatataagctatgaaaacaaaaccaaacacttcaattctaaaatttacaaactaaacattcaaaaaaaccttatctatatcaaaagttccatgtttttcattgtcatgatcgatatttttaaaaacgttctaaaataagttacgaaatcgatgatttatatacctaaagttgtatatgtcctatgtatcattaaaatgggtgcttgtcaataatttttttatcaatagattggatcaagctatgtggatttcaaaagtttgtcttctaaagttttccaaaacgtcacaaaacagtcgctctttgcaactgatgtgcgacgaaaaatgaaaacagtgggactttgcaaccagttacctatgtattaccaaccctggatttttgcattttgaaattttaaagttttggtatgttgatatgttttcttaaacgttgatattgtaatttgatcgatattagatatagaaaca

SEQ ID NO: 35777 - DNA, 1058 bp, Arabidopsis thaliana landsberg
aagcttgtcatccagtatgcagacctgatactctcaagagcagccttctgcaagtccggattagtattctgaaccatctcaacatagagcttaaggttctgctttagttccaaatcctcttaagactacaatcacaacccaatgtaagtcgagtcattagtcctgtgaacatatataaaaaaaaaaactctcctcacatcacaagttagcaactttttaatccggctagtctaatgacgaacaaaacactcactttgaacatgcttattgatttgtttttgtatatctccttatgctttgtaaaaccacgtacaatactgtaattgatatgttctcgtaataagaaaagaatacgaacccacttagtcttcataattagattcatcatatcaaatcaaagatgaaaagatttattacaaaaataaaccaaattaaaaccgataaataagtttttttctactacaaacacaacattccaattgccatggtgattaaacagccaaaactaaaaacgattaccatcttaatttccttcttcttttggttcctttccatcagatcgctttccatcctctcttggttcctttccatcttcatcactctaacttcttcttcaagaacagagatttgaaatttcaactgttcaatctcatttgtaaaagcctcatctacccacttaaacacatggttgccgttcataagctacatttttgaaattgtaaaagttgttaagatttcacccatcaaaaattttacaacccatcaaaatgagatttacccttctttctgcagcaaaaacacaccggtaataacgactttaaggatttggatcagatatgtgtattatttgcatgatttaggcattcattcttcaccatttcatcattatttcatccacatttcatctcattagtaatcattttagtgtgttttgcatacttaggacgattttacattaggattgcatgtgcattgcatatttgtttgttttaaggttctttggatgttttaagagtcaaacagaggataacagaacagaaagtcagaatgccaataca

SEQ ID NO: 35778 - DNA, 1735 bp, Arabidopsis thaliana landsberg
gtttctacacattttatagtcaggggtcgtaagaaaggattgatctttgtggctgtagctatatgttgtgctattactagcttcatttttctcggtgttgggttaaacagtctgattcatggtggtaatgacgtcaatgagatctcttgggttgcttgctttgttgaagggatcgtttgggtttcacttgcggtttcgttgcttgttaatggatctaagtgggtgaatattcttgtatctgtttggtgggtgtcttttgctttgttggatttagctgcaaagagtgggatacttttgcagggaaatggtatccgaatcctcgacattataaccttgccaatgagtcttttgcttctcctttgttcatggatgaatttgagatcttcttctgcagcagctcaagattgtagtgtaacaggactttctgatcctcttttaactaaaaatcctagaaaagaatcggcgaggttagcaacagctggatttttcagcattctatctttctcttggatgaatcctttactctcgctgggattcaagaaaccattatcccctgaagatatcccaagtgtagtcccggaggatgaggctcaattagcttacaagaaattttctcaagcatgggatactcttcttggagatgaaagctcaactaaggattttttcttggtgtttagagccgttgtgaaagtttactttaaagaaaacattttcatagcagtttttgcatttctcagaacacttgctgttgtttctcttccattaatgctatatgtctttgtggattatgcaaacagtgaccacagggatctccgcaatgggttcttcaacttagcttgtctagttatgctgaaactagttgaatccttgacaatgagacattggtattttgcatcaagaagatcaggaatgaggattagatcagcgctaatggtagctgcatacaaaaaacagctaaagctatcaagtttagggaggaaaaggcattcatctggagagattgtgaattatatcgcggtggatgcatatcgtatgggagaattcttatggtggttccactcgggatggagcctttcgctgcagcttttgctttctacagctgtactttttggagtggttggtgcaggagcttttccaggtttaattcttcttctcctatgtggtctgctgaatctaccatttgcaaagatgctacagaactgccagacacagttcatgatcgcgcaggataagcgattgaggtccacctcagagattttgaacagtatgaaagtcattaagctgcagtcatgggaagatgagttcaagaaaaagatagaatcttctcgtgatgatgaattcacatggttggctaaagctcagctgacaaaggcctttggttctttcttgtattggatgtctccaacaatagtttcttctgttgttttcttgggatgtgctctattgaagagtgcaccgctgaacgcaagcaccatcttcacggttttagctacactaagagttatgtcagagcctgtcaaaattatacctgatgcaatttctgctatcatccaaggcaatgtctcgttccaaagattaaacaactttttgcttgacgacgagctaaagatggatgaaatcgaaagaagtggtctggatgcatctggaacagcagttgacatacaagtaggtaacttcagttgggaaccagaaactaagattccaactcttcggaatatacatctggaaatcaagc

SEQ ID NO: 35779 - DNA, 1581 bp, Arabidopsis thaliana landsberg
  unsure (1)..(1581): unsure at all n locations
gcgacggacctaattcggattctgttaaaaccggtcttcctgctaaattagatcctttggaggatcttattgcataggcgatttcatcggtgtagccatgtagttagatctaatcggagttgatccgacgatgttggatcgtaacggagtcgatccgaggatgttagatcttctcggagttgatccgacgccggtggatctcattggacttgatgaaaccatgttagatctgatcggagtagacgcgacgatgtttgatctcaacggcgttccgtgtcttgacaaatatggtgaagcgcggctgcttgtacggccatagtctctcggcggtcttggtttctcgatcattggcgttgatcttctcggagttttgcgtgaacgatcgtttgatcgaaaaggtgattgatctatgaaatcaggatcgtgttgtctttcacttcttggccgcaacacattgtgattgggtgattgatctatgaaatcaggctcgcatgaatcggatccctgacttggaatctttggggattgataaggaagtgcatactctatcgattttgtctgttcggaatctgaagtcactgaatcgtgtcccgtcgttgtaggtacagtttccgattctgcgctcatcaacgcgctcgctggcttcctattagctacacggcttcgctcaactctgcttagaagatcggaaacgaccattgaacttgtatcgctccttgtacgacggagcattggcggtctcgagactacggattggtattgtttagaagatggtgattgtggattctttgagcttcctttgaagctattgagatgcaaatgttgtagatgatgatcttcttctccgagcaaatctctatatcccacagnnnnnnnnnnnnnnnnnnnntaaagcggcatactccgcatagaaccatcaattaatccaacaccaatgttcaaaatcccctgaggtcgacctgaagtacgacgaacttgaagcgcaacaaatctcattcctggaggtggggtacgacgatattcattgttgctggttctgtatcctggacggcgattaggaggaatgaggttgctaatgaggacacgaactgttcctacatgaacatctcggaaccaatgcaaggcgtaaatttcgataaccactgctgaagtatcagcgtagagaaattcggcgttgagtctgaatacgaatttgtcgttccaagttgggtttgttccgccattatagtcgacacgggtggtaagtttacgttcggaatgaacccaagcaaccgcataagtctttgtcttgcgtgcgacgggagccaagtcttgagctgatattatgttaagttctagcaactgaaacgatgggaacatcatcgacattgtgcatcaatagagtgattttacattaaaatctttttgttagattcgaggggacggagaattgcgagagggagaatgagatctctctcgcaattctcaattctcaattgaaaattctgagaagtgaatgatgaatgaagaacaaggtagattgtttgattggctggtggcaatttcccgaaggagggagaaaggtcataataaccattttgc

SEQ ID NO: 35780 - DNA, 1494 bp, Arabidopsis thaliana landsberg
ctgacatgttacccatatctaccttcttcaagcaaagcatggagtgggagacaattcatgtggtctcttatttaattaaagttgcctcttaattactctctattgacaacttattatgatactcctacttagataagttaaatgtatcatttgattataatctaatttattttaaggaagtcttcagttctgttagttatatttaacgcttcagtggtatattacaagaatatctgtactcgagtaaatattttaaaatatctatcacagaacattggatctttgaatgtgggcatgggaggatatagaaatcgttcgtcatgtgctagtaattgtattgttgacttgaattgaatttgtggatatatatcccgattaacaaattgaaacaaacatgtaaagcaatgtataaatggtaaaagatagatgtaagtttatcaggaaatgcaaaccatcaattcggatataggagtttaaaagtctaatcgaaagttttggagagactaaaatctattacacccaaaaaaaaattgcgttgaaccgttttttttttttttttttgggtttttaaaactaatttaattttcataccacgtcataaaaattatattctcagagtataaatttgtatactatgaataaacatactgaaaatttatgaagtgggaataatagttgcaagtggggtgcgcatttggtcaacctttgtaagtaagaaaatacaaaggagagagaattgtgctatcataattttccacattcttttttttttctttcaggaaaagaattaccaagaaaataaaatcatttcttttaaataatataaatcattcctttgattaataactattagccatccacccacccatcaatttcttaaaaatataaaataaaaaaaatacttttcttctccttcttaagaagccccattggcttcatctcctcccattatcttctaaactcatttccttttcctctcgaaatctcaaagatagataaattttaaaggcatatttttttcatttcgactcagatgggttttgatgatacatgcaacacaggtcttgttcttggattaggtccctcaccaattccaaataattacaatagtaccatcagacaatcctccgtttacaagctcgagccgtcgttgactctatgcctctcgggcgatccctcggttaccggggagtgaccggagctgaccagctatgccgtcagacgtcatctcacagcggagtctcttctttctcaagcgggagggtggtgaaaagagagagagacggtggcgaagagtcgccggaggaggaagagatgacggagagagttataagtgattaccatgaagatgaagaaggtattagtgctagaaaaaaacttaggcttacgaaacaacaatctgctcttcttgaggaaagcttcaaggatcatagcacccttaatcccgtaactacatatccttaatcctaattcttttttattatacgttactag

SEQ ID NO: 35781 - DNA, 764 bp, Arabidopsis thaliana landsberg
actatatatatatgacctaaaaactcagggacaaataattcaaatagagaagtcttcaggggcaaatttccatttctgtaaacttgaaagcgtcatggacttctctgggcaatcgacactctcatctgaatctgaaagtgaaattgtccttagcctctttttccttagcttttgctcgaaaatgtctcctcatctccattgttgtccctctccatagagtacctgaaaagactcaaaaaagactttagatataacaaaagacttaaaatcctatatttaaaacatagttaaaaacaataaaaatggagttatatcaactcccccagacttaatctttgcttgtcctcaagcaatacacaaaagccggatccgtggaagaagttttgaaaacaaaggaactcccaacattctctagtctattgccatgatcattcaaactaaatcaatatgcttaacaagtctaatcaaatcctaaccaacatgtacttctctacaagcttacaacattctatattcaatacctaaattccacaactatatctaccaggctttcatcgctgggtctcatcaaacaagctaacattcaagatccttttagactcattcatgtactataccatgataaatcgaccattctcttatttttttctttggtattctttctctctcccagacttattctttttaaatagtaaacaaaggggaacttgtatactggattgacaccctcgtaatatataataatggggtcattgagaacattt

SEQ ID NO: 35782 - DNA, 6317 bp, Arabidopsis thaliana landsberg
atacatgtttacattttgatcacattgtttttaaccatttgtgtttcttatgaacaagattcactgcctttgataatgtctatcaaaatggatttggaactacttaaattgggtgattatggttgtttgagtcgtatcagttactgcaaaacccataagcagaaaacgaaggaacatgatttgacctagaagccatttgtagttccactaaacaatgatgaagtaaattttcataacagtactgatgaaaagatagtcattggatacactagcttactttcttcagtactactgtttgggttagttacataactaaggcaaaattctcttctggctgctgatgatgattccttcccgcttctgatttgggccttttctgtataagtccttgagctatggcacaacaaaactggattctggagcagtcccccttgatgttcttttacctcgacaaaagccgaacaaacaaagatggatgaaagctatgactgtcttcttcatcatcctcatcattatcatcatcagtactttacaagtccagcaccttgagcctttccaataactgactctatggttccatcaaagagatcaaagcttttcgcaacagcaaaacccgaaaacataccatccactgcagcacttacaattccaccagcataaccagctccttcaccaactgggtatagaccttttaagctcgtactctcgtacgtctcattgcttcgaggtatccgaacaggggagcttgttcttgtctggttaaacaaagttgaaacatgttgttatctctggtctgaagagtagactgattcaggacaaggaagatatataacatacctctacgccgtggaggagtgcttcctctgagatgaatcccggtaactgaaaattcaaaagtttagagaaaaacagaagctacaggtttgtttaccatatgtagtgatgagaaaatgtctaaccaacctccttttcaaacatagagatagactctcgcagagcctctgtgatatgagcaggaaacagttcatgcagatttgcagacttcactcctaatctatagcttgatggaggtaaaggtgtttctatttaacagcacaagagtatccataatcaccacaaaacgaaccaacaaacaaaatttgaaccataaaagtgagaactaagtattaaggaaaatgttactaaccagatagcttgttttgcagaaaatcagtaaccctttgtacaggaactgtaaaatcgccaccacccattatggctgctcttctttcaaattctctctagagataaacaaatcaaaggagaaatattgaatttaactcatgagtactaatagtaatccactttcagattgatacctgaaactcaattccagctaagggtcctttaagattgagaacatcaaaatcttttgctgagactgtaacgacgagtgcagcattggcccatttggatgaacggcgagaaaatgacatgccattgatgcagagttcggttgggtttgtgctggtgagaacaacctgaaaatacatggaaacaggcttattcgtgacaaatcaaaatggaaaaaaaaacagcaagacactctttaaggtaactgtacctgaccaccaggacacatgcagaaggagtagcaactgcgtttcgatgaagactgcgagagatcctcggtcttatcattcacatactgaacaaccttataatccgccactggtactttacctcgccctttaagaacttcattagccaaatccgagtactggaaagaaagaccatcacaagaacataggtgttttatatacaagtcaagacttgaataacgataaggtacaacaaagtctgatatattgaagattatagtattaagataatcgaacaaacctgtatactgttaattagctcctgaggatgctcaatacgcaaaccaacctgatccacacaaatcgatagaaatcaaatgataataccaagccagggaagataaaagtatccaaatatattgattcaaaatggatattttataaaacaacacactcaagaaatatgtacaaggaacttacagcaaaatcttttggaatcaattcgacattacgagaatgaagcatctcatatgtgtcacgtgctgaatgaccaactgcaagaacaactgcatcaacctttaaattctgggaggtagtctgcaattggtttgttgaatccgaaaccctgactccaacaacacgagaatcctctaccagaagatcatctacccgagttccaaacttgatagtcacctaattaagtatatggaaatggaatcaaagagaatgctcagaggagaaggaaaaaaaaaaaaaagcattaaaaagtaatagagagacatagatcaatctctcattctaaacttactcccgcactttgaagataatgtctgaaattacggagtaatggaactagcttatctgttcctagatgaggctttccgttgatcaatatattctcaggagccccaaagcgaaccaacgttttcaacacctgtaaacaattaacgcagtggtcacaatttttccttttgtactcaaacatgaagtgcttcaatttaacatttggcagtctcaaaatactaaccgctagaacggtggcactattttttcctattcgagtaacaagctttccatcactccaagtacctgcaccaccctgcgatgcataagtgctaaaatatgactttgacaataacaaagaaaactagcaaaagagtgaagagaaggtttttaaacctcgccaaagcagaaattactctccatatccaaaatcttgcgaactaccaaagcgcctatatcacgtcccctttcttctactgcttgccctctttcaatcaatgtcacatctgcaccgaactctgcaagtacaagagcagcaaacaaacccgatggaccaccaccaacaactgcaattttcggtttgcttcgtcctcctccatgatggtgtggatctccagagccattgataatctgaggttcatattctccggatgctgtctcactgttgatccttttacagtcattcaccacactgatcaagtcccctgaaacactcttctcggtaggcacatgttcaataagcccaatcttaggctctaaccggaaaatgaaatcatgagcacgaggctctaactcaaggagcgtcttcacatccaaatccacagtgtaaacaaacttggcttctttcagaatctaaacaaaagatgaaaacttcactcacttgaaactacaatacaacataatatgtggaatcaaactgaaacctaccttcctagcgtcaaaagatttcctaatcactgaaaatgcgtcttctggcagcattgaagcaacctgaaacaaaacccaatttatcaaaaaatccaatttcatcatagccataagataaagtttcgaactttccaccggagaactcaccggaaactcgataactttagcgatggcttgaagcaaaccttctgaaatcccgagaaagtcctttccagggtcatctccaacaggaactccgagcttagagagacgccaaactccttcaagcttgttcttaaccttagccacagcttccttctgctctgtcctcagcttcctcctctcagaaggatatctccgcttcccgattcgcttcgcagcacagagaatccggtgtgtttggatacggggataagaaagtaccgctctagaataaggaattcgcaggtcatggctcgatgagagtaatgaagaactgaggaaattcgtttgcgagagagacatagtgagagagagagctcaaactaaaaagctcgtctctgtgtctaatgagttatcctttcatttcaaattgaatcgactcgagtccggttatacattaatcgttgattttaatccggttcggttgatacgtttttgaatttctcatgtataatgagaaccgaagttttcattttattctgatggtactatccaagtgcatgcaacttacaattttgatcacctctgaaccgtgtgacaataatcccttactaagaccagaagctttgtatgctccaaatgcaggaatctataaataaataaaaagcaaacgtaaatgattgcatcattcctacagagcaaatctgttgtttgcctaaagtaggccaataatgaaaatagagatgggtatcaatgtatcatcccactaaatacgcgtaccaaaactttccagagatgatagatccaatctgcagaaagcaggtgacgtagagtacatcatgcaaatatatgcaaggaagaatagagcatgaggcttatgatatacaatctaccataaagatgacaattatgtagcaactgataaacaattaaactcagagagaagcacaactatggtgccttaaacatcactcatttcaaacaactgataacgaaacaatcctcttacaacagcttttggttatggagacagaatccaaacatacaaaacacttgagacaaaagcagccattttctgaaatcttagttgatcaatgtaaaagagaagtctttcagaacgtacctacacactctaagagtgctcatgtcaaatccacaatcaagaagtgtgatggatgacttaagaattgtatttcaaagcgacagtcttaaaatagcacaaacgcaatactgtaaaagccaaaaaaaaaagatgatacaacttaagatttgtctgcgccaaggaaaaagaggttcgattgttgtcaggggcgttcttaacctcaaacttcttcatgtttagatctgaaagcttcatcatcttctttgctccagtaagccaacttaagagtgttgtcacttgcatattgatagtaaggtattggggagtcatctggcgggtcttcaacggcagtttcttggttgatgagtgtctcagggtgttctacggcaacaaagaaacctttattttctaaagcttgacgaaatctgaaaaatttggggtcttgttccatctcctccttgttttctgtgagtaccgccaaatttgttggagccttccagttccatgaccagaaaacaagttgggttataatcatgttgaatatggcacgtttatcccctgcaagaaaaaaaaaattacttagttacacaagatagaatagattacttagttatacaagataaattcgagggtttaaatattgagttagagaaggaattgatcacctttgcagagaaagacttgaaatccagaatcccaaagtctgtcttgcgattcagtcaaccatttcgtctcagcaccaccgtaaatcaggatggtcactttgctactccttaaaagagaatgcttgacaatagctgttttgattttctcgtatatcaaaaaaggatcgacactttcagggattgagtagtcctcaatttggctaaattaaaatcttaagagattaacgtttatttcttttattgaattactgtatatgatcatatcatatgttattggatctttttccaacgcatttgtagttagtacacatgtgtttatattgttatcaaactaaacagttatctatatttgcgctatatccaccgaggttgttaccttcttcgaaaggataaaagaagatcaatctataaaatgatgtatatgttataaacgtgctaatataaggattaaacttccggacaaagtaagtattgagtattgattagcaatagaaacaaaagtaattgaatattacctgttcaattattttgtaaacaaaataaataaacaaataaaaagattattttgcttaccgacatattttttttatgtttcagaaaaatattagtagtatatgtacaaatgaattatgctagttatctatcaaatccttttgtacaagtgtactcgaaatagaaagaaaacaaaggaagtaaataacacctttttgtataactgtactaattaaataacattataatttaaatcattattatgggtataaaactactattataatcctcgtatacttaattaagtatacagaaatgaaaaataaatatttgcgtcttggtgtgattaagaaagagcctaatgatgggtattcacgtgcttagcagttagcacaattatattgaccacactaagaagaactagagttattatatatgtcatgtcttcgcaatgtttcttagcttgtctaaagcttgtcgttttcttgttccctcttacctatattagctctaggcggtgtagtttcctcgatcaaattgtttcggttaccgttaagtttttatttcgttgatcaaattctcttttttttttttaaccatttgtaagatacatgtttacattttgatcacattgttttttaaccattt

SEQ ID NO: 35783 - DNA, 5850 bp, Arabidopsis thaliana landsberg
tatactgctaatattcccaacatctctatgatcagagttgttattgctcaagcactgattatccatagctctcaacaatccttccacggtaggaggcgcgcttccgcttctgagaacatcaatgtctcgttctcgttctcggccaaatgattgctgattacaatgttgttggagcaaagattcgagctccctctggaatcgatcttcgagatccacattggatcctcgattcacacttgtcaaatttgatcgcgtatccatgtagctattagtaaccatctcttcccttcatccgaatcaatattaaacctaatcaaatcaacacctgcaaaaaccagaaaaaaacaaaaacaaattcgtgtcggtgttacgaaatcggagaagaatctatcgatttttgaaaaagagcaatgatcagaatccgatcgcgaatcaaagtaatgaatcacctctctatcgatttcaatgtctacgaagacggaacgataaggttctctgtttcgtgaaaacgcagaggagagaacattgaaggagaaagtgagagagggagtgagataagaaatgtaagtgaggaagattgagagaaagggaaaggggattcaaagaatgagagacgaataaggtaaagaagacaaaagaggcaaatcatggatgtctgagatcgctttcatcctttggtaattctcccaaactgtcacactggaccttttgtaattacataaactaatcttaaaaaaggtgattagaagaagatgcggctattacgacatcgtatatccatctctttgtctgatggacaaattacataaagttaaaaggatgattaattaatgattaaatttgtcacctaaattcaagaatctcttattaaatcgagacaataaataatcacaatttctaacgtttgttttcttaatcagagagaagtttgtatttttcgtttatttcgttacggtcattcatttttctgataattaatttgtaatctttatacagaagtttaattaatatagtttatttacaatagagaaataccctctacggtaatagcattaaaacaaatatttagtatggcttaactcttttaatactaataatgatcaaatatttagttatgtcttactgactatattcctaaacatttccaatcttaagagagcaagattcgcacattttaagaactagcaaaaactcacttgcaaatcctccatattttgaaataattattttcaattttataatttgttagtctagtttattaaattaactcgcacaaattacttctatttttcttaaaaaatcaaaaacactattgtttgtacaaaacagtttttaatcaaaaacttacaaagcctataagaaaaatctcttgcagcccactcaaaccattccttagaacacggaactctctattcatatgaaatgaccaaaccatccccacttcacttaccttctatgtatggaaagttgtgagggtgaaacagtaatttaaaacgatatagtttccattacagagatttctatttccattttttgatatcattcgcaatcattttcttcttcttctttcccatgatcgtctctcgcttcccaacgcaatcttcttcacccaatctctaaatctctcctaaattccatgtctctcgcttccattcgccgtttagctgccggagctgccgtaattgccgctgcatccggtggcgctgtctacctgtctccgtcggttgcctccagcgacaaaggaggtggtccgattctagattcgttgaggcgtaggcttggtgatcccaccgcttctgtaccgtctcgatctgctcaagagtctgctctgattgcagccaccgcttctgatccgctcgatgttctcgtcattggcggtggagccaccggttctggagttgctcttgacgctgttacacgtggcctccgtgttggtttggtggagcgcgaggatttctcctctgggacttcttcgcgatctacaaagctgattcatggaggtacttttaatttttgaattttctatgtggcgtggatttccgaatttcgtataagaagctctctgaattgtctggtaatatgaaaccatttcttagtttactagttggaattgagtggtatgaccattcaatttacgaaattatattgaagaatttgtagctagttactttggtttttgccactcattgttgtgtttttgtttgttaattcaataattgaaggaacatacatgttaaggatatgtattacatttgcggctcttgatgcaccatttgatttagtgctcgtttacacttaggggttcgttacttggagaaagctgttttcaatcttgattatggacagctgaagcttgtatttcacgctcttgaggagcgtaaacagctcattgagaatgcgccacatctctgtcatgctctgccctgtatgacaccttgttttgattggttcgaagttatctacttctggatggggttgaagatgtatgacttggttgctggaccacggttattgcatctgtccagatattactctgcaaaagagtctattgagctcttccccactcttgcaaggaaagggaaagacaagaatttgaggggtactgttgtgtattatgacgggcaaatgaacgattcacgtctgaatgtgggtttggcatgtactgccgcgttagctggtgcggaagttctcaaccatgccgaggttgtctcgcttattactgatgatgctactaagagaataattggtgcccgaattcgtaacaatctcacaggtaaaacgactagcaatttcgtgcaattcagtatacctctgctctgtcatgatttgtgcagtttttgatgagatgtttcaatttgacaggccaagaatttaacagctatgcaaaagtagttgttaatgcggcaggaccgttctgtgattccattaggaaaatgattgatgaagatacaaaaccaatgatttgtccaagcagcggtgtacacatcgtgctgcctgattactattctcctgaaggcatggggttgatagtccctaaaactaaggatggccgcgttgtgtttatgttaccgtggttgggaagaacagtagcaggcactacagactctaacacttcaatcacttcacttccagaacctcatgaagatgagattcaatttatactggacgcaatcagcgactatcttaacattaaggtatatccagattcagattaatgaggaataatcaattctatttttgacccaatagctctctaacaattcagttgatgatgttatgcatcctaaatcttatataggttcgacgtactgatgttctttcggcttggagtgggatccgtccattggccatggatccaacagccaagagcacagagagtatctccagagaccacgttgtcttcgaggaaaatcctggtctggttacaatcacgggtggaaagtggacaacttatcgaaggtgagggtactgtaaaatatagcagaaatttgttaaagttgtgtgatcattgctcatcagtaatttgctttcagcatggcggaagatgcagttgatgcagcaatcaaatcgggacaacttaagccaaccaatgaatgtgtaacgcagaaactacagcttctgggttcttatggatgggaaccatcttccttcacaactcttgcacagcaatacgtgcgcatgaagaaaacatacggtggtaaagtggttcctggagcaatggacacagctgctgcaaagcatttgtctcatgcctatggttcaatggctgaccgagttgccaccatagctcaggtatggttctatatccagactcgttcttcttcatgtcctcggtaggtaatattttggatttcggattgcaggaggagggtttggggaaacggttggcgcatgggcatccgtttttggaagctgaggttgcttactgtgcaaggcacgagtactgcgaatcagcggttgatttcatagcaaggagatgtagaatcgcgttcttggacactgatgcagcggctcgggcgttgcagcgtgtggtggagattctagcaagtgaacacaaatgggacaagtcgaggcagaagcaagagttgcaaaaggctaaagagtttcttgaaactttcaagtcttccaaaaacgcacagtttaacgatggcaagcacaactaaagcggcctctcagagatttactacactattttatgattgaatttattatttcctattttcccatttgttgaattttttgggtagctactagcgagaacgaataataaaactgtacggatggaataataatactgcggctactcatgtttctcggatgatttgttgtgaaatgtgcaagagccacaggattctgagtcagttagattgacatcaatagtctggaagactcaattacttctcttaactaagcgtctactatagctttaagtctagtggagtggagtcagagatttgagattctaaacaagtgtcagaaacaagggttaggttcaattttcacaagatcattttgaacaacaaagtcataaagtgaatagtaattaagagtcatgtttgtttaaatttgatagtaacgtttggcaaaccaaaagccaaaagagagaatctcagattccactctgttgtgtgtgattcggaaaaaatcgaagatgaatagtaaagtattttgtggctttctctctctatttttgtttttacttggaaggaatatgaactcaccttggaaagttttatacaatggaaaatctctaccaaataatttaaacaaaacaaagctctcaaagaaaggtctttggttccgtattagacaaatactcacgaaactagacaagagtttaaaaaagaacaaaaaaaaatgaaaaattgagatactcacgaatccaaactcttgtggcagtagaaagcacgaagaagatatacattttatgtctcctgcttctcctttatgatttcaccattatgatttttctgcagcttatgaaaatcatgaaacaaattggctgctggagaaagctttcgtttaatcacagtaatccgcgaatggctcgaggagttgacattaatgagaaagaatttccaaaaggcgggattgagcatctgaaggagtatctcttccaggaaacattgaccttcagaagattggaatacctgcaagccaaagaatgtgatgtttagtccaaaaaattaactatattagtctaattcttgtgtttatttcgctgaattcaggttaacggaaataaagttgagaagcagactctgtgggtgtaaacatttggtcgtgttctgctatgaaagcgagcaatgcctgcagaaaattaagtaaacatttgagtttcatttggttttcgggtcataataatgctgagaaacccaaaggattaaaaaaaaaaatctccctttttgcttacttcgaatggcatgtttaatagctcaaagtaagtacggacacgatctaggttctgttgtacggtttcaccatcgatatatggaatagctgccatggcctgcagtgtaaatacacacacattaagatagtgaatgcagttggaaattactaaaaatagtgaacaaatctttacctgttccactgcaatagtgttccgacatatttgttgaaccccgaaaaggttgattgatctcatgtcagccaaagcctagaaaatttcgtaataaatactgtcacagtttagaagattgtgataacctattggatatcgaattatagtatggtatattcaaatttgaactagaagtaccaaagatagaaaggaagagttgtaccttaatggacgcatttgctgcaattccactaatgccaccaaaaacgtaattccgcttctcacca

SEQ ID NO: 35784 - DNA, 3873 bp, Arabidopsis thaliana landsberg
  unsure (1)..(3873): unsure at all n locations
cccaaatgcttgcatcagaaactcacaagcataccgcaacgggaatggaacgtatctaggagaacaatgatgaccaacaactaatccccaaagcttgctcgaatctttgccttttactacaattgcgagtgcaagagaagctacagagcccatattcgccatatactgcgtatggcagccatgaggagctcttagagtagaattaactaaacaaagtggtctcttgagttcctcactctgaacaaccttaaccggagttgcattgcagtcacaaatcattcggacacggttctgtttgaacaagaaccgagcagcctgaggaatatctgttgcaggataatgtaaacccaaataaggctccaaatcagaccttctaatctcagaaacaacttcaccatgttcatcttcatgaaacttgtacaccataacacggtcgtagccagtaagatctctaacgctttccacaacagtgtcacatagaagcttaatgtcgccgctaggcaacgattgtaaatgannnnnnnnnnnnnnnnnnnnnnnnnnnnnttggactgctccggcgattgaaagtgccggatcttcggttcgagccggctctaaatcgatcaaaattccaacatcaaccctgtggagaatcgcgtagaaaggtttaccagtgttgttagagtgaatccaaataggattcagaagcgtgatctctcgagccacgaacgcgcgctcgaggagaaggtagctcgatgacttgaagagagatcgcaaatccgtaccaatcgttaaaacctctgatttgtcctcgatgcttggtacagattgagacatgagccctagcatttcccgcgcattttcactgtaaccgatgattgtgaaagtggattcttcgacggcgatcaagcagccaaaaggctgggtatagccaccgcgttggatccgggagagataagctgtgatctgctgctctggtacggaggaatcgtacggagccgttttaagagactgtgagtaatcaaacgacttacctgactctccggattgttcgaagacggcgtggagtctcgcgtcgacagtgtactgttgaatagctttgtttgtggactctgttccgccaccgtggttttgtggctgctgattctgtgaccttagggctttgtttgctgacgactgagcttgttctgcagcgctggtgtgacgacttcggcgatggcctgaggaagctgcctctccaccgctggttttgctaccacctccggagaccatttttctcagttaatggttttggaatttcaaagaattagtgcgagagacgaagaaaatcttcttcaatcattggattcgaaaccacactttcacaaatcttcacagtaagagctcaaaaatgatactcataaggatttttgggaagcttgaattatcactgtcgctagcttaacggcgaagtttgtaaaatgataaaacagaaaccaatttgaatttttcttaaggctctcaaaaaccaattaaaatgaagcagaagaggtggtgaactcaaggattaaagaagacgatgaccttgttctctttatgatttgactccctcgtctattaaaatttcgttaaaagttccaaaaacttgtgtaggtatcaatttaacccacatttttaaactttcgttgccttgtatgttttatgaaggaccgagatcacgtgggttgtggattattccgactagtgggcatacgagggacgatatatgtgggcatgtgggcgtctgtgtcctcaaaggtctggtctggtctggtgtatatcaaataaaaatattgcatgactttaccaagtctaacgtggaccaaaacaaagccgagtatttaatttaacttggactaacaggttttatttgaaatttgtctttatttggaaccttttatgggataatctcccaattattcacataaatctcagcatataaaatcatcactcaaccgccgtaccgtctctcgcggcagagaatgtgatcggaaattttggttgtttattaggaaaaaacaaaccaaaattcttctcgatctcaggactcttttgattctcatcaaacatagcgaacaaatacgtttccactcctcttccaggtctcttcggtgtcctctgttctcttcacacgcgacgcaagattcgtgtaaaaagctcgcgcgttatcgaaactcgcggcgtttccaccgttagaaggccatccgctctcggaaacaaccactgggagagatccaccgcctgagcgttcaacggcagagtaaacaacgtcaagtaaagcgtcaaagaggttttggtagccacgagagccgtcccatacgacgacggaaggagaagtgaagagagcgtaagagagagatatgtcacgtggattgtcaacgtagctgaagtaaggatagatgttggctagtaacgctgagttcgtactcgtaagaaacctgattagccacataggaagaaatgatcactcggttttgataatccacttccacaagtaaccaaaaatgaaaaatattgggaaataactaaatctaatgaattttggttggaaaattacccgatgacgggatcgatataccatctaacgtcaccacgaaactctccggaggaaggagggaaagagtttccaatcaaagtcatatcaatggcggtagaaactttaatacgatcttgaagatttgcacctcttagagcatcgtaaacgttacgcatggcagggagcacaacatcaccgccgttcgacggagatacttcgttacctacggcgatgtacttgaagctaacggcggggtaatagttgaggacgttgttttggagccatgatctagcggaagaagggttagtgagtgaacgaagatcggtgtttggaacgccgnnnnnnnnnnnnnnnnnnnnnnntctaagagcgtttaaagcggcttggtttggatcgtagagtctaacacgtcggatgttgttttgtctaaagagagcgattgtgtctgattgagaaggaaggttgttccccatcattccatagcatacacctactgattctccacctagtttatcatataacataattaaggttaattatgattaagtttatatatctataaaaattgaaaatgagaataaatcatgtgagattaaagagagagagagacttgttgggttgaggatggttgtgatgaatagagcaataaggaggaataacgtggtcatatttgacatcttgaacgatttgagatcttacgtgttttagcaattgctagttgcctaattgggtttgttcttagctccttatatacaaattaacattgatatgtatgtacttacaatttttttagtagatatatatagatgcgtatagattgtatataatgtagaatggagtggctaatatctttgtttattaatcaaagtcaataagtcattagtcggatcaagtaatcaagtacataacgttagcttgagtgcaaatatgcgttcaatttatcaaatcttatatgcaaaagagaatatcttttcaaaaaatgggtagagaaatgtcactttccaacttgagaaattaggacattgcttattttttccagcattgacaaatcaaccttgctattttttttgttttttttttatcatacgaaatttgatttatttgactgcgtctatgtaaatatttgttaatgttttagaatgacgagaaacatgtctaatttggcatatttgtgttttacgtgtaacaaaacttgtgcaatttagataagctcctaaacagtgtcattgaatcaagtataattccactcatgaattggttaccgactttttgactttatgaattatgatggaccacgttggctattagctaacgtagttttatcatatttgcttaca

SEQ ID NO: 35785 - DNA, 3084 bp, Arabidopsis thaliana landsberg
gctattagaatggttcttaagattgtgtatgatgatcgattcgttacgttttggtatggtggacgtgttggtatgggtaggcatacagcgattcgttacctgaaaaactcggttgagaatccacggtggtggtttcgtgtttcgtttgctcaagaaatgtttgaagaacgtaatgtggatatactgtgtggctttgttggagagaagatcagcgatgttatgttgattgagatgatcaaaaagctgtttgagtttgggattctgaagattgagcttggtggatgtaatagtgaaaggggttttccacaagagttgtggcttgtgttcgattttgatcaatgtttactttgatggacttgacaaagagattcaagatttgaggctaaagatcaaagttaagaatcctcgtgttgaaacaggaaatgaggaatcaacaggtaatgttttctttaagccagtgaatatttatgcagttaggtatttggatgagatacttgtgataacatcaggctcgaaaatgctgacgatggatttgaagaagcggattgttgacattttggaacagagactagagttgagagtagatagattgaacacatcgattcatagtgcagtgtcagagaagattaactttttagggatgtatcttcaggctgttccaccttcggttttgcgcccgcctaagtctgagaaggcggtcagagcaatgaagaagtatcagaggcagaaagacgttaggaagttggagttaagaaatgctagggagaggaatcgtaagacactggggcttaaaatatttagacatgtcttgaagaaaatcaagcagagcaatgggtttaaatttgaaggtgagatagagaatgaggttagggatattttccagagctggggagaggaagttatgcaagactttatgggttctctcgaagagcgatggaaatggcactggctgctcactagaggagattttctctctttgagacatattagagagaaattaccacaagacctgattgatgcttatgatgaatttcaggagcaggtggacaaacatttggctccgacccaggctaaaaaggtacttgaggatgaggagaggagagtagaagaagaagaggaacagagatatgctgaaaggacagttgaggatttgactaagttatgcatgaaggtgtcagctccggaggaacttgtcagaaaggctattaagttagttgggttcacaaacagcatgggacgaccacggcctatcattcaccttgtgactctcgaggattctgatatcatcaaatggtatgcaggggtagggcgtaaatggcttgatttcttctgctgttgccacaattataagatggtaaaaatcattgttagttatcatatgaggttctcatgtattttgacactagcagagaagcatggatccactaaacgtgaagctattagacactacacgaaagatctcagagtatcagatcttgacgggagggaagaggcccattttccatcggaaagagaggttaagatgatgggagacaagaacctttcagaccctaaacctgtggatggcacactatcgttgcttttgatcaggcttgcatctgatgagcttttgcatcactgtgctgctagtttttgtgaacgagcagatacaattatgcaccgtgtacatctactgcaaaaccgtttacatatcaacccactagacgaagagaaatgggttcctggcatgggcaccatccactcagctttgaatcggaaatgtctccctttgtgctccactcacatcagtgatgtatacttgggtaaaataacccttcaggatgttgatagtagttcattcatcgatctcaggtgatgtctgttactctcttctacaattggttataacatctgcacgagagtaagaagtaaaaatggccattgctgagatcaggcgaaaatgcgtgccaacagggtgtaccacatacacattttgtcttgatttcatcatgataggaaaatgaatgaatacttcataagcaactgtctggctgcgcaatggcatagtaagcttcataattgtcagggggtttggttcttctcaggatcaggaaacaaagatttgagcattagttacctgaaaaacgcaatgatcatctgcatacacctgagctgtaccttgcacggagcgaacatgtttgttcctttacggtcgtcagtatcacgctcagcattgtgatctcatttgacacaccaaaagcagttgacacgatggatatttgtcgaattggcggttggcaattgacagttgtataactataattttgcaatcgcgtaatgtatgaatctacattttagtattgtagtagtaagagggacacttttcttctgtatcatgtaaagaaagaagtgaggtcaattactgttctggtaaactcgcgaggacgtctagtataattgcgaaaatgtaggagtggatatgtgaatacaagaagttttgaggggccaatttgcaaaaagacatgaaaaagaaaaatgtgtcgcgtgtccctcacatggattgccgacgggaagcattaggggtaaagtcgtaaataaatttgagatcttcatcttctctgtctcctctgttcgaagctgagctttttttggttgcttcagtcactcaatagattcacatggtttcagacagaaaagtataaagaaagatttgaatagcaagcgtgcgagagttgaagaagaggaaggattgttttaagagcaagaaaggaatttgaaaaccatgggaggaggttatgtgttgtttggttcggctagatcggggcagatgataatggtggctctggtcctaatggttggatcattttacgcaggctctatcttcggaaacaattcacctatttacatttcccaaccttcttcttccaattcttcttcttcttctccatcacaatctggttcgctctctctctctctccctctgtatttttttaaagtcttatccttttctctgtatatcgttaaatttccatgctttgcttgatttttgttttccggagctatattgattgaaacccactagatttctattctatatcgaacata

SEQ ID NO: 35786 - DNA, 1142 bp, Arabidopsis thaliana landsberg
agtggacatttgacatcaaagatcagcggaacctatttcttgctattgctaaagtgcttagagaaaataaaaggtactgcaacaatgtttgtttcttctttttcctttttttaaggtataccaatgtcctcatgggatttttaatcaatatttcagttttgcgaaagaatccctccagtttgtgacaaattatttggcaactttctccaatgaagatacccaagtcctgagtgaagccaaggaggaagctgtacgagcagttattgaatttgtcaaggctcccagtatatttcaggtatcctaattcataaatcattcattcaaatgcgtaagatttttgcacgttgacttgttactgtcattgtagcttgtaagtgttaactactgcgccttttgttcagtgaggtcttttactggaattacatccctgacttttgtattttgaattgcagtgtgatttattagaccatccagctgtcgcacagttggagaaggatcctaacaatgcaccagtttaccagctactgaagatttttcttactcagaggctagatgcatacatggaattccaaaatgcgaattcaggatttctgcaaacatacggtactgttcttatccctttaccgcttgacatgatcctcagatgaatcgaatccttcattctttagtgaacccataataagccatagacggtatctgcaggacttgtcgaggaagactgtgtagcaaagatgaggttgttgtccctagttgatttggcctcagatgattctggcaaaataccgtatgcctcgatcaagaacaccctacaggttagcttcttttctacgaacaatacattaaatgttgataaccttttttgcgttgctttctcagactcatcgaatttgtcgggggtgcaggtaaatgacgaggaggttgaattgtgggtggttaaggcaataactgcaaaattggttgcttgtaagatggatcagatgaaccaagttgtaattgtcaggcaagtttctaatctacttctatttcgatttatatgtgtaaatccaaagtcacacattctcgtacttcatatctgttcatgtatcagccgctgtgccgagcgtgaatttggacaaaagcaatggcagtctcttggaacaaag

SEQ ID NO: 35787 - DNA, 1109 bp, Arabidopsis thaliana landsberg
  unsure (1)..(1109): unsure at all n locations
catgaatgtgtgcagagataacacaagcaaagatcagtgcagaggaactagaggcacatagttcagatgcattagctgaactggttgacccttctgttatattggcaactccttcctccttttctccctcgaaaggaattctgaaaagaagtatgagaggatgtagagggatatgctcttgtttgaactgctcctccttccgtctacacgccgaaagagcatttgaattctcaagaaatcagttacaagatactgaagtaatggttttggatctagttggagaaatatctcatctcagggatttgttggagaaatataattcagcagatcacagtgaaccctacaaaagtcaggtcagtgcagaacaaacttcataatcaattgtctcttagatatagactcatatcaaattggtttagtatcttcactaaagtaactaaaatgagaataaatattcacacctagaccaacttttgtaatgtagacacaagttcttaaaaacttgttaagttagtaataaatttgtgcaaccttatcttgtaggattaattggatataaatattgatctgtaaacaggctggtgaagcttcgaagagagcttgtgaggctgcagagcttgcaaaaagccgcctccaccagatgaacgatgggcttcaaggtcactacagaatccccgtgagtaatccataatcaattgtctcattctgctttatgttaagacaacatctagtagttgaagcagttaaaaacacatgattctcactctcaatattttgtctacagaacgaacaacgagcaagagtgaaatttgctcattatatacacgagaagacgattgtaaaagcatccgaacctaacaaattgatcagtagatcnnnnnnnnnnnnnnnnnnnnnnnnnnntttaatgtcattatctgtctccagattatccagtttcatgctcttttctttttttaattttgaaaagtgaaagaggtattactagctgtctttttctttttgtcaccatcctaaacatagtagaagcatagatcaaagtgccattatacatatagaccatgtgatcatatttattacactttttttttttcttttaaaaacacaca

SEQ ID NO: 35788 - DNA, 1901 bp, Arabidopsis thaliana landsberg
  unsure (1)..(1901): unsure at all n locations
caaaaacttgaagacaagacacattcaacggtttcaaattggtaaagaaggagtagatgagagattcaataccattacatactgagcagctgaaagagcacaatgcacaaaataacaaacagagaccaatctacactcacatgtcacatgccactgtactgttgtttaggcttaaaactaacaaccaaagccttgcttaaacttctttgggatgaaacaagatgatctttaaatcggacaagtgtttttcaaggagatgagnnnnnnnnnnnnnnnnnnagaatgcatagaagatgagaagctggtgttatcggagataacttggatcttgcatttgggtgaagcaactttttcaagcatctgaagtttgcttgatactatacacaaaagcaaaattgctggagaaaaatcaaagcagaaactgcaacagaataatactcaggacaagaaatggggaatcttacttgggaccctcgaaatcactcgatgattgagtattgataacttccgaacaaccaaagtcagaggttttttgtgggaaggaagttgaaactgacaattatggtttcgtcaatcgttgcgacagtgtcacagtaaggtaaagcaatcagcaatgcggtgagaagggtctctcggtatctagctagaaacgacgccgtttgagttttgcttggatggaatttagaccttttcgctaactatgcaaacctttgtagccaatacacatcacatgtgttaccaattggcaaaaagggtttatgagagattcaaaaggacataaagatacaataaaagtttataacttggacgtagagatgttaatgatgggttaaaacccactggctatccaaaacccacataaaattttaagcccatagatctattttttctggaaaaaaaacacaggtttaaaatgggttgggtacccaaataaataaaacccatatgggtttacctcattgggtaatgggtacccacgggttttttaagtcctttttcaggtgaatcaacattttctcgtcaaaaaagatttcacatttttccgccaaaaccgcgatttaacagttttccgccaaaaaagacattcaacatttacccgctaaaaaagacattcaatatttttcagccaaaaacgacaatcaacattttcccgccaaaaacgcaattcaacattttcccgccaaaaacgacattcaacatttttccgccaaaacgcaattcaacattttcccgccaaaaacgacaatttaacattttcccgccaaaaacgcaatttaacatttttccgccaaaaacgcgattcaacatttccggccaagaaaaggatttcatttttcccgctaaaaacgcaatttaacattttcccgccaaaaacgacattcaacattttcccgccaagaaaaggatttgacatttttcccgccaaaaacgcaattcaacatttttccgccaaaaaacgcgattcaacattttcccgccgaaaacgcaattcaacatttttcccatcaaatatatatgtaatacagaaaataaatataatttaaaatatatttctaagcaaaatatagatacaacatacatataatagtatattaacaattaaacataaattctaagaaaatgataaaaatcaagttgggtacccacgggtagtctcggaacaatcagattttttcgggctttacccaataaatcaaaaacccatctgggttttttaaagttgaatttttgatggacggatttattttgggttcaggtcgggctgggattttttacccaccacaacatctctagatctcttcccatgagaaagtctttatcaaaaacggtggtatgtttgctactttcttgaggcattcattcaaatctgcggttttgggcgtgatttcgatcctgtatta

SEQ ID NO: 35789 - DNA, 1047 bp, Arabidopsis thaliana landsberg
ggaagacttgctgggtacatatggttacctggatccattatactttgcaactagaattgagacttaatttacggatgtgtacagctttgcagactttatgatggtaggcatcaccggattatcggattactgaaccgggtctgacgggtatcccgtaggcattcttggatatatgaaaggcttagctgagaatgggaagctcaatgaaatagtatatcctatgataatgaaagagatgacaagtgctcaaagattgcaggtggaagcatgcgttgtacttgcgttgagatgctgtgttgtaagagacgaagacagaccgaagatgatccaagtagctaaggaactcaagcggattgaaacatcactgaaaggtgttagctaaatacctcttctctgttcttggactgtgaagtcaaaaatgaaaagaaaaaaaatctttctgtagtgtgaactcagatttgtacatatagctataactcagagaaactcggagacacatataacttgaacattgacatttgaccttccatgaatgtagtgtgtttttctatttatgcttgccctataatgcctaaaatgaaacatcttctacaattaccaatatgtatttctgcatttatgtatctatttggcttggattcttaatgcattttcctgttaaaagtaaaagtggttcttgttttcatgataagttatgtctatgatataccttgcatgaaaactcagctggaagtagatgtgatattgggcattgtaaaccatctttgtaagttctgaaactaataatgcagagctttgcagtttcattatgacgccatcagggccaaactgaaatctagccatacataacaacaaaaatactagagaaaactgaaaaacagagaaagaccatatataagcataggcttttagacaactctacacaaagtagactttgtttgggtcggacatagaggctttcacaagtctttctaaccccttaaactctttggcatccttcaggtccacaatcatatgcgttccaaactttcaaaagtaataaatttg

SEQ ID NO: 35790 - DNA, 6725 bp, Arabidopsis thaliana landsberg
  unsure (1)..(6725): unsure at all n locations
gatagaatccaaagctcaagaggataccattggagagctaacttacaagatggaaggactgaaccatgcaatcttggaacttcatgaaatgattagaggttaccccaattttgaatttgaggattggtcaaaggagcctggttcagaagaagaagactactctgttgatcagaaagaagcttactttgaagaaaaatcaaatgagtactcatcctaccgtatgtcaagagaggatgcagaatatgattcaggaactgaaaattcaaccactgaagatgaggacttttctgttcctcttttaaaccttttttctgactaagctctataacagtcaagcttagtgaattaaaacaagctcacttgggaggaagtcccatgtctatccaggtatataactttctatttttcttgttatttttgatgtttttgtttaagtgtttcaggtttatctcattgatcattataaagtcaacggtcgagtaaactcaaaacaagtcaagaatcatctccatcgttgatcaagcaaagtgaggaggagagctttaagccgttgatttgaatgaccaaatgagagaagcatcagacccgtttgatcgagtgacttctttaggtttattctggtccgtttgatcgagtgatgaaaagcaaagcattctccaccgtctgatcgagtgaagaatccaaagagaccaccttgtggactctgacgcctcgtgacccgcctccattgaaacgttgttgtctctttgtcttcttgtccccccccataatcgctttggttcccccattgcaattcccgaactcaacaacctcatctctccacctcccataccaaagcaatctcgaattctcatatctctctatatctctttttcttgcacttcctctttccatcaaaaactcaacaaaatcaatctattttcttcatcactcgatttcttaacctttgagtctctctttctcaatgacaaacaggcgcacgctcctgtcaaggattaagaacagagctttctccccatcgaagaggtacccaacaccttcttcgcatgcagtagctcgaggactttctgaaccatcacccaaggggtcgagtaggagagaacaagcaagtttcgagatcgatcacagcgaatcaagccaagaggaggaagtgatgcaagaagaagaaacttccagctctcccgctggaaatactcgatcctgaaggtcgagtaagtcctttgcaagggaattctcaaggaacaaggtagacagcacacgaggaaagaagcccgtggggaggaggttggaactggtagatgaagactttgaggaagaaatggcttcaccagaggattaaatggcttcaccagaggaggctgatcagacagagagaggaggtggtgatgatttggaatcagagaagtgtgcaattcgaaacgagtactacaagctgctgaagcgaaatgagtttttaggaactcgataccctcatcccgagaccatggagagactcggcatctatgatgatgtagactacatgtttaagcactgcagcttgaatattcacatgtttcggccaatagagggatatgaggaagagaccatcgagtttctttcatcggtagagttgttcttatatggagagtcaaaagacgatggaatcaggccagacggaagtttgggatactttaagttctttgtgtatgacgtagagtatcggcttccaatcgagtatcttgagctgatgtatggatttctaagcggaaaagacacaagtcatcgttttgacaagagagagcttcagtcattctaggccacgcttgagtctaaacatgggttttcatcctctaggaccaagagcaacgagataaggagtccggtggtcagatactttcataggtctttagccagtgcactatttgcaagagagaggaatgggacctttgtcaatggaaagctaaaattaacggagacagcgctgcaggagctacttggtttagcatcagatggtacagttctagctagagatcagacagacgcttcaatctcattctacctaatcgaacatttgctgaattacagaggatgggctaagggacttaagaaaccaggaagaatggttgtgggaggagttttgaccccaattttgagagcatgcaatgtacctatgcattcaaaaccgattcctccgagatggattgatatgcagcatcttatcaattccaagagtttttggtcgcagtagaagaatggcctatataaatataggttcggtcaccatacaacaggactatctattttcgtcctcccaaatcccgcttccacttcgatcagatattgtggcaacatttagttttgcccaccagtggagaacctctatacttcaggtgatgaagttgtgcaaatggaaggagtgaatgatgatgaggctccaatccatcattcagataatgaggcagaacctatggacgagtcttacgcaacacaacagttttactttgaggagtactccgcaccgaggcgaagtaaagagtcaaaggaaattcacaagcgtcttggtttcctccaaagctggtgtaagttccacgacaaaggctctcacggcactcaacaagaagtttaacaatctccaagtcaagatcagctgttcttccttaactacgacaataccacaaaacatgccttttgggagaagcggatccactcgtcaagaacctatgcatttcgatccgccttcaccaccaaaacagtcttcatatgagccgagggaacaccatgctgcaccttcaccaacaaggcaatcattgttcgaacctagagaaaaggaaaataggagcaagttgaaaaagcgaataagaacaaggaaatcagatgctggagcaagccactctaccgcacgacttgaggagccactcgattaacaacccgagcaaagggtcgagcgttcagctaatccaagttcagcacaacccgttccttagagttacacaaaggagagtatggccgatttggtctcctcctacttcacctgatcaatgaggtaacaccacctcaaccattgtatataccatagcatctttttattattttttgtttgttttgtgttttggtcttgatttctttctcagacttttattactcaagggactctgtaatttaagttgtgtgtgtgtgtgtgtgtgtgtggggngggggggttaaaacatgtttaacattgtgttctcttttcttatttcaaattttgcatcatctaaggcatagaaaaaccatttaaatttgaaaaaaaatcagaaaatgatttcacaaaaacagagtgtcatgtagattgcatatcattttaggattgtatatagtgtgcttgcatttaggattgctcatttgcataggggatagtgatgatttcaaaccgataagcatgttttgattcaatgaagtaagttcaatgccctgttagttctatgttgcataaccgattgtatctctgaagtaagactacaccctgctttgaatttgtaacttgactatactactttgattcgaaactcgcttatctgatgccattccctatctgttagaaccgtaacagaattacaaatcaccatgtctatgcattgtttgtgaactcatggctaccatatacatacttggattatcttattcacttaaccaccctctgttaatccaagtggttgactctcatttttagagcagtttcccataccctaaggctagccttatttcaagccaatgatcatttgtgtgtaattgtgaggtcttttttgattgagtttggtataacttgttaggtatgagccgacaagagcagcctttcatgtagacctagcccacgctttctgggttagctaggactaggtggagacttgtatttgggattgggattgtgtatggaatgattgaaaaagacaatgagaatgaaaagaaaagaaaaaaaaagtgagtaagagtttagagttcttaagggggatacaaaaagtgttagtctagtaaagggtttggaactcaaagaagttaggcattgtgattcaaagaaaagggtaaaacaccctatttgctaagattagaagaaaagccttaagtttgtcaaagtataaaaccaaatgcgctagactcttaaatcgtttcaaagagaaccccttagaacttgaaccaaaaagagagaaagaatgagaaaaagggtagagttaggacatctatgggactgggatcatcttctgagctatcatactatatcattgggtagatgggagtctgttcttgtatgtgtccattggcttttacctttagcattctactgaagctcaatcttttctctgagagtcccctgttactcgaccaaaccattaaagagatttgtctcttagcctaagcccgaaaccaagtgagttcataaccattgcattgcttgatccactgttcgtgcttaatgaatgttaaagggaattggttgatgagaatgcttgaatagattaaggcaagttgttaggttgcattgtgacgagtatgactaaagtttttaagtaagggtctatcatcttgcaacctagaattagctacctggacattgagcttacccgttctatatacatgcttcgatttttgaatccccaccttcaaacctctccttcaacttaagattttttgtttgcttgagggcaagcaagagataagtttgggggagttgataacactgtattttactcattttaggtatgtatttatcatcatttagctttgcatttgctcattgtatcatatcattttgcaccattttagcttattttgcacacttagccatttaggatcatcttgcatacacattgcatgttttggtgtgttttcaggtgcagaaggagcttaaaaggactttactcgaccctctactctatccaaccaggagggaagcagtagagcattctactcgatccattcactcgatccaggcagccatagaggaggcagcaattcactcgaccctcttgctcgatcaaggcagaaattagatgaagcagaagattgatctactcgcccctccaactcgatcctctactcgacccatttactcgaccaagggtgaccaactctacaagacttgttgatctatcaaagcgacttcggatcctcctcattcccctctcaaccagacatctaagcgtacagataggagaggaaaaagcatctactcgaccaattgatcactcggagcatagacacaacggcgcagactttgcagcaccctccttacttgatccccaagatcgaaaactcgcccaaaccgcctcaagtctcttgtcttctagtgaatctagggttttcaacatttcactataaatagattactttgggatttgtctaaaggatctagcttttatcctttagtttttctttgtgtttatgaatcttgaaaacttaaattagtcttaatctatttcgtttttgcatttagttctttaagtaaagttgtttagcttgtttagatctacattttggtatgatttcagtaatttctaggtttgtgttctagagaatgttgcttgagtagtgattagggttcttgaggatggattacaataggataatctataggttagtcaggtggttaagattaggttagatcccttcaggattcgttggcccctatgcggttttcactgatgtgggaattcgaccctaggtatccagcgtccaaaagacgttcaaatggatgcgttatctacgaattccaagagatttatagattctaacccaagagattggatgtttagactgcttattgactttgatagattgtttcttaaaccctgccttgctatgtttcattaacgagagttgagattaggaagtggtatggttatgagggtctctgtcacgagagtggattgacctggttttgaatctatcgtctaaggtattttcctttcgcatgttagccacctgataaaccctagagttgtccttatcaatgaatccatccttaggacttctattcttcttagatttatttgtattcacccccttattgcacttttattcacttgttatctgtgcaacttgttgattgcattttagttctatttgtcacttgttggttctactcgatccaatgatcgagtagggttcttaaagttctgatttttgttgtttgaatcctgatttaggattgttactagaaatcccccatcactataacctgacttgacttagttgcttctgtatacatcttgattgctagcaataacagtggactagattgacaccccctatagctgcatcgacatgttagtgtttaaggggaattcaactgaacctcacttcagtacataagtaggcgtaaaaatctacttattaatttagcgccgttgccaattcattgttgcattgttacattcaagatatcacaaaaacttaagatcaagttcttttacatttatcaagttactacctcatattttcgtctacttgtttttgtggtataggtactaatctttgtgcatgcaaactcggtccaaaggttctgcacacctaataccttcaaagacagaattgacaaaatagctcgtgagttacaagaaaccaaagaaaaggcagcatgtgattagaaaaagaccagctgctatggatcaacagaacagaccagctgatattcaagacccgcctaatgttgaacaaccaaaaaacattggtgttggtgatgctccaagacaagggatagtgccaccaccagt

SEQ ID NO: 35791 - DNA, 4363 bp, Arabidopsis thaliana landsberg
tcactctaccatgttccattcgggaatttgctttcagggattgtctgtgcgatctcggagcctctgttagcttgtgccactctctgtggcaagaaggttagagttcattcagtataaaccttgtgacctaactttgatcttgcggataggtcttctagaaaacccttcggcatgctaaaagacctaccagtcatgattaatggagtagaagtgcctacagacttcggggtgctggatatggaagtagagcataaggatcccttaatactgggaaaccattcttagcttcagtgggaacagtgatagatgtcagagaagggaaaataggtctcaatcttggaaagcacatcaagttgcactttaacataaacagaactccccaagggtcaaccgaagatggaagaacctctcgaaatgatagagcgatctcaggagaagcatataagactgaaagagtgaaagaacttaaaaagaggtctgataagcaagatgaaactatagagaagctagcccacactattgaggaacttaggagtaagctgaatcagatgcagaaggaagctcaacctaaaggcgggattaacactatcccgagaaaagaattcacttcaagatggtctcaggagacagattaccctccagaagagaaggaagcctattttgaagaaagggggattgagtattctgctgtagacctctccagggaggacgctgagtatgatgatggtattagagaggattatgctgaccctctctacagtttattttcttcttgataagtgtgaagagtcaagctagagacttaaaacaagctcacttgggaggaagtcccatgactatccttgtaaataatttttactttcttgttatttttgatttgttttggttgtgtttgtggttctcagaaaaaaaaaaaagaagtaacatgaaggtagagtaaaaattcaaaacttttactctactgatgatctagaaatcgagtacattggtcgagtttgagtgatgtttaaaacccaaaaacttttaaaccattactttactcgaccaacagaagctacaaagtcttccagggagtcttttaagtttgcagaggattgcgggatttcctagagtttttctagtgaacagagaatccagagaagagacaagaagacaacgagggacccgccgctgacgcccatgtcttccatgcaagagaccaagagacatggaatctcttcactcccactcgatctccacgcaaccccatcttcactcgatttctcctccatcactcgaccttgttttctcctccataaccaaataaactcgaccccatccttcttaaatcaacgctcccttttcttctttactcgacctcgtcatctcctcctcaccacctctcattcatttcgttcactcgaattcgtcattccccaacatcaacaacgtcactcgattccttatcatcatcttcttcatcgcctcatcgctcggccacaactctcttcacctctccatcatcaccgcttgccccctctctccaaaagaacaactcgacctctaccccaagaccatcactcgaccggtgcagctcaccttttcaccagagccaccatcgattactcttcttccgcgagctcaacatcactcgattacaagctcgagtacacacagcctctacaattcactcgaccgcaacgcttgcaccattttccacaccactcgactcgtttctcttcaccatctccgagctggttcttgttcaccaatcactcaatcatcctcactcgaccgcaagaagttttgccacttcaagttaaccaaagaaaacactcgacagcgagttcaccaaactggaaaaaagagaaaaagaaaacaaatttggtacactcgaccggtttactctgttggtttgtgtttttggttttgttggaactaacgtattaacgtttatttttgagttacatttgttttcaggttacatcatgagtaactacagtggaaaatcctctatggaccctgattacaatgtggataaagctgagtcctgcttcgctagaccgagagagcaacatgtttaccagagcttcagggatgaattcgaacgctctgcagcccgacgtaatcagagaaaagctgaaatcgccagaggaaagagggcgatttcaagtaaattttagctgattgatgaggatattgagactgtatatgagccatagtcatggcgcagggagacgaagctgctgaacaaacccgacgaggttacagtggaggagtatatcaaattcttcgagatgaatgacttctggggaacgaggtatccgtgttatgagactttagcccagctggagttactggaggacgtgcagcatctgttcgagaagtgtcatctggagacactcatgtcttacccttaccctgcctttaaggtggagacaatcgagtttctttccatgctgcaagtggagatgtatgagacactcacagactttgagctggataccatggggttaggcttcttgacgttctcagtgaatgaacaacggtatcagctttcgatcaagaagttagaagaactgtttcgtttccctagtggaaagggaaccaaacccagatttgacagagaggagcttaaggatttgtgggccactatagggaacaatctaccgctaaacttgggcgcggtccaagagcaaccaaatctggagtcctgtgatccgctactttcagagatcggttgccaacgtcttttactccagggagtctacaggcaccgtgtctaacacggtcatggagatgatagattatgcgcttacagggattctccgtcggacgaaaggaaagaatgtcttgagaggcgatctcaacaacgcaccaccagtaatgcatctgttgatccatctgtgtggatacaggaagtgggcgttgacgaacggaaagaagaaggtgagaggagcactatgcgtgggtggcgttgtgacgccaattctgcaagcttgtggagtaccgctcaaggaaccagggttagcaccgaggatgatggacttggatcatttgcgccgatgtgagttcttggagtttgacatggctggcgactttcaccgctacaggtttgagcattcatcgattagaatcgccaacattctcctcccctgcattgacgctattaggattctcgagggcaggaacattgacttcaaacctgcgcttgaagatctttattttgagggcagtccggcaactgaggagatcagtcacaccgaaggagctacaatagaagatgttgatgagacagatgatatagatgaggtggagtttgacacgagcatgtatcatttcagtgagcacatacctccagcgagggaaagcaagagtttgagcaaagctcacaggaacaacagcaagctgcataagtggttcaagaaacatgataagttactcgctaagtgcctcagggctatcaagtttctgaaggacaagatcagctgctcctcttccactacagttattccgtagggacagctccctcaggacattccttcgaggagatatgacgcgcccgagccaagtcagcgcaagcctgagcctagagagcaggagattccgcatgtccctgcgaggcattcatcattcgagcctcgtgaatttgggaggaagaggaggacaacactcactcgatctagcagcaggagcagacgacttctgcagtctcgtagtttacgcgaccgcggtgctggccgcagcagaaggagagaggtcgagtatcctcagagcggtgctggccgccagagagctgatgaggtcgagtacccacctgttggagctgatacagaacaaggcggctcgtctatggcctgggagcaatcacagacggccattgacgagcaactacgttcattcttcgactgaggtaagcgcctcacttcaccattgtattatatcattcgttgtgatttgtttcttcattttgtttctgtgattggatttgtcctgagtactctcttccaagtttattcgcacagtggactgtgtgatttaagtttgggagagggctcaggagtgtgtgttgcattgtgtatatttttgagtctgcattcatctaaggcatagaaaaacaaaaaaaattttgaaaaatttcagaaaaagattttcaaaaaaagaaaaaaaagagtgttcatttagttgcattacatttaggatcgagtctagagtgtttcatttaggattgttgcatatgcataggggataatgatgagatagccttgtaagcattttggttcaccggataactcagtgccctcgttgctagttgtttgttgcgtagtcaatgaatttgaaataaacctgaaccatgcctagattgctctactcctgagggcac

SEQ ID NO: 35792 - DNA, 2567 bp, Arabidopsis thaliana landsberg
  unsure (1)..(2567): unsure at all n locations
ctattttacatcagactagtaaattctatgatcatataatatccagtctctctaaaaattaataaattgaacatataatggatgatatatatcttggaccccttgacgattcccaacgacgtaagatgcagggttttgtacttcttctaccccagattaagcttcccaaactaaatccagcaannnnnnnnnnnnnnnnnnnnnnnnnnnnnnnnnnnnnnnnnnnnataatctctatctccatctattatttatgagatggagaaggtgctaacaaagtactagaactggcttggtctcatgagattccacgagaattcgctcttgttttattcatcttcttctttctcagaccatgcttcgtaaaccaactccaacaacttgtatgtttactggttttggtgctttcaacttgagagaactttaaaccttcatcttcatagtagtccgcttcgctgctgctactctcagtttcaaagatgtccaattcgctgctgctgttatcctcagcttcctctgtcatgatctgtacaccacactcaataatcttgtcatcgccgaaatcgcagctgaactcaaatataatctcgctcatagtcacatccacttcatggtatttgtttccttggggaaacaagtcaccatgaaatataaacaggtgttctgaccgaaaacacaaaaagatatatggaagcttgcagcaatgaacttcaacacctcctttggttcttatactacaacttataccttcagtttcgtagctctcaactggcaaaatgagaatggaagccttaaaccttgaggaagcagagagagtaccaggtgccagagggatggttatggatctccctgttgctttgtgagtgaactcttcagggatctttttacctggtaagcatatgtacgtggacactgatcgttgtatgattcctcttcttgcttcttcatccagtttcaaacagttgtagaatgtgagtatggttgggttgccgaaagagcaacatactctcttgagtgatgcacatttgtttgcatttagggactcgagccaagggggaagagccggaattgtcacgagttttctgcagttttcgacgataagttctactagatacgggagacttatgacgcaatctggaatcctccttatatcactgttgctaagatttagcgaaattatactttgtggggcatgtgttaatatcttgaggcttctgctgccaatctcaaggcgcgcaagacgagaccaagatccagcaaccgatggagggaaattttctatctttgtatttccgacactaagagtcttgatgttacttgagatatctggaaaacgtcgcaatcgcgagcaataattcattctgactacctcaagagatgctaagttgatgttggtgggaataactcgtagcttttcgcaccctgacatcttcagctttttcagtttgtgtagattcgaaatagaggagggaagttccaccaaagttttgcagtgagtaaggttcaatgtctcgagattagtagcattcgaaagatttgggagttctttcaatctaatggaaaagctcagatgtatgctcttgatattaggaaggggctgcatgttaaacacaacaaatgagaaaatataatattatttaaattgaatcattagatagaataatcaaataccaacctggattcctccccagagcttctcgagcttgctgtgtggcaaataaatttcgacgagacgttccgggtggaatctctgaggaagactttttcttgggtaatcttcccaatgtagtaacctaagaggaggtaaatactccatatcttctggtatttgcaaattaccttcactaggtaactcagaaaagaaagattcaaaaaataccttcactaggtaactcagaaaagaaaaattattaacttctatttttttcaacctatatctcatttgttctacctcccattcctccaattcctggaaactcctatagattcttaggaatcggagattacgcattccttcaaaagcccccttacttaccgaaacctcttcgatattggatgtatcatatgatatacctatgacagatccagtaccctacaaaatattcccaaagaagactgatgagattgttatcactaaaaataggcaatatctagaattatacatgtaagaacttaaacttactgtttcatttgtcagtacatcacgaatctcttctggctcaattataaattcacgtttcccgggctccttagactgttcaagaactatctgtctacccaattgttgtagtagatggtgcatctctattcggccgtaggtaagtatatgcatgagaaatttatctgctagggtcttaaaactatttacaacatccaagttactatcagaaagcacagatatcccaccatcataggtagatatacgcacgagagatctatcggctaggatattgaaaccatttacaacatccaacttcctgtcagctagcagggctgacacataatcgacctcttgattgctgaagaagcatgcaacgtgaaggaatagagattgatcttccgttgac

SEQ ID NO: 35793 - DNA, 3466 bp, Arabidopsis thaliana landsberg
aattattaccaggactgtgatacacgaacacgtgtgtatgcaaatcaagaagtagagaaagtgcgcgaacttcaagggccaaatcacggatctgcacctgcaacttcacctttctctgcttccgtgcatttacttaatctgtttcccaaaaatcgccgtgtctctataccattgaaccgtagaacaaacaaatactacaactgtaatcaacattgtttcattatcttctctaaggcgattgacgacattgaacatagaaacctttttcatttatttatcaaggagggaaccaggggagacgaagaaagtctagtttctatacaaagccgagatatatcttgttcctgatatttacttggagagcaaaagttgattctatatagagttgcaacttctttactagctgatccacctattaagtgactttgtggtctccttcaagctgctaagaataccaacatataccattagaatgatgcgatatattgatacaaattgaatgaaactgaaccagaaaagaaaacaacataacccagagaataagagaagggacggacctgttgtgtcaaaatctactctttctccagttgcatatatgttgtaaaagagagcagaaaggagatacaaaattgctgtaagaaggataaacccttggaaggagcccaatagttctacaaagaaaccagctccaactgtgccaactatcgcagccaatgtcccagcagtaagacacattcctataccaataataaaaggcaaaaagagggtcagacgatttttagtgacctaattgttttatgattgattgtaaggccaattcctctttcagatgttaccgggaattttgtactacagtttaatgaatcaatagtaactacagaagacgaataagaacgtttaccatgtagaacaccagaatactcaggcgcaatttcctggaacaagaaggtataaaactataaatgttaaagatactcaagacattttgtgggttaagtatgattcacacgcttgggtacctgaagattaataagaaaccccaagtggctgaatgatttaagcccaacagctaaactaagccaggcagatgctactaaaggctgttttgctgtggtcaaaccaatgagagcaatcccaggaccaataaaaccaatggactgccaaaacaaggaatgaattctcccaactcagcacaagaaagagagagccgaatgcaccagatttaattgcatcagacttatacaacattataatatgaatacagaactcttcagtccaaaccacaaacctgcatgatttttcgcgttaaggtgatgcttgtaccacgccgtatcaacaagtctgaccaaaaaccagcaaggtatcctgtgaaagccatcatactccatggaacagcgctaaaccaagcagcttgtttgagatttacatgatatacctgcaacacattatcaactaaaatcacttatgaagactagataaaaacaataatgtatttacaatttgttggtggtagggacttacagaattgaagtagatcggcatccatgaaagaatcacaaaaaatccctggaagtaagcaatttaaaatgagttacatgaattttgctactacaagaaaaatcaagagatgtcttcacaatcacaagaataaataaagagtttgattgagggaatctttatacatacccagctatgcatggagtttgcaactataactgcccaagtcggcatcttggagagaaggcgtccaaaaggaggtattccacctgtggcgtttcgtttgttctccctcgtagataatagctgcttttgctttatatactcaagttcagactttgtaatctgaggatgtcgatctggtgcacttgacgtcgcagagagccacacgagcaaccaaaggaaccccgatagaccaaaaattacaaatgggccatatatacctccttgagacataagaataggagacaacatgagtcctacaacattcccaagctgaaaccctgccattgcaataccaaccgccctagaacgttctgttgggggaaaccatctacatcaaaagtactatcactaagaacccaataaactccagtaaccagatcatgtgtgtgtcactttatcacatttgaagcagtaataaaatacaaagcatcactacctcgcaaccatgttgttcatacaaggaagagccactccttcagcaactccaaccatagctctggcagcaagaagagcccacaaggaactatcagcagcccaaggggtaagaaaagttgccaacgaccacaaagcaacaccccacgccataactactttaccaccataacggtccaccaaagttccaccagcaattggagaaattaagtatccccatagaaacgatgactaccaaataaacattcaagaaactatgagacaaacgagaacaatgatatacagtagaacgacatattactaaatttccccaaacgatcgatgagaaagaataacctgaacgataccggaaaatgatttgctccatccgcgagaaagcgaaagaggcacaatcgcgacggacatcacaacacgatccgcattgcacagcgccagagctagcgcaagcatcgcgaccactttcactctctccgacgttataaattctgaaaaattgggtagcgccgtaaactccgccgccgtttcttccggtgtacggcgagcatcgctgcaagaaactcttaatcgatgacgaggaataccacatagatcgacggaagtgtttccagtgaatttcaatgagttaacgactctcccggagcagagtaacaactttctccggcgatctcgctccggcaaagacggaatcctcctgagtgtaggtaagttcgaagtcaaaattgctcgatctccatggatttttagagcgtttcgattatggaagtcaattgaagattgtatagagagagagtaacacattgtcaccagtcgaagctgcttacgattactccggttagcgaagaagaagaagaagatgctcgctcggtggtgtctatggattgcaacagccaaatcgcatgatccgacatccgtctcgtcttgggccactaataacaggcccataagtggtaaaagggctcgccctccatatgatttgggcttcctaattagcacgatttgaagtgtataatgcagtttatttatttttagctaaacaaattaatcaaaaccttgtttggtttctcttttgtgagagaaaatagaaagttaggagctaaattggaaataaagccaatattctatgtaaaacaacttttttttttcaaaatttagatgtcataaataattaaataaaaatgtttagactttaataccgtgttgttgtgccaaatatacaagtattagtgcatatttatccaaaaaatctttgttggttgaacagaaattctaggagcattccttatcttttctaatatcttactctcattatgcc

SEQ ID NO: 35794 - DNA, 5349 bp, Arabidopsis thaliana landsberg
ccttatttaaacagagcaactgagcaacaacagaaagaaaaatcataagaagccatcttagaaagaggagtaatcaaatgatatccagagtttttttttttttctcataagggatttttattcattaaaccaatcttacaaaccgggtgaaccggataacctagtaaaccggtacccacaaccccttcagcaaaatatgcagacagaagccggcacaatttccggcgagtgaacaaccggaaacatttccgaattataaaaacaaacaactattaaaccgaaaaaagataaaagattcaatttaatcttcaaattctttctcttctcatcactggatcttttccgagaacaaaagcatgaaataagttgtcagcaaacaatcaaccacgaggtgaagcttctgatctcttgtcatcacttgctaataagaatagacttcggaaattgatatcttgacttcctggaatggcaagacggacctcaaatgaggtgattgaagccgtcaaaaacgccggaccgtttcaactataacggttggaaggagtcaagcaacccagaattcgcccaaatctggatattgattcatgtggatgagactaaaacagtcgcccaatcgaaacaccaaaacacttacctgattgtggatggtggtgggacggatcgagaatagaccatgaaactttctagttagaaaagaagaaaaaactgatatcaaattgtttcgcaaatcaattcggtgaaacaaacacaacggcaacagaatagccatgagaaccgccggatacacctgatggcgagataggacagcgagatggatcgacaaaaccggatcacatccggattcataagccggtaaagcgtaccggacggctaaatctcgatcaaaatctctctctctctgaaaagtttagagagagaagagagagagaagagagagagaggtgtttttaaagtgggacttgatatatccctattttcactgatttcatctatgttttaggtataggattttgagtctttatgttatttctcgagtctttttagtgtcttttcaggtattctatgcagtgagacaacaatagagataaggagacattttggagcaagagctaaggaaaaggaagttaaagacgattttggatccaggaatcagggaggagtgttgattgacacactcttggtgtcgatcgacaacagtttcggcccagtaaaagtcctagatgctttcgagtttacagaagagaaaatttgccctagaagacttccctattttgttactcacgcgtttcttgttttcttcctttctgtgtttcaggtgtatgcctaggcaaacaaagagcacaaaacagaagaagcttatcaacttgtctgtactggacttgggaaaacttgaacgcaccaaccgaaaaactcagagattagcaatgactaacagagtcatcagagctgatgtagaaggagttttgagagataaggatgggcaagcctacaataaggctggtcagagattgaatgatcatggactcatcctacttgaggacgtcgatgagaatcatgcgcacctcaacgcgcaattagctgctagagacgcagcagggctcgctgtcgatcgacaccaacagaggtgttgatcgacaccatcgagagcagcacacggatacaatcggtgtcgaacgacacaacagaggtgtcgatcgacaccaacaccagattcctgcagctattcctccaactgcggaaccacgtcgtactcttggggatttcaacaggcccaacctgttctatgctaattgatcagcgatcgtacccccacccttccagaggaacgtctatgagctgaagcctcgctactttactttagttggtcagcaccctttccatggcttatctcatgagcagccaatggaccatatagagcgctttgaggaccttgttctaagcatcaagactaatggagtctcagaggactacctactgtgcaagctcttcccttattcacttgctggggaagcagcttcttgactgaaacaacttaaagcaggttccctcaagacttggagaagcatcaagatagccttcttgaacaatttctacgatgatcctaagtttgatgagttgagaaacaagctgtctaccttcacacagggtccagctaaagcttaaaaggctgtgtggttcatttcaatgagtaccaacgggactgcccacatcacggtttcagtgacgtacaacttctaggtactttcttcggaggagtcaattggagataccatatggctctagatgcagcaagaaatggtaacttcaacacacgttacccaactgatgctacaaccctgatagagaacctcgcttgcagcaacagtaacaagaatgctgattttgagaggaagaagattgatggagctatttcaggtaatcaaatggcagaggtgaatgctaagctggattcagttcataacttgctcacagggaagaagcatgtccactttgcagctgaggaagagactattgagcctgagcctgagtcagaggaaggagtcttctacatagatggtcagggatacaggaagtttgggcagccacagggcaacttcagtggcaacaggtttacagggaaccagggttcctccaactacactccaaagcctgctttccagaagacttttcctcagagcagctttcagaggaactatggtaattcaacttaccaagccccccctccaccctcagcagagacaagaatggaatcgatgcttgagcagattctagagagccagactaagcttgttgtggagtttaatggcaagtttgatgctgtctacatagatcttaatgggaagatcgataatcagagctctcacttgaagaagctagatgtacaagaagctcaaactgcacaatctatcaagagacaagagggttttcttcctggtaatcctgatgctaacccaaggaagaaccgcaatgccatcttgatcagagaaggagatgatgtgtgggaggaattggacactgaagacgagttggagctcgcagttgcagagatggtgttgaccgacaccctcctgtgtcgatcgaaaccatatgggacgctcttctcagagacgactcaatacgacggtgtcgatcgatacccctctagtgtcgatcgacactggatccggacaacaccttatgaggtgcaaatacctatgctgcccgagtctgtctacactcctcatgtcccgtatccgaggaggcgtctttctaagcaagagattcatgctgctaagtgcacatccataatggagaagatcctccatactcttcctaaggatgcttctgagacatcttctgcttcactcaacatgtatgtcaagcgacttgttgacaatggaattagctcagatgaagctgagctgcttaccagagacatcagtgcaatcatgctgcctaaggccaagaaggagaaggcacaaagagtagatatagctgagtacatccgcaccattactcctggtctgaccactgagaagcttccggatccaggtagctttgtccttgattgctctatctccacaagcagattcagccgctctttgtgtgatttgggatcaagcatcaacctcatgcccaagtctgttgttgagagactagacatgactcagtacagacctactcgcatcactcttctcttcgcggatcgttccaagcgaatctctgaaggaatccttgaagatgttcctgttaaggttggtaactccataatccctgctgatttcgtggtcctggactatgagatggaacccaagaatccccttatccttggaagagcattcctagctacagctggtgctaggtttgatgtgaagagagggagaatctttctcaaggtttgtgatcagagatggagtttggcatggatagttcagagcttactaagcctatcagttgcattgcctccagcacattcacaccttctcaaactgatcagaatcccaccacagagccacacacaacgcttccattcgctcagctcgccaatgagatttgcagagcaacggtgtcgatcaacaccactacccctggcgatcgacaccctcgggtttcacagacagagggttctgcacaatctcttcagcccacaccacttgaggacctatgcgataagttttcctctatcttttctcctgctttaccttcgattaattctttaaattcttcgaggtctgcttcattcgataacaaacctatagttcttcgaaagcttgtttttcctgttgttcttgcaggtgacgagaagagtgtcgatcgacacaccactgagtgtcgatcgacacctgcagctgccccatccagatcagtttacacaccgccttggaaggataagaggcagcagcaatccttcaccactccacctacatcctgaaatccgccaagtcaagctattgactcaaaacaagcgcttagtgggaggcaacccactggtttgattttttttttttttttttttttttgatttattttacccgctttctcggatttgaatgctactggggacaatgtcgtttaaacgggtaaaataaatcaaaaaaaaataaagcctagtgggtatagttgtggaacttaggtatggaatctagaatgttgtgtaagcttgcagagaagtacatgttggttaggatttgattagacttgctaggcatatggacttagtttggatgatcatggcaatagcctacagaatgttgggagttctttcgttctcaaaacctcttccacgggttcggcttttgtgttttgctagagggcatgcaaaacctatgtctggggagtcgttataacccgattttcaccgattttatctatgttttaggtataggattttgagtctttatgttacttctcgagtctttttagtgtcttttcaggtattttatgcagtgggacaacaatggagataaggagacattttggagcaaaagctaaggaaaagtaaggtaaggacgactttggtttcacgaatcaagaggagtgtcgatcgacaccagttgcggcccaacaaagtcctatacgctttcaagtttacacaagaggaaatttgctctagaaaactttcctatttacattattagtccctagacgtttttagagggtctatatacattgtttagacctaagttttcattatcaagttttttatcaagctttttgcaaaccctgttactgagagacatgagctattcatcgagtgttttcagagattgattcagttcctaatacagtgaagagatcccttctttcccttaaatctatatgccaagaaagtgttttcatactcaaatatgttgtttccttcaatcaata

SEQ ID NO: 35795 - DNA, 5012 bp, Arabidopsis thaliana landsberg
ctaaaagcacaaacacagagaagaaccaaaagaaagaaagcaaaaccctcaaatacagagaaaactgactctaaaaccaattagattagcaacttttctttcctctttattaaattgttaacttgtagaataatcaaatcataaaaggttctcttttcaatggaaaagccaatcagagaagcaaaatgcttccttatagactaacaaaatgccgtgaaccacggcgatacacagcattcgaaggggacaataccgtagcgaaaaatgtcttcaagagcacaaaatcgaatcaagatctaccacacttaatcacacttgttgtaagtgtattctaataactatcattaatgtaatgcagcttaagatgagattaaaaaaatggattaacatgtattgtgactgtgttgtgtttgttcaagtcttcaagttccaactatgaagcacatgtttgtggtattagtttattgaaccgtagaaagaacctgcaaaattaaaaataaaacagcatcttggtatcagtagaagataaccaccacaacggtagacaagaagcatctttctttgttttttttaacctttaatttttatttgttatcttggcaattaaagaataattaagcaagactgcaaattgcaggtgctatgatcaattttgaagttgacccttttgctaaatctgagaaaatttacaagaaaaattcattacagaaactaaagtttaatgctttgggcaagaaaccctagaacaatgactaacaaaacccacaaaaatctctatatctgatatcttccaaaggcggtacctacaccaggttaaattcatctcaaaatttaaataagatttcaaaatcaaatgtgtttagaagcaactttgttaaacagcaaaacgaaaggacagtaccctaaaatagctctccgtgtaaagaaaaaccagagaaacccaaatctcaaagctatcacaattttaaaattccaaaaaaaaaatgtaggctgtttctgaatcttcgagactttgacataacagattaaaacagaacataaacaaattcacaacgttgaagtttcgtacgttacacaccaaacttcacttgtttcttataaaaatttgttttagaaagtatttggtgaagatataatcataactttttctcagagtaggcacgcaaaaactgacacatgagactatgagagtctctttctctttacttcttttgaattttgttctctttaactatttcattcagtgaaatgacatctttcacgtcttctctaattaagtttagtcaacattttccgaaagctggttcggttcaataccaaaagccaaaaggaaattcctcctgttcactgttgttacttgttagtagaccttttgaccaaagaacgtcatgtgcttcccatggatcgattacatgagtggcatttctcctaaaatttaaacaacttatctattgaaatgattaatgttagattgccaaattctatattattctgttatgatttttctttattttttaataaatataatgttattggttatcgtttataataaatattataaatattttaaaattttgttgtataagtaaggaaatatgcatttatttcaagctcccaaagtatataaaagttttagacccactaattcagaaaatatggtgtatcaaaatggttttaaggtcgatgtatttttgtgaataagccaagttcgattcctttctctttcattttcaaaaataatttgtttttattaataactagtagataagattgactgaagtctcctagttttggtttctcatagctgtgcaaaactgtggccaattgttgtaggttaatgatatgcagtttcttctttctccaacaatgccacacagaaaaatagatgtctctgtccccaattgttgtgtaaaatccgacaatctccccttcataagcaatcagctccccttgaacgcatgacttatcaaacttgagcaaccaagtcgttaaaaacttgtcttgctcatgatgttggaagtgttcagttcctgtgacagcctcttcatataattcagtcttaaaagaatacagaaactgccaatagatgagcttgaaatgccatgacaacttataatgatgattgccataggacagaacatagatgattgcattgctggcctgaaccctttttaactccccaaaaatctcactcaccctcttgacaatcaagatatgccactgcaccttgcttccattttgaagccaccaccacaagatcgttatagtacccatttgtcggaagagattgtgttgttgcttatttccttctttcacctgtttgaatttaaatctccaagacttaaagcacttcctctgtttccttctacttagtagtcttgtaggtctgtgagaaaacatttggtgttcccaagaagactgcaatacatccgtctcatttagagatatcatgacagcttctccgtaagcaacagcttgcttattaatttcttccactctatggtcttgaatccatgtgactgactcacaatgtttttttgatttagagacattagcgccaatatcagattgcaacgctaccctatctacctctccaagtgtgtcacataattgttctagtacctgtttatgtcccttcgtaggaggaattgccatctcaagtggagcttgaaaaatttggtgtatggtaaccactttacagtagattctcctaagcttacaagcagtctgcatttcctcttgcacaaaaccaaaaacttctcgattgtcccacaatgaattagcttcctttagttctgaagtaacctctagttttgcactcttgattttcctacaagttactcttctgctccaagtatgtaaccagccacgattgtgtcgtttctcaagtattctcttctcaaaattgtatttgaacatccacgatttcaaccctttaagcttcttcttcgtttccagccgttctttaaggtgatacatttgatcgaacacctggtgtgcggacatgtttgtggtgatacttgtcacttgttgaatcctcacaacataactgttaaccacatccattttactgctctcctaaatctttgccttcatcaccacagtttctaagttttccaccactgaagttattgccataagttcgttgttcctcacattttcagaatcagagacaagtagctgtggacttagcaatgtcgcatcatctatcgttccgttctcacctgagacttcattatcaacttgattcgaagattcgtcagtgacctccagagaattatgcaatttctccactggaatcgtttcttgagtcgtggccattgaaggagttgcttcttgtgggttaatcgttgttgtcttcatcctccggatctttgcctcgtctctcctttcccttaaaaattgatcttgttcggcaagcaatctgattagttccggatcttttctatcgccaaatctcagcatcaaacaatccctcaaatgttcccaagatcaaaaaagaatcatcttcgtcgtccgtgaaattctcccaaacaaagaaatcctccagccatgaaatccatgatcgcaattcatgagtcacaccaatgaaggtgggaaatccctcaagacacattgcgattgacaaaaatccccaacttttgaaaccctaatcttcttgcgttcgattcgatccgagcacactaacgcaccatttgataagaatgaaagtgtaatccttggtatttcttatctttgaatccaattacaatgaaacaaaccctaaatcgataagcttggagttacagttctccaatcttatctcccaagaacagagcacataaagctctaatcctctttacacatcaatgatcacgcaggatgcttttctctctactctctcttactatttataagcttcttcacacgtgactccaatctctcacttcagttctcacacgtgccaacttctcatgaacgtatcagaccttcaccaagttgttttgtggccgttcttttagcttggattccaacattaaaaatgtgattgtcatcatcacctcctctaacatcatttccatcatcacaaactcgagcattctcaccattgacgttttcacaagctcttttcatcattacattcttcaagaatctattccttctccgtaaatataacaaccgcttttgtccactttgcagctagacacattctctcgaaaatatcatctctagtatacaacggttcagctctataaacttctcaaaaggaagcttataccgtatcctttgcccaaacaaagacaatcccaccgactccatcatgttattacaaaaattttcttgcatgcacacaagtgtgtgaatctggcctccatcatatgtaaaatcattaccgtctgtacaaacaaaaaaaactatttttggcaaaaaaattatcgtcgaaatattgttggtaggaaaaacacaattttattttgttaactttaaacattaaaaaaataagcatatatggttattaaaaattaaaagagagtaatgaaaatgaattacatgaaagggtagaattaaaaatgagtagcattggaaggtcattcctaataatttatttattataaattctagatatttataaaataaaaactcaaatattattatatattatactataaattaataaaaaatatttcctacaaataaaaacatctttttaaaattaattattaagcatttaatcgatagttttgatacgtatataataaaatatagtttttagtctttgtattgattactgaagttctacattatagctaaagctaaagctaaatccaaaaacagaggctaggatcggaacagaagaacaaaactatgttgtggtgtagagcgtttgggtccattgcttgttgttagctaaagctatgtctggagtgtttgacgttacatgctaaatttaggtacaacttaaacttttgtctttttcttgaaaacacgtgttgaacaaatcttttctggtcgataactcaagaaatcttatc

SEQ ID NO: 35796 - DNA, 2846 bp, Arabidopsis thaliana landsberg
caattatggtaaaagtttgccaattagagtccaataagcacccttcaaatcaaatgtatttggtagtgacaggtgaggaatctatgtgattgtgaaatttggccatctgaaatcataagtaagcatttaaataaatactttgtttattttcgcatgaaattattaggtattaacattgattctagaatgacaaagatgaacctatgacaaagtatcaacattaaagaccctcttactaagacagaggctttgcctagtttggaacagacgggacatgagccaaatgaagcccacaagacgtctacagaaacaatgggcccaaataagcctaccgaacgactaaagaactaatgggccacaaaagcccatctactctaatgttctatatctttagaataagtaatttgaaaagattggaaccaaagtcccattgatcttgagtttgaaattccaagacatttttgtgtgcgtgcgtgatttcgtcatccgtgacgtcttcaaacattggttatttaacaagattctctgatttttgattcgtgtgctttctatatagttgggtaccaattcattagtcagatcgcttgttcgtcaacttctctctctaatggccaatcgatcggaggaagcagagtacgagaacgattctcggcgaaatcatcaagacaagaagaaagaaggagttttagatctggtactgaaacgacctttacggtggctaagaatgctcattgaagagcttcactggagcttcttcttcggtgtgattatcgtctatggagttagccaaggacttggtaaaggtctcagcaaagtcagcacacagtactacttcaaagacgagcagaagatacaaccctctcaagctcagatttacgttggtttgattcagattccttggattattaaacctctctggggattgttgactgatgttgtcccagttttgggttacaggagacgaccctatttcatattagccggtaaattcactgaaagttagtttctttgcttcttaatgaatgaaagatgtaatttttttttgttcgattcgattttaggttttcttgctatgatctccatgatggtgttatggcttcacacgaatctgcatcttgcactggctttgtcctgtcttgtggcaggaagtgctggagttgctatagcagatgtaactattgatgcttgtgtgacacaatgtagcataagccatcctacacttgctgcagatatgcaaagtttgtgtggtttgtgttcttcgattggttccttggttggtttctcccttagcggcgttttggtgcacttggttgggtccaaagtaggctctttaaagatctctttgaatgcatagagtcgaaatgcttcaagtgttttccactcattttgtcttctttttttggtggcagggtgtgtacggtttactcggtgtgacggcaggattgcttgttgtggttgggatggttctgaaagaatctccttctcgcagtctaggtcgcaagcatgtaagtgttttgctaccctttggtccaaccagattctttaagctagtaatgtaatcgagtaactgtgctttcaggttaacgacaagtttctggatgctggaagtgcaatatggaaaacctttcaatatggtgaggtgtggcgaccatgcttgttcatgctattgtcagctgcagtgagcttgcacattcacgaaggcatgttctattggtacacggattcaaaggatggcccttccttttcaaaggtgctttcaccttttgcataagctctagagctgtaattcaccttccatggccttgcttaaaacatttgggaactctctgtgatgtttttggctaaggtagttattttctgttgcttaggaagccgttggatccattatgtcgtttggtgcaattggctctcttgtgggaatacttctctatcagaactttctgaagaacttccctttcaggaatgtcgtcttctgggcactttccctatctgtcctgtcaggatttctggatttaatcctggtgctgcgcataaatctgaagcttggtctccctgattacttctttattgtggtagatgagtttgtttcacatatgataagtagaatcaagtggttacccttactttgttctcagctccaagctctgccctgccggtatggaaggcactttctttgctttgctcatgtctattgaacatataggacatctagtgtcgtcatggggcggaggagtactactccatgccctgaaagttacgcgtactcagtttgataatctctggttggttattgtgatcaggagtttattgagggtaatcccaattggattggtctttttgataccaaatgttgattcaaactcaaccattctccctgctgagatgttaacaagtagaataagtgaaggtgttgataccgagaagatagagatgaccgctctgatcagtgatgaagcttgagttatatcagttctgtttttaggtacaggaacatcagattcttgagatgaccgttcattgtttgttgttcttatggtttagataattttccttcctcgcagaagatcatcgaacatttttgcttacaattcatcatttgctataccgatacagaaatatatttatttataagattagtgggagaattcaaattggctttgccaaaagagatgattggctttcatgatatgaagggagcacacaaatggatattaagttatggtgtaggcatcagactctgcagttttctccgacaattcctagcctctcttgtgtggtatcatatattactctctggtttttctgctgataatttcgatggatcccgacttcattttcatatgaca

SEQ ID NO: 35797 - DNA, 1162 bp, Arabidopsis thaliana landsberg
ataataattgaattgaacgtatatcatctggaaatgaaatgaacaataaagttgcaaaaattaccaaaaggcttaggttaaacggatcttggacctctcccgccattatataatctagtaaaatgttcgacgagttgagattaatgtccgcagagtttaatatctttttgtcgaagaaaataaataaagaacccaaaatcaaaaccatacctaaaagagtccgtatgttggagcaaagagcattaaaaaacagagagtagtatacgaatttgatgaagtaactttggagcacgaatgaggaacttggacaagagaagtctgtaagtaaaacgtcgaattcagatttggcaaagaaagctgactaatcaaataatcatgttcatgaatcatgtcatgtcacatgtgctttcgtttcttgtttgttttgtcttgttctcgaacggacgtttctcacgttctccattatcaagggccgttaattcggagggtcatgatcaacgtcgagagtttccaatgttatggcaattattcttaaccgttcgatcgttttttttttcttaacacgaagatcaaccgatcaatcggttatggatcttaaatcgtatggatactttcaacaacgcacaaacgacatgttcaagtgtttccaaatctaacggaccattacatctgcttaatgtatatttataaacttaattattctaacaacattaataattatgtcgatttaattttaggtgacacgataacgttagcaatacgaaccaaattattgcgtcggtcatatataaaaattatatatacatcatgatcatttatctattggtcaaaataatattagtgctatatgatgaaaatagaaaaccatttaggactaataatatcatggagagtgaacaaggaaacataataattgagaccttatcacagtccaagcatgtgataacattaataagaaatgtcgttttgggtaagagacttatagcatggcaattgcagtgacttctcccgcggttgcaggaataagtcgaagtggtataccatatttagttcatttgcatatgattctcactttgaagctcttttattttatagaagtccagtgaaattgtatgggcgaattggagagttgatgtgttaaaaatgaaccttaacccagata

SEQ ID NO: 35798 - DNA, 3520 bp, Arabidopsis thaliana landsberg
tgttcttgtgggatttcaagccgatcacgagcatttacagctggtatatgtgatttagttaccgttttggtatccacaaatgcattaggtagttggtttgctatactctataaatgcacaattcgtcaaacttccagttctgactgtttagtgggaggattaaggtgtaatagtgatggtacacaccatttaatttccttttccatctttttattttctctccctagaactgggaattcttttttgtcaaagtgacaatcggcaaaacatgcggtaaatacgtcaccagtttgatgttataggtatcatataatttacggagtatcacaaccaacatatattcctaaccttctccgtggccccattttagtacgttatggaggtgcaatgagaacatataccgcacaacctaagatttttagatgagaaatattaagttttcgaccaaatgctaattgtaatggagaatgattgtgatatgcacttggtcttatgcgtataagtgattttgcatgcaaaatagaatgtctctagactgaggttggaagatttgatctcatgattaacggcctcacaattaattgcaaacgtttaattaaagattcagccaagccattttgtgtattggtatgggctacatggtgttcgacatttattcttgttaccatgcaaaaatcattgaatgcttgaggcgtaaattcatcaccgttatctaatctaagtcctttgatttgacaatcatgaaactgagctcttagtttgattatttgagtcaaaaatctttcaaatgccacattttgagatgataacaaacaaacatgtgactatctactagacgcatctatcattaccatgaaataatagaatggtccacatggtgggtgtataggtctacaaatgtcaccttagactcgttcaaggaattttggtaattctttatcgattttgcttggcgatggccttataatcaatcttcctagggaacacgcaacacatgtcccttgataaatcgcttggggttttattgaatgtccatgtgagctctctataattttttgcatcatcgtggtgcctggatgaccaagacgatcgtgccacaatgtgatcatcatgatctcttttgataacatgatgtgattctattgaattaatggatgtatgatgcaatcctgatgggagtcttggtaatttttccaaaatgtgtctttttcctaaattttcagaagtgatatacatgtacttttttccatccattctcagctgcaaactgagtgtcaaatccataaaggtatatatctttaaaactcaaaaaatttctgtttgaatttggaaaaaacaatgcattgtttatcgagaactttgtcccgttaggtaatgcaaaaattgctttaccggtcccttcaattaagtctatgggacctgatattgtgttaacgataactttcgtcgatttcaaattagagatttattttttatgttttagaatagtgtgcgttgttccactatccggtatgcaaatatctccaaggtttgccttagataatgttccagttgtaatgtgatccatttctaaaataaacataatccattaatgtaagtagaaaataaatttattcatcaaacacaaagcacatgattattatacatgataggtaacacaagcacatgatacttatacatgataggtaatacaagcacacaaatttaggacatttcaagcaagcgtcgatttatttatggcacataaattcgaggcatgcacgatagaaatttcagttttcaagaagggcagcctcatcgagatcattagcaaagtcagaagcatcaaggtgggttgtacccttagaatgttatgcaaggttcactttctttccttttcccttagcggattatttgtacagagcacaaaggtatgctggatttcggcatacctgagaccaatgtcccttagtgacacatctgaaacaagcactctcacgttttcttgagaagtatttgcttggatttctttcctttcgaatcatgctcaggacgaatcttttgctattaattcatggtttgtggattaaagcctcttccacgtctgtgatagcttcggcgccccgtccccaaaaaattttgttttctctaagcggatttttaacatccaatgcattaacctcagggaatgcctttgatccggtaggtcgggacatgtgattcttgattaggagctcactgtttttttcagctattaagagcgccacaatcaaatttgagaatttggtatatccacgcaacctatattgttgttgcaaagtaatgtggtttttgtgaaacgtggtgtacgttttctcaagcatctgagatttagtgatagtttcaccacaatatctcagtttggcgacaattcccaacttggcaaaattgtagttcattaccttgtcaaagtcttgaaaccttagactttgccattcgtctcgggcaagtgggagagtgatgtccctttggtgatcgaaacgatctttcaaatatttccggaattctttaggatctctcatgtgtgcatagtcatatatgacactttcatccatttgtcttataaggaagatcaccgattttgtcttttcttgggccgtcgaagaattattctcctttatagtctccgttatcccaagggactccaaatgtatctcaacattagtaaaactatggtgaataaaatattaaataaaatatggtgattaaaaaccatccatgttaaaactgtgaattagagtatcaaatgaaatatggtgaataaaatcatccatggaaacaagaagtaaattatggtgattaaaatcatccatgttaagaagttacaaataataaataagatggtgcattaaacaaccatataaaagcattatatttataaaggggcagcagagccgcactccggtaataatatttttcgacgtgatggagtgaccgtgctgatcacgtgttgttattaaatagaatatgtatcgtaaatcatctattaatttatcttgtcttcatgttttaagaatgtataataataaatatactataaaagaaagaaatataagaagaaagtaataatgaaagaaaagtgatgatagaaggaaactttacgttgttctctttttattgagattgattttatttataactgaagtggaggaagaaatatatattacaagattagacaatatttactttgatcaataaatgagaaatagactacatatgatatatgatacgctagtgtttttgattgcaataatctttaaattttaaactgttttagaaatatcttcaataaaggtttgtacctgtagtttataaggtcggaaacaagtcgggcccaaatatgtaatgaatatgtgattttgaggatttctggtcgtggatcagccatacctgcctaatagtagtagttcatagtttttgttgctgtatatatattacattaatataccatttttcaatatattttttaagttttgtggacaagttcggtatttttctagcg

SEQ ID NO: 35799 - DNA, 412 bp, Arabidopsis thaliana landsberg
  unsure (1)..(412): unsure at all n locations
tggaagagaaggaactacagggacaactggctggcagcaaccaagcgatgatagcgacgaagctttttgacccgccgaggccggcacggcctatcagggggaaacagaaggcaccaagtgacggattgggcacccaccaacagggaagcgcgaagctggcatcagaccgccgcgagacaggaaagaacgaccctaccgaggcccgggccgcgatagaaaatcaaccgacgacgagaggaaccgatgatccgcacaagcgggcaacgcgcatgggtgaaaagccagaggcgcgaagccaccgcgcgcgggaggaagacagaacgccncaaagacagaaaccgggcaagaagcgacgcaagcgcccgccgaccgaaggacgacccccaggaggagccgaggcccccaaaggcac

SEQ ID NO: 35800 - DNA, 5763 bp, Arabidopsis thaliana landsberg
caggtcgactctagaggatccccgacatacctcttctgcagacactttggttaaccactcgtcttgctgattccatttgcgtacaataaccttgtatattcaacaaaagatagtaaatatatatctacttacacaatatacagtttcatggtgctactaacaggatatcacagagaccaaagaccagaacattttttttttttttttttttgaatctagtgctaaattatattcaaaaaaaaaataactgttttacatcaagtgcaacattttttgagagtttaagctaaatcaattacaatcctatttaatttaaataaattaaactcttgaagcaaaccaagtttgaagactagtgtcatatctcttgtctcccttgaacagaagtgaagaaagggttcagatcctctccatgtatcctcccattccgttctttccagattgcgtatataaccacctgaaatacataccgagctagaaacccttctacatgtttacgtcggcatgagagatagacgatgttcgtgtgccaatcggttgaaaaatgagacccaaaaatattccttgctagatttgtccatatggccgcagaataaccacattcaaagaagagatgatctcgggtctctagagtattattgtagagaatacaatgccctggagctcccacattccaatgcatcgtccggttccttgtagataatctgttgtgagtatttaggggtaccttgagagaaccatactcctcgatgccaattaaccgtgggtgaaccggttctgagattatgccaagtatcttttgtagaaaaatgtgctctataaatatcattatcccctttacataacattatatctgctgcttccctttgattctcacaatgcaacacaagtgcattttctatatccataagcagatcttctctgtgtcgtcgtctccggcgattagcccacgcctctgccaccgtcatttgccatccaatacccatatcaacaacaccacgttcacctacaagatcagaaagacgacccaaggcacaccactgatcatgccaaaaggaggtcgtttgtccattcttcacttctactttaaacaacgagctcgccacttctcgatatttaagcaggtttctccatatccatgatcctgaacttgaatgctttatggaccaaaaagatctccgttttagtaagttagcctcaatccatttaccccacaaagaattaccatgagagacaattttccaaatcaacttcagacaacaaacatcattcgcctcttttaagcaccttagtcccagtccaccctcttgccttggtttacaaaccacctcccaaaccacctttgccttctttcgattcatatccggacccgaccacaggaacgacgaacacagtttatttatttctcgaatacactctcgtggaagccgaaaagcagccagccagaaattacacaacctccataaaactgaactaataaggttaaaccgacctgcaaaggagagaaatcttgcagtccaagtgccaatacgtttcttgattttctcaaggagtggagagtaatctgcggctgaaagatgtttcgtaacaagcggaagaccgagataacgaacaggaagagaacccacttcaataggaaaattctctgcaatttgttgatgaccgtttgctggagagccggctaaaaacagagtagatttctccatactaatttttaaaccggaccaaacagcaaactcagtgttcttggcaaacatagctctatatttgtatgccaacgctttcttgtgacggccaggaaatggaagctgcggtttgtagggaggagggacaaagaccttttctttgtttttgacagcaactggttttggagcagttggtgatgctgctgggatgacagatcgagtggttggtcgagtaacgctgtcgagtggcagatcgagtggttgctcgagtgactggacgagtggttgctcgagtgactggtcgagtggttggtcatcttgatctttcttgagacttaaatcctccccatcttgatcttcactgtcctcagtgaccgtctttggttcctccctagttgtaagtgcttttccactacgcagggtgatagcatgagcatattcttttggattctaaactgctttgcctggtagttggcttgtctgttttggagctgaagaagatgcagaatgtccctctaagtaacggactttggtattcagtgttttcatcttgacattgagatcattgtagctacagtccagcttgttatgtaactcagatatcttctttgcccatctccatggagccagaggcttgcccgtgaagcagctgttgtagcatttgtttcatatcagcgtcaggagcagcaggaccttggttttgctgaggtgcaaacccaggtggtggtggttgctggtagttcccctggaattgctgcttgggaacaaaaccttgattgtagggaacaaaaagtttattctgaccttgttgttgatgtggaggatatacttgatcctgtggattagtaacattggtgctgcgataggagaggttggggttgttagtcttgaagttgttgtatcctttgtaaccaccttgattgttgatgtagcttacgtcttctaactggtttcccttccaatcttggacttgatactgctcgtcaacaacaaggaagtgcatatgcttctgctggctaagaagaatcatgtgcagcttgtccttcagcgctttgatctccttcctgtgtttgtcatcagagtcagatgtgcctctgatggtcctatcgcagtcttcgttgtaattaccataagattgagcaaggttctcaactaattctcagccttcttcaacatctttgttctggaaattcccattgctggcggtatccacaagcattctgatgcgtggtaggactcctctgtaaagactgctgagcagagaagctttcttgaagccatgatgagggcattggttggtgtaacccttgaaacgctcccatgcttcagagaagctttcaccagtcttctgtgaaaagcaagaaatctcatttctgagtcttgcagttctggcattggagaagaactttgctaaaaaagccttcttgcaatcatcccaggtggtgattgagtcatggggcaaattcttttcccagatgtgtgctttgtcgcccaaggagaatggaaacaaacggagcttgaatccgtcttccctggcaccattgatttttgttaggttgcagagcctatcaaattcatccaagtggtcgagtggatcctccattggcagcccatggaatttattcccctgaatcatcaagatgagatcactcttaatctcgaagttgttgttctggatagcaggaggtgcaattcttttccgttgacggtgatcacgtggtgcatctccagcaccaatgtttgcagggccattttgtttattctgttcgtcagccatttcgagtggttgctgaggtacaaagttgattgtgtttctcctttctctgagtttgcgagctatgcagtcgatgttgtcgttgaaaaggaggttctggttgccttttgatcgagtttgcatacaacagaggtgtacccggatcaagaagacaacaagaaaaacacacagttagtaaccgaaaagaaaattgataaagaacttgatctaagcaagtgtgaaatctcaaatttaacaaacaaacacccaattggcaacggcgccaaattgataataggtttttaagtcaattaaacctaaagcactatcatgtcgttgtagtactgaaggttgtcaatccaaatgggtgtgatgctaacaatcaagatgtgatcagaagtcactaagtcaagccaagcaataacaggttgtggtgtgttctagcagttctacgtgaacatgcagaaaacagaaattcaagcagaaacagcaaaacactcgaccaacacagctctttgcaaataaaactccgatactcgactgcacagtctgttgccagaaaactgggtggtcgagtatgaggtcgagtaacaagaaagaactgcagaaattaagcgacagataacaagatgcagtaaacaagagtagagtaaacaaagaattcaatcagataaagaattcccgaggatggggtaattgagtagcttcgtttccttagtttacaggtgattgacgtgctcaataaactatccctagacaacaagttcattaaccaagtctaagtaccgccgcaaaagagactctcaagttaaactagtcccagactcaatcacaattgacgagagctaacctaacgtgcattacgaatcaacaagttaaacccaaaacgctccatgtaaccaatacctgggtgaagagcctcaaaaccttggaattagtggttcagacatttcatcgaacaccttttaggtgcagaaatatctgggctcaaagtccagttgatcagaaagcaatagacattaagaacaactaatccagaagggatctataaatcatactcaaccacctaacaaaccgaggattctaaactactctaacccatcctcagaaacctattcactactcatacatcattgcagaaagcataaacgatgataagaatgaacccatgatatcagtagagtaataacaagatgataacaggatgaacaacattaaacgaaatcaaaagcaaatactgaatagattaagagaaatctggattacaaaaacgtcaagaacacagtgtctgcggaataaaactttgattatcgaaaatgtaaagtacgtgctacttatagcaaaatatttcgaaaccctaacactcaaaccgacacagtattgggacggattaagaactaaactcgacctaggtggtcgagtgaatggtcgagtgataagctggagtcttcttctcttgcttgtgctcgagtgtctggttgagtgcggaatggagaagactctgaagctggcagtcgagtaaggacgtcgagtgaatgatgataagggactcgaccatgtggtagagtgattggtcgagtggatggtggttgtagtactcgacttggtggtagagtgattggtcgagtgaatgatgatggtgatactcggccatgttggtagagtgattgaagtgaatgatgatggtgatactcggccatgttggtagagtgattggtcgagtgaatgatgatggtgatactcgacctgttggtagagtgataggtcgagtgaatgatgatggtgatactcgacctgttggtagagtgattcgatgtagaagttgtggccgagtacttcaggaactctaggatgactatactcgagctcgtggtcaagtatgttgatttgatgatgtccacttcttccaattagctcaccagcagctccaaatcacctgaaaacaacacaaatatgcaatatgcatgtaaaactatcctagacatgcaaagtgatgacaaatgatgagaaatggtataaaacagtggtgatatgatgctaaagtgatgacaaatggatgctcaaaacgtgtaaaatgcacacttatcaactaacttctgctttagtgacctctttggttagttccttattcatattttccgtaataatgagagacacttcattaccttatctgcgatgccatctgtattggaaacctgaaaaagatctttaaactcgttgttatctcctccattcaagtttctgatttctcccaaatcctattaagttcatgtaaacctgaaatcttatttcttacccttcctttttttttctagaagcgtgaaa

SEQ ID NO: 35801 - DNA, 3085 bp, Arabidopsis thaliana landsberg
  unsure (1)..(3085): unsure at all n locations
gctatatatggtaaaaaaaccttcatatatttaattttttgttcagaaataacattactagtttttggccactgatacaacaaaataaaaatctcctttaaatagtagaaatatatattctaaattggaaacagcaaacccaaatataatgatttgattttattattaaatttgtgtaagattaacatatatatatatatatattttattgtataaagtacggttttaaaaattaataactcacaagatcatgacacgtggttatttgaacagtctcagatttcaacatatattaaacagattttttttattcaaaaaaacattatatggaaatttgttttaaaaaattaaagaagataattataagaaaactcccgaaggcgcttcatattgctttagtgatccgccgaaacaaatatgggctctttcaaagattcctacggtaccaagggttttttctcacttcttccatttatgcaaatttggatcatttattctcaagaatccctttagaatttgattcatctgcatatccatggataatttggtatatttggaaagcaatgaatgaaaaagtgtttgaaaatgtggataaggacccggtagacgtgttatgtttagcagaaaaagaggctcatttttggcaggtaactcaagtagagttcaatactgaaaaccaagtctcctttcgttcggaaaaccaactacgggtgagggatatcacaagacattgtgtactctggcttccgttgttttgtggacagttcatggaaagaaaacgacaagttttcaggtctaggttggttttgtactacatttaatggagggacgtcaacaatgggagctgctaatctacgtagaagtctttctcctctccataccgaagtcgaagctttactctaggcaatgaagtctatgattggttccgacaaccaagaagtaccttttttaacagactgttcagacctggtgaagatggtgtctttcccaaccgaatgaccagcatttacagcgtatttggaggagtttcagagcgacaaggaagagttcatttctttttctttatctttaatttttcgtaatgcaaatgttaaggcgaacaatttggcatgaaaagttcgtgttgaaccgcttcatatcacttatgtaaacatttttccgtatttttagctcgtctgagccttaaataatatctcatgacagaataaaaataaaaattaatgagtgtttctgtaaatgacaatacctaaatcgaacaattgagattagtttttataaagacatgaggtcacataaagctaaagaaacacaattgaagatagttaaacactacagcacaatctttgtaaatgattataggtttaccgggtagaacacaaattcgtctcgccaaggagagaagcacacgttttgatcaatttgtaaatttatggacattatatgcgaagtggaattttaacttcgatgagttcaatgttaattcgttttactttgatgtgaatatcgcctaaagtcctaaactattgtcatgttgtatatatacatatatttaataaatttaaaatttatccaactcaagttcctttgaattttcattagagctttaccacatagcaaaattttcctcgatgcaaactaaacaactcgtgcatcgttcaatctcagcttctattatgtataacnnnnnnnnnnnnnnnnnnnnnnnnnnnnnnnnnnnnnnnnnnnnnggtcttttctaactccctttttaatatgatgatatcctctttggacttacatgttcaactccacaaattattattggactctttctttaaaaacctcatactagttgaagttggagttggcttatatattagaaatttctttttttaacttccgatatgagaactttactttgtaccaaacaatctccccttcaaaccaaagaccacgagcttgggtctcctcttcaacgaaactttagcacccttaacttggcaccttcttattcgtgaaattcttgaggcaccttcttatcgtgtcatgtttgataaattctcccacactgatcatagcctaagccctaggtccattttttcaacctaggctctaataccatttaatagcttttctaagaccattccaacttccatttagtatgacattgtcctctttgagcttacatgctcaagcccgcaaggatttgttattggacttctttccaaggccttatactagttggagttgaacttgccttatatattagaaactatttttctaaactttcgatgtgggacctttgatttgtacccaacatgactcaggtctagaccagactgccatcgatacacttcccgtgttcctctatggtgacgtaaccattagtcttcaagagccattagttttacgtgttttagtagaaaagagagtatatttgtctattatgtcttttttttttgggcaaattataatttcattacgaaagaaattaaggtacaaagtagagacttaaggcctctttagccagagcatcagctcgaagattttgggtacggggaatgaaattaaaggaacaaacaaagaaaaaaactgatagagaaaggatatcgaagatgatcccgtgaagctccttaacttggagcttcttgttgattgctttgacaaaggtgagaaagtcataagcgaaagagatggatttgaaacccgacgcgatggcaacttccatggctatgagagttgcaattcattcggcaatcagaggggagcccatgttcgcagcagaggtagatccatcaaaaagtctatgaccagtgtcatcaagagagatccatccgaatccggctgtaccattagatttcctggaagcatcggtgaagcacgtaaaatccacatgacgcgagttaaggtttgggggataattgtggttagcaggagaatggggaatggaggattgagccgaatgtcattcctttgcccgcacaatagcaatttgcagaacttcttcttctgtaatcctcttcttgtccaaccgatttggttgcacgaagtccagataaaccaaaagatccaagagaaaatagggccagcaccaagtccagtgggt

SEQ ID NO: 35802 - DNA, 6822 bp, Arabidopsis thaliana landsberg
  unsure (1)..(6822): unsure at all n locations
aacctaaaagaaaataagaaggattaaatattataacaaagttccagaattttggctataaatagatcaccacacatatggctttgtatcacacaagttaaagttaattgaaaagaattaaaaagagaaatactaagttttgaaaaggcaaaccgaaaacaaaagaaatggcaaagaacctcaacttcgtcagcttcaccgttctcttgcttgtcctcttgatggcttccactggtattggtttcacgatgttctctattatactttgcagttctgtctatatcatatattttaattaattatcttgtgttgatgaacttgatatatatgtcaatatttaggaatcctagagaccgaggctgcatgcttcaagttcttaggcgagtgtggggcggtcccgttcccaggtacaaatgctgattgcacaagctgttgcgtggggaatttcgggtctgcagtgtgtgctggacgtgttgaagtcgagggaggtgtgaaacactgccattgctacggaacgtcttgataacatcaacaagtctaacctttgcttccattccgtgtgaggacattatgtgtgtgtatgtttaatgttcaagtttcttttgcttccaaataaaaaatcaagggcaaagcttcactatgcttgctccaaagtgtaagctcatgttgtgtgctttttcgtttctttcttaatcgtaaacttgtcttgtgtgtttggctttgcgttcattcattccattcaccgctagtggcagttttgcaagtttatttttaacttacaaaatatgcaggccaaatccaagagatttatactctttaaatttaaatcatatatttagattcctcgtcgtgaggaaattgcatttgatatatataaataataattttgtaatagttaagaaacttgatgatattggaccagtattactcgtgaccatttatactataagtaaatttattttttggttggagagaagtctcctccaatttattccatgaaaataaaaaaactatataagaatgggacgaaaaaaatctgtcccattaacatcctctaacataatcggtttggctacataggacagtaatcaaataaaagaatatacctaactataatgaaaacacatagtttgctaatccgtctgcaagatggttaacctccttatacacgtgagaaatacggactaaccagtcccttgatatgaagccatagcacaaacgtactaggaaagacagaggatgagaatccggtatccctgtctgtaagaacccaaccacgatcttcgaatccacttccagctcaagtcgtgttattcctcgctcccaggctatgtgtaaaccatagtagactccccacaattccgctagtggcgctgaacagattccgatattcaaagcaaaacccgcaacccagttcccggccccatcacgcaccacacctcccgctgcggctaacccgggattgcctctcgaggctccatctgtgttcaacttgaaccacccaacactaggtaaggaccatgctatcatcctctcctccacattcccacgagttgtaccccgacgcaaaaccttatgagcatcccatgactcctttgccttctcccttatgaatcgagtacggtcacggcacttccctggatcaccaaaaatatttgcacagcgccatttccagctccaccaaacgcctaatgcaaatacagaagcccacgcgcaaccacttatttctgcatcatctcccaagttaacatagacccatgctaacaaagagcttgtgaagaaagagtaccgtttatttggaggtactaaacgataccaaattcccgccatagcagggcaatcacggagaacatgtagaattgtttcttcccctcctttacacacttgacaaactcgcgaatcccccatatgtcatcgatgtctttctacatttgtcaagataacttgatgaactgccagccaaagaaagactctaactctctctggtaccacagctttccaaatcctcttaaagaaggctcccatactctgtttgtgtgaaccgtcctgcataagaaacaagtaggccgacttgactgtgaacctaccatccgcattccctctccacgatggcctgtctttggcacccgtaactgtatcaactacgtgggctgtcaagttcagcttggtagcttcagatacatatggtgcgattagatccatgtcccagcccctaccattagtccacaactctcggatctttgtacccacaagcccagccggtacttcacaaactgccgcctcagctagagttgaattcgacacccacttatccgtccaaaagcagatgtctctcccgtcaccaacaacccagcccagccccggatacaccacactttgtaatcccttccatatacttctccatgttgaagagccattgcgacggggtcccatccaagactgatcatgtaaatcaccaactttgtactttcctcttaaaatcttcgcctacagactagccttctcatgcattaaacgccatccaaccttagataaaagagccatattcatctgtttagctgatctgatacccagtccaccctcatctttaggtaagcaaactctatcccaagcaacaaggtgtaatttccttttttcagctgtacttccccacaggaaagatctcgacattttatccaaattctctaaagtcgacgctggacacacgttagaagcatattgactatagtatagtttagttttgaaatgcaaatgacgtcacaataaataaaatttggagaatgtacctcaaaaataaaacaaagctaattgagtgtttcaatcaaaacattgatgtgtttcgtacaatgttctttattcagagtaagacgaatcggttgataacttggtaaactcgtttatgaaggaccttctcatataagtaaaattcttcgaaggaggcaaaggcggcacacaagatcccaaacccttcttcaagatctctgtaaggtttagtctttgcaacgtaatcacaactttggtttctttccaaacgaatgcgagaagatcattagtaatcacgaaaagggaaccgggtttagaaccggtatagcggaatgagtaaccctctgcgataccttctcccgagtaagaattctcaaaatgtgtttcatttgcatccattggaaagggatcaagagaaggtgtatcgatgtttacaacaaacattgcagttccattgggatgacgcacatagcgctttccttcgagtatttttgtcccaatgagaactctctcactatgttcttcagattcttcataagtgagcatcagtacgtaaagagacttttccgtcttacctttaggacatttcacagctggccagccaaacgttcctccccacaaaccagcatacgcttcttgatcgacggctttcttaaccggtagtttataaagtaaaaagtggtgaaagtgcatgtatggccaccctttatagcaagacatctcactgtaggaagctgtgagaccaagaccgaatgtatcaccagagctaagaaagctttggtgattcgaaactctaatttcactctgcgaaggtgttgtgttctttgaagaactagactcccctaaaacattcgtgttctccgttggtgtgacctctatcagctcctcttcatcaaaaaaatagtcatcaccgagattttccaacatctcgtttatttttacatgcatgggattgtaacacaactgatcatcctcctccaaattcatgttcttccaatttccaccaaacttgtgcattttaaggagaatggttctgcgttcaaccagcattgcttcatcatatttcaatgtgggaaataacatttcatttaatggttccaccacatgtagacttacatggcttgtcacaatattgagcaaattttttctatcgctaaaagcgagcttccaaaatagaatctctccctccttttttgaggctcctctctcaatctcattgtacgaactcttcttttgcctcggcacaacttcgagatgaaggacattgcaactcttctcaatgcccataacaaaaccagggtacaagcaactgccttctttgtctcttccatggaggaaaaacccgttagagccatcaaacccgcagattatctcaaacaccggtgaccacttaactcggccctcttgaatccacgaaggcgcaaccttttgtggaattatccggcacccaacaacagacaagaaaccaggcatcacataaacaacattcccaagttcagggttttgttgcacccatatcccaagaagcggcttcaccatctctacaagaaacctataaagcgccttgtaagaagagatcccgattcgccagttgacaagttcaatcaaaggaagaacctttacttcttcacattgcagaagccacatcttctcggaatcgacaagggcacaaagacttttgctgcacaagattagattgcaaatgtcgcttggagaaagaaaacgagagataacagctaacacatcttctggaagcgtaagaagcaagcaagctccaaacgattccgtgttcatcatgtactaaaagtccaattcacaacaaaaccaccccaggtaattaaacacacaaatgataagtataattatgaaagtactcaaaattcaaatttaagagttaaatagcaacggtcttaccaaattcagactttgaaatcaagaaacgcagcctttgggattctcgtttaggtttgaatcagaaagcaaagaaacgaacttttcaataacccatcaatatggaaaaaggttatagagttttcttgaagatcataatggatcttaaagcagagtacgatgggtttcagaattatcgcaaggaaaacgttgaaatcttcaacataacaagaaaggcaaaaggcgacaaactgtttgataattgtttaacaacttaattaaatgtagtttctcaagtggttttaaatgtaaaactacgatatatacgtgcacatggaatttctcaagtgaattcanaattatgatagtggaagatttatgtagacgtttaataattgtctaaataattgaatagtatgttgaacgggttttaattatcaatggtcatggttttgacaggtctaagttttattagtttttgacagaagttttaaagctttaatttctttaccttgagacctagtctcgactcgaccattttccaataatttttcaatcatcgtttcatgtaaagattacggctctctcacgtttcatgtaaaccttttatttctttcatgctctaatttaaagatttcgtttcatgtaaaccttttatttcgttccatgttttaactgtaaagtttattttttatggcgagcaatgattttctggaaagttctataactaatggctttacccacacaataaagattcgggatcgatcatcgatgagaacacggtaaatggctttctagcataaaaccaacagtcacttttggttaaccaaattagtttctttctatattttaacgtatttgatagtagaagcatataggtttaattcacttgatagtagaatcacttgcatgcgaaaaaaagaagtccaaggagaaaactgtcttacttctccatgaagttaaatatggtagtgggtacgactaactactcaatctttttttaaactgagggaatctcataccaaaatttagactaattgtcgtgcccatagaatccaacatttattgccattaaagacgtttatgggtggctaaaatgcaaggtgcattagtttttctaaaagacacctgaaaaaattaaatgcatggtctaccacaacatggttttttcatagtattggtaaatttgatcactgattagtatttttttaaataatacgtaaattttattcgaaagaaaagaaactgttttatattaagtgcagcttttgtgttaagtggttctcgaaagaaatataatagtcaaattaaacagaggtgaaagcagctttttcatcttgatccaaaccaaattgccataccagcatatcttctatcaccttgttaacatatggaggagattttgttttggatttgcttgtcattgattagtattttcacttgagtagtgagaagttacaatcattgattatagcttgatttgtataaatctagtatcaaattatgttacctgctcatcacatgagacattctcgaggatgtatgagtctcttcaaaccaaacgcatctctacgccaggaagatgatatttatgttttttaatatttaaaataataatattacaatgcgtataattgtaacccgcataacatcttcaactttcgttgcctatgtactagattttaagccgcggtatactgccaaaacttgaaaatttatttttataaaatatttatattttacagtttataattgttattaagtaacgatataccacgaatccattagacaattattaaaaaactgaagttttaaccctattaaaacagcatattaataatattttaaaattttataaatattgattcaaatacatccaccatataactcaattccaaaataaaactcgttctgtaatttctttacccgtcccgtgattttttaattaaagtagtaattttaaaattttaagaatgatttattatatataaaagttttgcaaattgtatcattctttaataaatttatattttatagtttaattttatatatagtaacattatacataccacgtaacatttttggttttatataatcttttctaaattaggatgatttgatatgtttaatattagtggtcttaaaaaataataaatttaaagtttattc

SEQ ID NO: 35803 - DNA, 1633 bp, Arabidopsis thaliana landsberg
  unsure (1)..(1633): unsure at all n locations
aaatgcccatgaagcttatggattactaaaggaatccattttagagattagagttacaggattaagtgaggcgttgattaagccggaagtttctttcgaggtgctattctgtcacataataaaaagtgtgctgacaaaagaaatcattacttattgctttgttgcctgagctaaaaattgctaaccctattcaggttttcagttcgttaacccgaaccattgcaactgctaaaaatattaatgggaagaacccacgagagagctttctggacagattaccaaagtccactaaggatgaagttctacacgtaagtccgacattttccagtgtcctaagtgacaagaagctctatatgtactagttagtgaagattatgtagtaatgcatatggataagaggacttttcttctttcatctacagcattggacatctttacaagaattactgagacatttttggtcaggttatccgataacaaccacatatcttcataccaaggtaatgttattgcaattttcaaatctcccagtcccagaaattgctatatatattgattcctaggctttcacgggaaatttaatcttattatacaccaagagcaagttattataccaaatatttttcgtggattcttgtgatgttatattattatcatgcaggttggtaaactgaaggatgcaatgtccaatacatattcaaaacttgaggtaagctttgaaattcttcatctttctgacagaataagcaactgatagtaaatctgctatgttaaaacagtagttcctaatcgtaccaatgcgtttacgaaaatgaaatttttgggtaattaaaattgatgcagtattgtagtcgaatcttatttgcatatatatggtcaactgtacggtttccttgatattaaactccatgtaactcaggcaatgaaagagtcggtgcaatctgatctccggcatcaggtttctctactggttcgtccaatgcaacaggnnnnnnnnnnnnnnnnnnnnnnnnnnnnnnnnatacttttattacatcatgtctcggttaagtctatattttccactcatattgcatctatatccagtttctacagccttgcattgtaatccggtttgaaaattgatcttaatcggttttctctgctaggctcttgacgctgcgttccatcactacgaagtggatctgcagagaagaacagctaagagcggcgaaagaccaaacggctacgtatagaggacaaaaaaactaaaactaaaaagctttgcaagatctttgaattgtttcatcagccttggttggtgtttttgaaaatcttcatttgtccctttttgtccgaccattgagatacaaaaatgcgtttatattgtagtaatattttattttcttttttttgttaattaggcgttatattgttaactgcgagagacaacaaagagatcatctcgatctgaacatttgtaagagtgcaatgtattagtaaatactgtacacgactagaggacgttactacagctccaagaaagctctcagtgacataattggtaggttatttggctactggtgaatagtgataataaagggacaataatagagaaaatgctttgttggcgtagtacattgcaatggttgaa

SEQ ID NO: 35804 - DNA, 1495 bp, Arabidopsis thaliana landsberg
tctaaaaaaaatgtgcaactgtcctacgatgaagaatctagagcatcatgagctccatcaagtcatcaccacaagttttgagccataccaaccaaaaaactagacatctctcttgagaaatctgtcgaacacttggtgggcaatgttatcccagaagtttctctcaatccttgggtctctgttggagctggattcccctccaggaatccacctgcgaaaataccaaaccagcccacaaaagcccatcaagtaaaggacctacgcagctgatgagcccacatacgcgaatgggtatttgggccagataagcccggtcacctgatgaagggagataagcgaataacaacctaggaactgatgaggagatattcgcggagcggacctgatatctgggaactgacctgccgaatatccaggaggatctccgcagatcccggatggagctaccacgtgcgtagacccatataaggaagcaaggacgacttggaagggacattcaattaagcttacattcacccacatacttttacacttgtaatctcctttcacattgtaaaagctttgtcattatcaatacaaaaagtccattcgttcttagcaatataactctcaaggtttttgtgaagatctagccctcctttctcataatctcaattacaaatctctagtgtggatttcagaacccacatttggcgccgtctgtggggacggaaatagatcattccaataccgtaactaacacatcaattgtgaccaacgatcatggatcccaattcatccaattcatcgggatctggcttaccagtttagatcccaaacgatgacgttacggacgggcacctcccaacggatctctctctccgaaccagggttgatgctgtccataacgctgatgcggagaacatctcccaaaactcgaattcttctggatctgaccaaatcactccccctccgcaaacaaggggcggagaacgaaacgtcacgatacagcctccaaacggagataacccggccaacctgtctaatcaggtccctccgcgacctgccagcgaattagccgagctccgcgcaatgatcatgaatttgattaatttaaccaaaaaccaagaaattgcgcatcgcaacctcgccgcgattgtgggtcagcagagacgcgatcccactcgcatggcacatgaggtagagcgcgataccgcgggtaaggaggttccccccccccccccccgcaaaactaggcttcttgcccaggtccccatagaactgacaagtaccgtctccccgaccgatcctactttgaaaactcgtctggattttgcctcgatagaggtttacctcctatcaatcggcaggccgcctttttacaggcacctgcgaaggctctcgtcgaaaacctggcaagaggaaacgaaacaagcgcaacgcctgctttcccaagcctacgggcccacctttattccgatgggttgttcgcccctaggtaacgtggactagaacc

SEQ ID NO: 35805 - DNA, 1511 bp, Arabidopsis thaliana landsberg
aaaattatttgtgcttccactatttttttttggttttaatttgctccatgttgacatgacattctgacggtttcttatacttgctcttgttctctctgtttcactctacctttctttagatataaaacaagagcactaactcgcttcctctctagtctttggtttgtttcttgttctaacacaaagacataaaatgagaagagagaaatatcgaggactacattttgttattgatcgtaaggatcattttacaaacaacacacaacatttttataatagttactattctactacacactcttagactcacttagacttctagatactagccactacgactagatatgattaactctagacacattttattagcaagaacttaagcagctctatattacacatccaacaaggcaacaactctaacgactcgctttactcttatgacttggttgaatttagttagcaaaaccgcttcttctattgggccctaactaatataatccctacataaaacgcttcaacagtttgggcctttaacaaaaccgatggcccaattgacaaaacacaaacccatttggtttgttgactttgttatccacttttgactcttcttcttcttcttcttctttcactgacgacctagcgcgtacttcttcttttctcttcatctttttttcactgattccctattattcgttgtaggatgtaaggaaggattcaatttccaatactttcgcctcagtctctaacaaaaataaaataaaaaaatgctcaagtcctaaacaaatggcgattgtctacttaaatcgcatttttctttttcttcatttccagcgatctaataatggactttttcacgccgtcggcgatggagacgtagggtatgaactaaatggagctactaaaacgccggtgttttgaattttggctattacaacaatttgtttcaggcgtaactaatccaggatagctttttcctttaaagttcaatgggaattcaaaggtaagaaagaccagtctgtttcttctgtttcttccctaaaatttcgtggagaaaaagtattatagggaatttaaacgaaaatctttgtgtaccagtctgtttcttctatttttcgtaactagaaagaccttcacttcactagacttggcttaacttatttcgtggcatattatcattacgcttatgactgtttactacaacgaccttgacttttactatcatacaaatgatacaattcaaagtaaatgacagcgatcactaagtttacttcgactttttctaaataatacaataatttcttgttgaattttcataaacgtggaggtgtttgcatttttaactcatattcccacattgctttgtggattttatttcttttgcaatggaggggaagcttttcttgggacaatacttgatatgtgtgattttattgttggggcacccacatggatacaaaagctgtattaaaaagaaaggaaggctttgtggagcttaagcatttcgatcc

SEQ ID NO: 35806 - DNA, 4779 bp, Arabidopsis thaliana landsberg
gacaatattttcttagaaaaccgtcataatgacctttcaagtactattcataaagcaaattattatcagaacaatgattcctaaggtgatagtaagaaacccatgttcaaatataaatggtaaaagactaaaatcaagttattgcctaacagtgtaagatgcaatgcaatacatacatattcaccactttatcctaataacaaaaaaacacggtccatgatttcatactcaacttcacatttgacccacttttaatttatttccaactacaaagaaattccattttatactattatttacaaatacaacacatattgagagagagagagagtgagtcacaagaattacgacactaaacctaaacccaattctcgagaaaaagaaagagaaagagagaataaataaatggaagatgtacggaggattgtggtggtcgtagaagataaacaagcggcgaggacggcgttacaatgggcacttcacaacctcctccgtcaaggtgacgtcatagtactcctccacgtgtactctcctccaccgcgtaagaagaaatccacggcggcgcgtctcctccgccgtcacggatacaatcttgctctctctttccgtgaaatctgcgactctttcttcaacgtgagtggaaatgaatcttgatcggaaagattactagattttattgatggttaggtttgtttttcctttgtgatcgtaattttgacagacgaatactgagatcattgtgagagaaggagatgatgatggaagaatgattgctcaagttgtcaaagagattggtgcttcgatgcttctcgttggtctccatcagaacagctttctttacaggtaggaactattttgatcgatacggggtcattattaaagattttgaaccctacatagacgaatgagtaatgtttgtgactttgtgtgtctttgtgatgtgtagatgggcaataagtgggatcgatgtagcgagaaatttcaattgcaaagtgatggctataaagcagccttcaccggaactttcgcctccggtgaaggttaagggacacaagacctctaaggcgacggcgacagcgacttcagattgtttaactaattttgacttttcacaaattgaaatttatggattacagtaagattcctaacctcttttgttatcaagtctatttttaattaaaactacgtgatttggtgaaatagttttttttttttagtttgatattttggatagaaacatttcatagtgctgattaaaaaaaatgaaactttgattgaaacagggttcctgagattccgacaccaactaaagtgccatacagattatgtccgagtcctcatgccatactatggagaacaaggccccggaggagatccaaagaccaatacggtgtcggttcatagtctacgatatttgcttttgagacaaacccaccaaaactttaccttcaaataaacaaattttactcgatactaaaaagaaagtcattccaatcacattattcttaaacaatgaacagtttttcaaaccctcgtccaaaaatttggttcgagcgatcaaggtataaatgaaaacaatttttccatgagtgtcaaaatgcaaaattcatcattagaaaatatataaagaatgattgtttatgttaaatacttgcttttctctcctccgtaaactgtatctgttgtattttgtatgctaatattctaaacacattacctttttatagcaacaagttttctctcctgtattcacgtacaatcactggtatactcgtcggaggaatctattcacacataaacaaatcacaaatgtatcagacactaaatggaaattgctctgcataccaaactcataacataacaaaatgtgtgagagatacgtaccattccataatccgaaacaatcatagatatatattctgaaggagtagaatcatacctggaacacacaaaaataagaacaaacttaagagaaataagaataaagctttgtgatgattctcaaaaccacttatgaagcgctttacattagattcagaaactgaaggtttttgttgttgtccattgtctttgaatgctttgcattggttctaaatgatggtatgttggctacggcgtcaggatcgcctgtaaatttttcacacaggcaaaaaaactctgattcaagtaaatgaataatcgacaagaagaagagcgagtgaaacatttaccaagttcgttggagcagattgaatcaagtaggactctttcatggaacttgtaagcttcacaacaaacaattacaggaacactaaatgcgtttgcaaccattgcaatgcaggatgtgccaactcttgcgtaaagagttccattcgagtatattgatgaagcaccgagaaaaacacgtgtagcctcacgcatgatgtaggaaatggcatttatatgagtgtaggtacagtcgaggccacgagtcacaagtctacggagtagcttttgcccttcaaggttagggcgtgagtctacaatcactacgcggaactttttcccaatctcatgggcgtataggagaatcatttcaaccacacaagagaatccatatgtaagaagaacttctccgtctctgatttttgttacggcgtgttgcacgattgccttatctgcaataattgtcttctcgtctatgaaccggccaatgtcagaacagagggaactttttgcctctgattctgacaggtttacaggtagttttctgatttggttcttcaggaacctgattgcgtttcccatgctcatggagaggggacgacattctatcaagaatgaaacataaccgtttatcttggctgtcaagtccatggtcaggtctttcataggaggtgtactgtaatcttctatagcttcttgaaatgcttggagcatggcaatacatcgtgcattgtccccagatatatctccagccaaatgttgcaaacccacctaagattaacaaaaacatgtatatacgtcacttgaggatctatggcacagagataaaccacagggtttcaaacccttaaggattccagttcaaaagtgtaacgaacatttcacagtcacatataaacaagtaggtgtaccttatagactgcatggtgtatggaatcgagtgtgaaaaaattggagcttaaattgggaagctgattgctgcgttcgtattgaggaagatggagaaataattcaactttgttcttgctctcggtctgttcaaccacagctcgcctcttagctttatccactcggcttttatcatcatactgcatttgtgtctgagggacatccatcctcttctctttttctactgctacagctgttttttcagaaacagaggacgtgacgggaagtctttctttctttggttggggctttatggcagccttgccaggattagctctaccagactcatctgcacgcctgcttccttcgcctaaaaattagcaagagggaagcacttagatgattttacgttccactttaatgaatatggaaaacaaagcaaaaataatgaacaaaacaagaaccttttgcagcagcttttgctgcccgttgtgcctcttggatggcacgtctttctgctttagtggttttatctttcaatgcttttggttccttttccttctggggttttgtggtcgcagactcactctttcctgcaggatttattcttcctgtaagtaacgaaatgcaaaactagaaggaaacatctgtgcatggcaataattgaatgactcaaacccatagcaattcataaggtcaaagttgatactaaacacaaagtagctatttaaattctaattctaaaggatagtccactttgaaagggagcttaataacccctccagagaagcccaaagcctctgatcaaggagggtacttcaggagtctaacaaccaatctccggcaatgcagtgaaggcaatttcgttgttagagaagaccaaggcaggcaatccagtttaaaacagagatagatgaccaattcccagcctcgacgatgatggcaacaacagtttaggaggattttgtaggcagtccagtacggaagcaaaacttgatgatgcatttcgttcaatgttgaagacttgcctaaaaactaactttgagaaaaaggtatagcttgtgacggagcaaagaacagagttatgctttgaagataacgatgtcctgttgtcggtctgtctgcgaattgtccttttgtagaaatgagttaacatgaagaatacgaaggttgatgtactatgaaactaagaaacataatgctcagagagattgaagtgtcaatgatgacacgttgttgggtgggaagctctagtcaatttcatccttcacatttaaacacctctgaaacagtaactggctaactgctcctacccattatagagatgcagcttccttgacgtgcttgatttgggagtatgttgtaccacctccgcaaacgtatgcatttcacacagaccacaggtccacaacagctgactgctttatcttcaaaacacgcctctttgtttcaaagtcaagagtcgaactatcaacattggcagaaattgctcaccagacttctaaaccaaactcaactttaaacattctccaaataccgctataaggtctccctaaaactctccatgagatcaagtaacagagtattccaaagaagatattaatatccgggcctacccagtccctacggcactacaggctgccttatccgatgttacttggggatcacaattcaccacaaaggtctcttttggataatacaaaactc

SEQ ID NO: 35807 - DNA, 2273 bp, Arabidopsis thaliana landsberg
agacagttaaaaatactgaagaaggagatttggtgtctcgtgggtggtcaaccgatcaggtttggcttgaatgtatttggtcatatatgttatataaatcattcttgatttgaatttacagaaaatataaaaagggcaaagagaccatcccaggaagtgaacaaacagacccttatataacagagaaaccaacattgctatttgtatatgcggagttgtgttagttgattgttcttaaaaactgagttaaactacttgcattcttaatcaagtacccacgtctatgtacccacgtctatgtacccacgtctatatacttagacgtttattcctaatcatcatcaacattcttaagtacccgcgtctatgtacttacacgtttattgcgttagtcgaaataaaagaattttgctcttcttattttatcgctcagtattatatttcactttgtggatatcaaacttctgacttttattgaagctagctaccactacttttaataaactggttaatctcatttaaacaattattggtgacggttgcagtttcttggaaactgccactctcaataaactaatagaaattgttgtcttgacttttaatttcttgatacagtaccattaaaacttaagaaacttaaagaagactcacatataccatttgacactcaaactaacaaaagctaaaataaataaacgcttcgatctcaaatttcatcaagaacaagctaaccaaactataattcagaaagtacaaaaaccttctagcaacaatttcaacactaaaaccattgaatatacctaaaccgtaacaaaaacccataaactttcagatcaaaagagatcaaatttaacaagctaagagaacacaaatacaaaaaaatccatctacaatctcctactatggtcacatgattttaaaaaactggaaacaatggtcgcataattttaatccatcttcacaaatttaacaatggtcgcatgattttaatccatctacaatctcttatactaaattcattagctaacaaaatctcaggaagcagtgtactattattaacatacggatgattgcttaggcaaatttgaaaccaacttggaggaaatagctacagagggaaaactgtttatatttgcagagagctttcaaatacaaaaagaagcaaaagacctcaattcaaaattcaaagagaagagcacaaagtaaacaaaattctcagaaccactttgattttagctaagcagaaaactttaacgaaaacccagaaatataagatcaaaatagaagagaagcgtcaagagaagagaacacatatcgtaaaaattcaatctcacaaaactaacctgaagacttcgatgaaaagaggagcttgatgaacagaggaagctcgatgaacagaggaagctcgatgaacagaggaaggtgatgaccagagcaaatcgccgagagatcgatatcaccaagagaagaagaaagttgttgagagaggaagctgtgtttgcagcagtagtgttttagggttagttttttgtgattttaaaaaatattgagggcatttttgtcattttccacatcgatcgcaatttgatgctgaattaaaatggcgtcaacggtttttcaccgcagctacttgcgtttgccgtagcgtttggcagcatcgtcttgcgttcattaaaagaacagcataatctgcggttgccgcagccgcaagtagctgttgtgaccaaacaaacagcctatatgtatcttctttggcattctcaatcctatatttatattaatctatagtcggctaagtcatatcttaggatttactaaattatgattaataaggtatatgctttatttgatccgatatccatataatttagtttgttattgttggtaaaagttataaataattcatggatatgtagatattgtgttaatttatgtcgaaagtcataattgaagtcgaatctataatgataagtcttgcataaccatcggaagatatgggcttagattggtaaggtaatatccgtgaattttgttatttcggctttcgatttataactttgcttggtatggtaatgcattaactgaaattggctttaatgatatatgttttgttagaatcaacggaatatatgggattaggctggtatacatatattcgtaagtcaaattattttaaattaaatttatagatttgcttgttatggaaatatttctttttgtatagaatcggcattaatttgaatttattgtagatatgatggcttgataagagt

SEQ ID NO: 35808 - DNA, 811 bp, Arabidopsis thaliana landsberg
gtagtttatagatattacaaaatttagacggtctcacttaaatgatattgtatgtgctactaaaatactgacatttaaatatgtgtataaaacttgaatgcatacttatataaatgaagtaaaaataataataattatggtgtagataaatgagaaaatctaggatttttctggtcattataaaatagaattcaaaagcatgtggtggattgtattattttttccatggtaaagtgtatttttaatgagatgtattaactaactagtaaaagcagcaagtagacttgttgaacccaaaacaatggcaattatagttttgctaaggtttttcaagataggcatctaagtagtgaactaaactcatttcctggaaactaagatatatttttctgtccaacaattactttcgttcgatcttttgtttacatttagttacatttacattgttttgctttcaaaattacaatatgcatgttaatactttataacataaaataaaagttgtaaacctaaagcaagtggctgcatggtgaattccttttacgtttttaattttattgttttatagaacataaaaatgctgtgtttgtttaaaataagtttttaccttttagtcttaccagatcgaagatttacactaataataaattttcactcgagaaaaatataagaacactattcaaacatttttcaaactatgagcattattcaaacactaaacattcggcaactattctcattcatattataacgttgaaattgatcacaagttatgagtgaaaatttcatacccaagttttcgcgttttgca

SEQ ID NO: 35809 - DNA, 1907 bp, Arabidopsis thaliana landsberg
  unsure (1)..(1907): unsure at all n locations
tttgacacaccccactcaggaacctgcacttcatcctcaatcatattctggtgccaagtagcagccagactatccaaatgaatagaaactacagacactcgcatctcttcaggtataggatccaccgcaaaaaattaatcaaccttaaacaaccattccttaaccttctcaccactgaatctgggaaaatccaacttccctaaccttgttactcccgaatgattgttagcgtgaccttgccttctcatgtaatccacgtctgttgctgaagcggatgaagcacgagctgtttgatgagtctcacccagatttgactgcttagatggaaacagcatgtggatcgcctcaaacatctccgagatatggcgctcgatcttcagattttgagcatcgatcttgctctcgatcttctccatctgtgactccatcgattcctctgcttctaacgccttctctcgacgagcttgagctaactcctgagctcgagtctcgatcaccatctccgagaaacgtctttgctctgatacctttaatacagtaaaaccacaccacaacacaatcaatcaaccaaaacaatcatcaacaactccgattacttattattacgatgtaaataacaaatgaaatccaatgttcataaaacaagggatttctggattcacctcgcaagaatcgacgttctatgcagaggatgaatctcggaatgttttcagagagaaaggaatatcaacaacttcaacgataacatgaaaatgacgatgacacttgatatttattagcttcagctctacgcacacttgatttgaatcacaaccgtccattgatcttctaatcacagccgtccacgtggccttactcaatatcctgtatcacacacattattctcctgcttgttctgatttttttttttcttttttcttttctagataagatttcaattcacaaatttctttttcctcacgtaaaaaaaagaagaaaaaggtcggtctacttgtggctcactcagtggttcgaacctgggtttagattttgacttgaccataacgaaaactaactctaatgattaaaaaggcttcttttattgtgctccgattccaaaatttcacggaaaatagaagcgtcgagttcctcctctccctcaggttgtcaatggccgctaggttacttgcttggagacgcgctttgtctcttttcagcaaccaacaacatcgttttcctttgtctcaaggtttcatctctctccttctcaactttgtcatctttaagaaaaattaaagagttattgaaaatcgggcactagagttaaactggtctcttaatctgtgtaatttatacttgccttgatgtttcttttgatgaatttggttgagattcatgtaaatttgtggtttttatgtttgaatttacactagaagaggattttggggagattttggttttagggttgtttttgtagcttttagagatttggggcattagtgatgatgagtactcgtattctcatgtgtatatcatctaatatcgtctttgctctgttacattttggagttagagaagtgcttctacgaaacctgaagttatgaatgctcacataagtgctttgtcttcaacatatctctatgcattaagcagtagctgtgaacattggcatttcagctagacgctggttaagttttcaagtttggttatatatttcctgactaagatgtgttagcattagtctacggtttgatgcaaacattatcctaggaggttcctatgatgtcctgatatggtacagactgttttagcttcgtgcaactacaactactgttaaattgctctttcttgattatctttctttttttgaaaatagtctcaacagagcagttgtcgctatcaaactcactcttcagcagangtcatgt

SEQ ID NO: 35810 - DNA, 3323 bp, Arabidopsis thaliana landsberg
ttccctctatctatgtatttgacttctacgttagtggaataaaaacaaaccattgtccttttaaacattatatatattaatattaattttgatattattacagaatattctatttttggctaattagtctttttgatttaccattttccatcaaataaggcacaattctgacatttttgccagttaaaaacctatatctttgggaaaataatttcataaaatacatacttaataagaaatagaataacctaaaaagaaccaaaaattaatgtataaaattatatttttagatattaaaaatggcaaatttaaaatattttaggcaaaatggcaaaagttacaaatgctattaaaatatgtccctttctcataattgactttatattttggggactcataagtaagcgagtttacatccaaataccattggtgaatttaagaagcaagaattatttggatgtcgattatttaagatgcacggcgtcttatccttctataggttaacaaacgttaaaaaaggtttgaataatgtaatcttatattggtgaaaactttgattatttccctaaccgctgcaagaaacagtatacatattaccatgcaataatggtctcaaagtctttttagttaacaagtctttctaaattatgctacagttcaaaacaaattcttcctcgcaaatgatgtttcacatttgttatcttgagggtatcgtaaattgttgtaattctaatgaataaaccaacattgatcttgattttatatattgatttttagagaccaccataaacttacataatttccatcacaactaattttactctaaaaataacttgtgatgaaattcaaatgaaattatttataataaaaattaaacttttattttaataagatttttttgaccaaattctcttcttcctttatttacctagcattcttactttgattgtgggcaacgaatttgaaaaagcttgaaattctgaaatcaaaactaaagggagtgtattcagccaaacattttaagtgaatttgggttaaaatatcaaatcctatgttattcaatcattgattttaaaatttctaatgaaatccaatatttattgaactagtgatttgaaaatctactttaaaatctcatgttattgaaaacattttaaggattggatttttagtaattttaagagactttagtgaattttagtggattccttagtttaaatacaaaaatttaaatctcatagtttttttttttgtaggcaaatctcatagttttaagtgggatttgagaggattttgattttatatttgagttaattggggttttatatgttttttatataacaaattgttgttttgttggaaactttcaggtggagttagttgaggagaggcctctgttttttttattgtcttctttagtctctttggtattttggtttgtcttctcttgtttgtgagattttaaacattgtctacaaaatgacactttttaagtttaaaattataattggtcatgcaattagaagtttatacttttaacgaatactgacgttgtaaagagatttggacaagacttaaaactgatttaagtaaacaaaaagtagttggcaagtcaacttttaagggacttggtatggtcttgacttcaccttgacacaacagtcatctagtctctgcctataatatgctgtaaaagcaaagaaaccaaaccgattccacccaacaaaccagcaataccaaatacaatacattcttctctatctattgttcctccatggatatagaagagatggaaggaaataatcaagtggaggaacatcatgtcgacacttctcgtccttttagctctgttaaagaagctgttgccatatttggccaacggattatgctaccggtacaaactcataccatgaactctaaatcggcaagtcctattgctgctagtcgtagcatcaaccagaacgctaaaccaagaagccctggactcagccagaccgttaaattggtaattcctactgctagtcctagcatcagccagactgctaaattggtaagtcctattgctagtcctagtataagccagaccgcttcttcatcttcttctccatggaagcaacgctccttgttgcccccttctcctcaaggtccaaaagaagagatcatggatgtgttgaagaagcttgaagccgagataacggaaacaaagacagaggtgaagatgttgaaggagagagaatcagagacagaggttgctttggctactttaaacgcagagctacataagaacatgtcaaagatagcgaaagccgaagctgctgctgcagggaagagcgcggcagccatgacgaaatcagttagcttcaaggacacaaaagagaaggaaaatggagaggaccagaggaggaaagagctgatgaggaagatgcagaaggagtatccttcattggctcagatacttgacagtaacaaaggaaacagagatgggtattttgcgaacactaagaagacgaagaagaagaagaaacctatcattcctcttgtgggagatttcttcttcttcaagaagaaaggttcttcgcctgaaatatctggacctctttacactacctcttccaccctgcacttttaactgatatacccaagatcatgtaccctgcaagtgtatatatatgtatatgtatgtatgcacatcaatattcgtaatatctatgtatgtatgtgttttcgtgtgagtgtgtttgtgtgtgagcgtattctttatttgtttgtctctttctctctttgtttggattttgagtccaaaccatcagcgtgtgttccccctctactataacaattacctgtcaactatcagatagtgaatatacaatgttactctactattagcactgattagatacacaatccaaagattaacttctatattcgtagacaaagataaagtgtgtgattatacaaagttaggaagtcagtacgaaaaaggccaagtgagcatacctttctagagacaggtaactcgcaacaccgagcccgtgtgagcaaaaggaattggtttctggaaccaaaacacccgccaggttagcaaaaacacagaacaacaagtgataactattaacaaatgagttctgcaaagatgtattattaaaaaaaggcttgtttttattgttccaacgggattaacaacaacgaataggatccatacagaaaagagatgtaaaaattacaacagcacggaggacgacgactgcagcagataagggaaagataaaaaaaaagagacacgcaaaggtaccaaaaaactcagagatttacaccaaagagtc

SEQ ID NO: 35811 - DNA, 4935 bp, Arabidopsis thaliana landsberg
tatctcttgtaaggatctgtttgcaggttcgtaagtcgtatttcctcattatttgttgttaaagtctcaactttgaatgtactttttttgttaaagtctaaatttgaatttagctgtgacaaacttcaatttcaccattataacttttttgttggtacattgaaagtcgtttctctattcaatgacaaatattattcaccttcacatgagcgtcaccattttgatttccaacatgaatgtcgtttttgttgttacgctgcctcacgggttattgtctgtgcagcgagcccacaagacccgcatttttatccaaatagataaggttacgtaataggtactactcaagatatatatagtgcaaatattttccaaacagataacaaaacgatctccctccagcttcgagagtttcaggaaaagatcttagtagacctttagcgaattcgttttcacaaaaagaaacataactgatacatgaaacaacccttatgcattaaagcttctaatacaaatcatctagaaaacgctagaaaggagattagcagcggtggaaatagctgctccagtgagagcagactgaaccacttgctcatggcttgtcctctcagacgtcgtcatagccattgccgctcctgtcaatgctccagctaccgcgctgttccgctgtgacacatatcaaattacatactaattaaagatcatgttcatcatttgttcgttgatgaaaacaaaatgacacaagtcaaattaattagactaacccaatcatgagctcctccacgaacctctgtcataccgtaagtgatacctgagtacaaccctgccgctagccctaccattcccaaatcattaaatctctttccaacgttaatcgtgaagcgttaacttaatcaaattcatatataaactcaccccattggagagattcttttcctgtgttcttcacctataggccacaaatttaaacattttcagttaactaacaagaaaccttatgagttacgaccattctttatgtattattttgcaacacttagatatgaacacactagcacactagcacacgaatatttgacgaataataaaaggctaataattagcgattgtaataaactcaccaatgcatcaagagatttgctgctttcccctgattaagaaaacaacgataaaacatcattaagataaacataatgctgattacataagatcatcaaccaaatatgatacaattatgttacggacctctgagattagggaacctatgtttcttgttccctgtaatctccgacggtggacccacgttgttcgagtcaaaacctgcccctaaaatgtataatcaaactaaagtacgttctctatttattcattttcactcttacattacatactcatttcttatacatataaatcataagtaagaagaaacccgccggagtttcttaccgtcaaccacggtaaagtaagcttcccttgacacggcttgtaaagctcccaccttcatagttaatccatattaagctatgttactacatatatgttacatgcatatacgaccgggaaacgaagagatatggatgaaaacttactccggcggctttaacgaaggaatctgcgatacggttaagaagaggatgaccaagatcgaacaagtgtgccttctcaaagcttcttatctcatccattacaattcttcctccactcttctccatttttttctttctttcttcacttgttgcttctctctttctctgttaatacttctctcttcaacaacaagtaaggagaagattgtggaacagaacagcgttcttttgacacgtgttctgcttttccacacgtgtcggagtctgccgtttgaactgttcgccgttctccttccccacgtggctctcacaagataacgtcaggcagaccgagaaataaaaggcccaatgggctcagagttggatattataaccgggaattttgaaatctccggttttaaagacgagaaacgtgacacgtgtcatctccgctttgatatctccgcctccgctcgtcggagtgagactagtacagacttgtcatctccgtcactccctttttctctacacagatctctcattcactctctcgtacacaatgcaatcggctctttctctttccttctcacaagcatcgcttcctttagcgaatcgtacgctttgttcatccaacgcagctccttctacgccgagaaatctccggttctgtggactccggcgagaagcgttttgcttctctccgtcgaagcaattgacctcgtgccgtttccatattcagagtaggagaatcgaagtctccgccgctgcttcttcttccgctggaaatggagctccatcgaaatcattcgattatgatttgatcattatcggagctggagttggtggccatggagctgcattgcacgccgtcgagaaggtcctctttcttcctcttattaattaggaagaattcaagttcgattatgattctatgctttgccaatactctggatcaaattgatagtggaatcatatgctttgtttgataaagatggttcaggaatgctttgccacatctttttcaatataccaaaattgggatcgggccagcgattactgtatttctttacggtattcatgatctcatcgagtgattgttgttttgataacgttgtatagggactcaaaactgctatcattgaaggagatgttgttggaggtacttgcgttaacagaggctgtgtgccttccaaagctctacttgctgttagtggtaggatgagggaactccagaacgaacatcacatgaaggcttttggtttgcaggtagtaaaaattcctgtagaatgcaattgtagacgctcaattttgatctcaaatcattgtgaagcaagtattatcttcctggccttgactcttgtttccttccattgactcccttggaaaacaggtttcagctgctggttatgaccgccaaggtgtggctgaccacgcaagtaacctggctaccaaaattaggaataatctcaccaattctatgaaggcacttggtgttgacatattgacagggtttggcgctgttctggtcagtatgttattgtctttggttgactatataaactccaaatgataggtcgttgttatgtggtgatcctaatactctttagtcttttgtgcactttgcagggcccacaaaaggttaaatatggtgacaatattatcaccggaaaagatataatcatcgcaactggatctgtaccgttcgtcccgaaaggaattgaagttgatggtatgtgtttttttataaatgatatgtgaaaggggagttgcctcaaaaaccaaagcttctcatttcttttagtatagcaagtaccctaatattcctcatattttgtgctgcaggaaagactgttatcacaagtgatcatgcattgaaattggagtccgttcctgactggattgcgatagtaggaagtggttatatcggtcttgagttcagtgatgtttacacggcccttggaagtgaggtaacattttgattttgtgctaatgatattactttagtacgactttgtgatgttgtgtccttgtccttgagattgtaataactgcaattagcaatgttctccaattttctagttctttgtttggtctcttcctgtattgagcttgtttttgtgtaaatagtagaaaataagattttaaggtaccaatctgttggtttttcgatttaaattgtagttagtgatcgaaaacggaaaccttttgtgcaggtaacttttatagaagcactggatcagctaatgcctggatttgatcctgagatcagtaagctagctcagagggttttgataaatccaagaaagattgactatcatactggagtctttgcaagcaaagtgagcctgttatatcatgcattgcaaatactgcttctctttctctatacagtgtgtccatgtattcatctgttaaacttaaatctattcttattcagattactccggcaagggatgggaaaccagttctgattgagcttattgatgccaaaaccaaggaacctaaggatactttggaggtaaccaaatggaatttaaaagataacatgatctgatgtctcacaaagagaatatttaacagttactgggtccttaacatgatctgatgtctcatgcctgaattgggaagatttgtgccgttggtagtaggtccttagaagtcttgtttttcacttttttgcttttcgctgcagtattaaccacattgttactcttcccacagaaatgtaagtatacacattatgcataggtggattagtaaagcttctcattttctgaatttattgtggcctttcgtctcaagatagaatataaatagtcatgtcttttggtttcttttcattgtaccatgtgattttctgcgctgaaagtgtaattttgttttccttctccaggtagatgctgctcttattgctactgggagagctccattcaccaatggacttggcttggaaaatgtatgaaatgacactaaatcccaccttttagtattgtcattttggttaccagagaatgtttagttgtcagaaaattaaccttgaagctgtcatctcaatgcaggtcaatgttgtgacgcagagaggtttcataccagttgatgagcgaatgcgtgtgatcgatggaaaggggactctggtcggttttatttgcatatacataccttttccttgtcagcaattctttctatatgctaaattcatttctacttgtgataggttccgaacttgtactgcattggtgatgccaatggtaaattgatgcttgcacatgcagccagtgcccaaggaatttctggtaaatggcttatcagtaggaggctactaacaatgcaatgaatattttcccttttttcttcttgagccttgtctctagag

SEQ ID NO: 35812 - DNA, 2383 bp, Arabidopsis thaliana landsberg
tcctttcccactgttaaacacacaactaaaggttcctgtttgcaggctgatattaattatcttggtaatcttctccatcccaatcttgttaaactggtgggttattgtatcgaagatgatcaaaggctgcttgtatatgagtttatgcctcgaggaagtttggagaatcaccttttcagaagtaagtaaaacaactacaaccttcatattctaattacactgtagagttattttctttccttttctttgttttcgatttgggtaacaagtgtctacaatttagagatgtgtctactccatattgttaaagtgattagaatctatacagctaaaattggaacctttctgctctatatggtaaagttggtaccttttagtgctgtcttagatggtttatattgcttgactgtattgacccacgaagcaataagtaaatccctcgcattcattgtttcaagatttttcggcgtaaaaaatgtgtttaaaaagacacagagcttttgtatgatttatcttctcagttatcattgatgcaaatcttttaatttgtgaattaacttgtgcttcgtgttgaagggtccttgcctcttccatggtcaattcggataaagattgcattaggtgaaaaaaaggatctcagtttcctccatgaagaagctttgaagcctgttatatatcgagatttcaaaacatcaaacattttacttgatgcagtacgtatctcttactctttaggatcaacatcttatatttgcaaattttttaaccaataaatcccattgtcaggactacaatgcaaaactatcagattttggacttgccaaagatgctcctgatgaaggcaaaacccatgtttctactagggttatgggtacatatggctatgctgctcccgaatatgtaatgaccggtgagtcctctttggtttcatccattttcttcaacttgaaaacattcaatgtttacatctttgttgatttgcttcctgttgaacttgttaaggtcacttgacatcaaagagcgatgtttatagttttggggtggttctacttgaaatgttgactggacgacgatctatggacaaaaaccgcccaaatggtgagcacaacttagtggaatgggcaagaccgcatcttcttgacaagagaaggttttaccggttacttgatccgaggcttgagggccatttttcaatcaaaggtgctcaaaaagtgactcagcttgctgcacaatgtcttagccgtgaccccaagattaggccaaagatgagtgatgttgtggaagcacttaaaccacttccgcatctgaaagacatggcaagctcttcttactacttccagacaatgcaagctgaacgtttgaaaaatgggtcaggtcgatcccaaggatttggatcaagaaacgggcaacaccaacccgtgtttcgaacactgtctagtcctcatggttcttcgccttatcgacatcagattccttcgccaaagcctaaaggagcaactacatagctcttacgtggtggaaataggccacaaacgaacagagctagaaggctcaagcttttatcgtcgtttttaagcaacaaggagatatttttaaacaacgttagggtaactctttaattgattaataatgtacgatggagaagggtaaatccaaatggaaaaaaaaaaaactgattttgtcttccattgctgaaagcatagaaaagttataaattgaaaacatttttgatgctctttataaattgaaaacaccaagtatctaccattttcaaacgcaaaagccagtattccggaaacagaggtatcgtgtttgttcatctacttctggtggtcagaatgatagattcaaagtagagtacactccttggcttatcgttgggttgggcaatccaggaaacaagtatcatggaacaagacacaatctttttcttttactgatttgctggatttgatctcggcaatgctacaactttgtgttgttttcaggttggtttcgagatgatcgatgtgttggctcgaaaagaaggggttttgatgaacacgatacagtccaaagctctaatcggaataggttctacttctcttgcttttggttctttggtttgaagaataataaaactgatgactttttggttctatgtaagaatcagtacaggtgctattgaaggtgtacctatcttgttggctaaacctcagataaaaatctgaccaactagacaaaattaattagacatgtaagaagaacctcatagaaaaatccactaagggaactccaaatggaacaaagtatagcagaggcagaaaataaaagagagaaccaagtaaaagatatggaacagagtattgtagcagaggcggaaaataaaagagagagagccaag

SEQ ID NO: 35813 - DNA, 1758 bp, Arabidopsis thaliana landsberg
tgatcatattgcagcttagaattttcaacttggacattgatttcatctggtttatctggtgctttggctctgagtccccgctttcaaacctcacctccagcttgttctgaattgtttgcttgagggcaagcaaagactaagtttggggaagttgataagtgtatatttttgcatcttttgagcatccatttgtcatcactttagcatcatatcatcactcttttataccatttctcatcatttgtcatcactttacatgtttaggatagttttgcatgcatgttgcatatttgtgttattttcaggtgattcagagctgttgacgagctaattggaagaagcggaccttatcatgcaaaaccactcaacccccaggtctagtagacgcttcacaatctcagcagaccactcgaccccctggtcgagtagaggacatcaccacttcacctcaccactcgaccccgaggtcgagtgtcttcatctccatcaccttaccatcactcgatcacctcactcgatcccacagtcgagtgtcttcacctccattaccagacaaccactcgatctcaccactctaccttgaagtcgagtatcaccatcaccaccactcgactacacactcgattgcaagcttcagagtcttcttcattccgcactcaaccagacactcgaacacaaggaagaaaagaagactccagctattcactcgacctctcactcgaccacatgggtcgagtacagttcttagcccgtcccaatacttcatcgttttgagtattagggtttcgggatatttggctataagtagcatgtacttcacattttcgacgaaaaaaagtttttatctagttttattccgcagaccttgtgtgctagacctttgtaatccggatttctctttatctattcagtattcagtattcagtttttgttcttgatttcgtttactgttgttcattctgttatcaccctgctgttacactgttgttatcatgttttcaacctgttcaacgtttatgctttctgttatgatgtctgagtagtgaataggtttctgaggatgggttagagtagtgtagaattctcagtatgctaggtgattgagtattggttgatagatcccttctggattagttgttcttaatgcctattgctttctgatcaactggaatttgagcccagacatttccgcgcccaaaaggtgttcgatgaaatgtctgaaccactaatttcagagattcgtgaccctgtaccaaggtattagttgtagggagcgttttggctttaacttgttgattcgtaatgcatgttaggttagctctcgtcaatggtgattgagtctgggactaggttaacttgagggtcaatcacctgtaaacttagatttggttaatgaacttgttgtctagggataatttattgagtatgtcaatcacctgtaaactgaggaaacgaaactactcaattaccccatcctcggaaattctttatctgattgaattctttgtttactctactgttgtttactgcatcttgtcatctgttgcttaatttctgcaattctttcttgttactcgatctcatactcgaccacccagttgtctagcaacacactgtgcagtggagtatctgtgttatactttgtgtctgttactcgacctatcactcgacctcacacagtgctctacaaagagctgtgttggtcgagtgtttattgtttctgcttgaatttttgtcttctgcaagttcacttagaac

SEQ ID NO: 35814 - DNA, 2011 bp, Arabidopsis thaliana landsberg
  unsure (1)..(2011): unsure at all n locations
catatccctctgccttctctctaaaagtttaagtcgccgccggtcttagtataccgttttcggtggctttttgagcaccggaaccggaattccatatgttcttcttgcttagctccgttttctctctctttgtccggcttatctgaacttttttactcccaacggtttcagatctagatctgaaattctagatctacaaagtctaaatctaatttttttgggttgattacttgcttttgtcttcttcaagtgcagccccatttctcgccgttcaatccatggcagaggcaggctctttccgatccttcaccgcctcagatctagttttctcaccattgaagatctagttctcctacctttctccatgagacgctttccttcaggtctcggggtgctgattttgcttcaccgccgttcgtggtaaagagtatcttggttttgtttccttttgtgagagttcctagtctcagatctgttgattttatgtttgttttagactttgtatttttagttttgaatatcagaattatgaacctggggagaatttgttcagatatgatgtatttgtagtttgggtttttcccctttagtttgattttgtcttcgggagtttcatttgcttgccgataanattctctggaaggattgtttccttgccggcctttgtaatcatgtgattctaaatttaatcaatgaaatccttattctagtgaaaaaaaaaaaaaaaaaaatatgtcaaacaaaaatggttaacctatagtctatagatatgacatatgaggaaaaaaatgaaaaagacgacgcaaacgcgcagctctttctctcctgtgcgtgagaaatcaggaattggcaagacagagtagaacacaagttagggtttttcaattggagttttgacgatggaacttcgtattgcgaataagttccggcttggtcagaaaattggtaacggcgcattcagagagatttaccttggttcgattctctctatgattttaccaaaatacttcctcaattatgctgtttccttgtaactaggtcactttctgttccaactgaccaacttccaagtgatttgatttgatttgatgacttggtttgcttacaagaactgatgttcaaagtaacgaagatgttgccattaagtttgtgagtgctttaaactttgtagaactgagtcgatgataacggaatcagatgataaagagtaaaatggattcgaaagatatagattgataacttgatacgacgttcatgaaacgcaacatcaacttctcatctacaagagtctcaagagagaagctccggtaatatgatgaggaatagcttgagaattacagagaattctcaagaacaaacaaagaaccaaatgaagaagaagattacaatctcagatttcagcataataatgaaaagaagcagagactgccttttaaagaatctccgtaaaaactttctccagcttcgcccaatgttattctgccacgcgtctcaccagcgtagaccagtctttttcctccacgtagctttctcatttgatgctcatttcctacaacaaatctcccctcttcgaaaaaccttgaccacaaggttagtctggaaattgtcactgccaaacaaggacttttccttagtgccatgagtccatttgatgaaaacaattgaatcagctctgcttggaatagactttttagagtctcttgtgcttcgagtccgatccctgggtcaaaggtttggctctgtatgacttcaagttttcgttcttccannnnnnnnnnnnnnnnnnnnnnncgatacagtctctgatacatttctctaacactcatggcctcactgccaagcttggaaacaaccaatctcctgtcgcataagagctgcgtccctatgtcactctgtttccaagtagaatcgtcataatgcccacccccaaatgctgaaacggagtgtatgaacttagaaatccagttatgctttatttggaacttctcatcactaagcagaaacggtggta

SEQ ID NO: 35815 - DNA, 1970 bp, Arabidopsis thaliana landsberg
caaagcatcatccttatcttcaactttcaaatgcaaactatctagaacaggagctttatgtgaaatcaaagacctgaaaacattatctgaaaacgtataatgataatgatacttagaatcaaacttgagatttggcaccaacttccaaagagatttccattgtttagacaaaacactagtggcaatcacagtttctgttggaagtgacgacaatatgagcagaagcaacgcttcaggcaactcactgatcctgtcctcctcattcactaaacctcgatttctcaaaccttcaccaccgattttgctgtgaaaaaaaaagtcagaagaaaacaatgaaagggattccgagaaaaaacatagacgaaacaaagaaacataccatttttgttccattttcgtttaacagagacatcaattttgctaaaaatccttgagattactaacacttcaacctcaaatgcaaacgcagccgaacacacagaatccagctagagcttagatatgataatggtgacgagattcatcttcaaaattatatccacttgtgtttgattagtaaaagaatcacctaggctagatacaaaaccctaacagaataaaaacagtgatcaaatccgagccggatcgtttttttccaatgaaaccaaaatccaaacccaagacatttacaagcccaaagaataaaaattgattttttttttttcggcccaccggcccaataacgaatagttaaactgagtttaggtcttcactatttaaagctcgtaaaccctagacttggatatacttcagtctagagccgcgcaagaagacgattctctctgtgagttttcgctcctctctacttgtcgtctctctgattatcttcgttgctactgtctcgttttgtgtataagtagggttcttgcttgttttctctcatcgtgtgttctgctgctagctcctgtagatttttctaagttccttgttttgttcatttcgagttttattgatctgatataaatcgtccgttgatttgttattttgttatgctttattgattttgcagaaagtatcgtccttggaatgagtaatattacactttcagtgatgaaacttttcgtttatttgattggttttgataacatccttactgtattacgactgttaatgtaatgtgcatacaaactctcgaaactttgattctttaagagtttgagattgtcacaagtctcacctttagtatagatttaataagagtgatctttgaaatacttcaagattcgtatctgttttactctatttatgttctctatatctttgagatggtcttttgtttttgaagtttgaggttttatcatttgatttccttgagctgtttaaagtttcatcatttgatttaaagtgtgtctgattgatgttttttggcagcttgagttgaagaaatgaagcacaacaatgttatccccaatggtcacttcaaaaagcactggcagaattatgtcaagacatggttcaaccagcctgccaggaaaaccagaagaagaattggttagtagtagtaatgtcaacacttctgatattgtcatgtttcgttttaagtttacactacaatctctttgggtcttattatgttatgttgtacacagcgaggcaaaagaaggctgtgaagatcttccctcgtccaacttctggacctctccgccctgttgtgcatggtcagactcttaagtacaacatgaaggtcagaaccggtaaaggattcactcttgaagagctcaaggtttgtaatttctatctctctttcatttattcatataactatcaagtttcatttcttgctatataatcatgggattggtggttattgattattgaaccttacttggttggattatctatttgtttacatatatagctatcgtgtttcatttcctgctgaacattgttgggattggtgattgaaattggctggatttttttttactatc

SEQ ID NO: 35816 - DNA, 1573 bp, Arabidopsis thaliana landsberg
agaaaaaggggacccgggacaagctagcagcggctcaaccccccaaacgcacatcccagaacttggtactctgtctctattgccaaaaagccaatggcagagctggatcaacttggatattattaaggtatgcatattctttttcttctcaactctttattgatggctcgtttctctgttgcgtcttccagtcacaatttatatttgatgtcgcttcataggcccgcaataaaccaatagagcctccaaagaaacctgaaaaggctcctcggggggggcgcgcaaggccctcgcctgccggagatatattattcaaggcaaatgactctgaagctgatggggagaatgaggaaaataataaaaaggaccagaatagcatgaagaactttgatgcattggaatctccattctcaaaacatctcaagtcttcatgggattcaaaacactgtaagtgatggtatttgtttaagttttacaggttaatcaaagcttttctcgtcaatgtacaatacgattcttagctccatgtacgttttgcagttttagattttaccaactacatgaagagtttatccccgtcagctctcgacatggagcttcggatgcttgaaatcatagatgaagatgttgaagaagagcttatcaaaagacctgagtttatattgattgggcaacttctggattacttcatcaacgaggtctcttgcaaaaacgactttgagtttatgcaggcggttgtgaaactatttctgcaggtaaatgtaaatttcatttccagtataaccaaggaatcagtttcttacagagacacctttaggttacaagaatcttgactcttaacaaaactcggtttatctgttgacagatccacggtgagaccataaggtgccacccgagtttacaagagaaggcgaagaagcttttagaaactcagagtttggtgtggcagaaaatggagaagcttttccagagcacaagatgcatagttaccttccttagcaattcacagttttgaagaagcttactaacttattgctctgtttttgatgttgctctgttttttcacaaaaatagcaattttgaagaagcttaatatattgccctgtcttttagcattaacatgtatcaaatggaacatgtcaacgttatcctgaattggatgatagggtttaaattccgtgagaaatcataaaatctgcaacctaagatcacagatttgtcctccaataaagttgaaaaaatcaaccctcaaaacaaaaatactaaaatagaataaaagaagagtttgatgtaagaaacaaagaaaaattagtcagactttgagagcttcctcttcattctgctataaggaccaactgttgtatccataatatacatataaatcacttgtgaccatgacttatacgactccaatccttcataatactctcctgcaatctccttcaccaaatgcaacttatttgccgatatcctctggacatcacgatgctacgtatggtaaccaacacttcatgttattagattcaatgtaccgcactacaatacaaatcttgattctggtaaaaacataatg

SEQ ID NO: 35817 - DNA, 3325 bp, Arabidopsis thaliana landsberg
ttcttacacattccatacttcagtctgttatgaaacaaaaggaacatttgtctagttcacttcatgatcaagtcaaatctaccaatgtgacccaaaaacatgtgtttaatccggtaaacagatctcagtatggtttaaaacagaaccaaaacaaacaaacaaaaatggatttcgaacataatgctatttctgattaaaaattgaatctgaatccaagttaaaacagtatgtaatccaaaaactgaaatccattatattaaaaccggttctcaactggtctctttgtatctcatcatctaaaaagctttataaaacaataagattttggcacagcctaatcgctttctcagggcacagagccactcatattattaccctatctactaggttcctgctttcgtatacttctcaaaatgctctctttgttcccctgcaatctgaaattcaatcattgacatcataagaaaatgttgtaacagaagtgataagatcattgagttgttacatacatgttggattcttacgtcttgccatttctgattgtggtttttatggaacaacttcatcagagataacagccttgcccagataaacctgttgcatctcctctttccagatctgcatcaacttcatatttttaatttgttttcctacaaagagaaattaacttgtgtgaagaataaatatatttcattccataccgtgtcacggaactccacccttatgtgtggcacgtttgttttgtgaatgtcgtttccatcaggtcctcttttgtagtaatcttttccaatccagtgcgactggaacatctcaacaagttagtattattagtagatcggaacagagacatcttgttcattcatactatgggccatgttgatataacaagtaccttcagggcgtgtgagaaacctgactggtacactgagttacgagctatctcgcacaggtcacacgcactcagcttccaaacctgaaaaatccagttatcatcttcagttaatacataaatataactaaaacctagaagaaaaggatgtatagagagaaatttcattgttcttcgtgtttgcaattgcagaagatcagtataaatcatttaaaggtaataactaataagacttttaaaaatataatcaccttttcaaggcctatgatgtgtggcaagaaagcataaaaaaaaaattatgacttactgatgcagctatgctaatactcttccacgagaggttctttagttaagtgaatctgaagggggtcatcagtagacagagaaacattgagacctcttaagaaaaacacaggaaacgggttccggtggtaatctagaaacaaagagttgttgctcagtggtgacatggccagaccaatctgtcaaaagaaatgtcttcttagaacagaaacaataatacatatgtaatacaagcaggcagtctccacaaacctgggcgaggtagtacagatactgaagcacaggagactttcgcagattgattccatgtgcgatgctatggcatgttagaaacgtagcagccaagtggtcaatgtcaccagcctgaaatttgtagacatgttaaaattccactgaactgtaactgaaaactgtttatctagcacaaaggaagaaataacacacctctccagaatgtggtcgtagcgtgatagtagtcatgccctttgactctcgaagctgaagaaaaatagttactccatattacacagttttgagaacaccaagttagttacagaagcgactaagaggaatggtaccttatttaacacatagaggttagcataacaatagtagacataatacgaaaatgcaggattgaatgcgttagtccattgagctggagtgggcatgtgttttgtgggacgtctttcaggtttgctttcatcatcaaccaaatcaaatccaacaacctgaaatagcaaacaagagacagcaaccagtcaaaccaactctttattgtgtaaagacatgcggattagaggttatttgaagatatgaatgctaacctgcttcaaaaaaacatggagctgaggatgggaatcaggatctaccgtggcttcaaacagaggaatgaatatattgtccaggatattctggaacgatgtcacaatacccatgtccttgtaaatgttgtacaagcgtgggagctagtgagcagacaaacagaaaacaaggaaaatatagctcagttagcagtcatgttacaaacacacggagacaaaaaaaacacatacactcatggaaggacatggagcacacaagtatcaaagagatggctaacctgaattaaccagacaacattctcactgtatagatcattgttcacaatccaactagcgagttggtcccactcgctcatttttctgccatatatagatattctgtattcagccatctgcagtgttcaacgtagacatcaggaaaaacaaaacagagcaattatggatctgctttggcaagaagatttcttgacacagaatttgagcaatgccatgatgttttttggaactcaagtcaatgcgcatatgtgagggagtgtgagtttgatatggttactgagactaaaatccaaggattttactactatatcttttcctaatataacaaatgagttaaagtttaatgcagctataaagcatatgcaacaagaaatagcaagctttgcatttgtaagggggaataggaggagatccattaccaaatcctaagtctctatgtattcccagtaaatcattatatcaaaagcttagttagaatggatttgattctaacagtgttcctctcttataatgttcgttctaaatgcataagaccactgcagttgatcaagaataaaaataacaaagatgcatgtggcgtttacctgatatttactagcttcaaggtcagagaagacttgctttgttatctcaccaagaaatcgaccttaaaccaaacgaaaataaatgtcaggcaactgagagtgcataactgatgcatcaaatgaactaaaaacggtaataagagtgactggagtattcaattaccttggatgagattatcctgtttaaggaaaatctccctaagcctactttgaccacaagggttatactttaggttgaacttatcaaaacgatgaaaggtacttttgtctgcatgaacatccaaaaggtcgacgttcaggtcatatctgtgcaatgttcaaaccaagggaaaaaggttaatttcttcggtgtcatggtaaaaatggtaaaaaatgcaatacaggcaatctggggtgcccaacaacctaggagctcctaagagggtaatctaatttgcttgcacccatca

SEQ ID NO: 35818 - DNA, 1154 bp, Arabidopsis thaliana landsberg
actgaaaaggcgtcctgaaccggctagcacagagcttctctcttacatgcacattttctatgaggtttgtccttacttgaagtttgggtgacatgtcagcaaatggtgctattgctgaggcaatgaaggaagaaaacagagttcacattattgatttccaaatcggtcaagggagtcaatgggtcactcttatccaggcttttgcagctaggcctggtgggcctccgcggattcggataacgggtatcgatgatatgacttcagcgtatgctcgtggaggtggcctaagcattgttggaaatagactcgccaagcttgctaagcagttcaacgttccattcgagtttaactcggtatcggtgtcagtttccgaggttaaacctaaaaacctcggggttcgacccgaggaagctctagccgtaaactttgcctttgtgcttcatcatatgccagacaaaagcgtgagcaccgagaataccggtatagtttttattattaaaatttgtttaaacatagagatgggttggttgttttgtccttttactgagttgaagtcgatttgcagcgtccggttattgatatttggtgtagagctatctccaaggtggtgactcttgtggaacaagagtcaaacacaaactcggccgttttcttcccgaggttcatggagacaatgaactactatgccgcgatgtttgagtcaattgatgtgactctaccaagagatcacaaacagaggattaatgtggagcaacattgtctagcaagagatgtagtgaacatcatcgcatgtgaaggagctgatcgtgtggagcgacacgagctcctaggaaaatggaggtcacggtttgggatggcgggtttcactccttacccgttgagtcccttggtgaattcaaccattaaaagtctgcttaggaactactcggacaagtacaggctagaagaaagagatggagccttgtatcttggttggatgcatcgagatctggtcgcctcgtgtgcttggaaatgagatagtgacatttctctagtgtgatggcaattaatgtgtttctacttgtatgcaatttagtcgctcatttgaatcttcaaaccatttgaagaatcctatgtttactactagagaccaagagtgtgcacaattgctcaaa

SEQ ID NO: 35819 - DNA, 3350 bp, Arabidopsis thaliana landsberg
gccggatttatatctgttccatccgaacaactcaagatcaagctttatattaacactacatatatatgagaatgaagaacataagtttttagttacctattggagtaggaagttgaagatgtcgccggagaccatcaataccaggagccattataacagccaaaccaaggtgaggatttgcagagccatcaaaagactctatttatagttaggaactaaaccatcaggagttcctggtggagaagctgctcttaacgccgcttcgcggttttctttgccccagcattggaatgctccactccatgtattaggttggattcggtcgtagctggaaatttaagtgacacacacaacttttaataacaattgaggaaattactcgaaaagtgcggttttcgagttacctgtttgggagtggagctataatagctaagattgatggaagatgaaatagaactccggccatgaactcttctccaacggaagagattccatgagaagatgagttattagatgccgggaagacattttcgccgtttttccaaagacttagatgcacatgtgatccagaaccaatgtcacaataatcatacctgaagaaaaaacacatatgttaaaaatttgcagttacaacgaataatttggtgggagagactgacatactttggaacaaaggttgcgagcaatccctgtttccttgcaaccgatcttataacttcacgtgtgtagaccaagttgtcggcagcatgggatgcaatggtgtgaccgagagatacttcaaactgacctttcccggattcagcatgaaactatgaaaaaatttcatacatgtcaagaagcatgttgcagactgatcattatcagggatttttgaattatttgtaacctgttcaacttcgatgttcaaggactcgagtgcgggtacaatatcatggaagatcggagatgcagcatcgaatgaggatgtggcacagtaaggaccaaagtcaaaaggcatatactcttctttcccttcccttttaaaaaatggacagaaaaagtgttaagattgtgaaaatgattggattgaacaaagaaaccggtattcaagaaatatatagtcgcataccgcacaacgttcttgaggagataaaactcattctcaaaaccagcgttcattacctaaaagccaaggaagatttgagcttaagcaaccaaaaagcaaataaaagttttcgtagaatggctatatggagatttcttaccaagtcaaattcatctttgagaacttttgcgacccttcttaaggtctctcgtggacagtactcccatgcttcaccaggcttcaattgcatatcagctaaaaccatgctctcttgcttcgtcctaatgataaaatatgatacggaaacaattaagaaagaaacatctgtaaaattaactccaaagagaatgaacacgagtaaagtaccaaggtattgtctgcttggttgatagatctgaaacaagtctaatctcacccacacctgtcaatttagactcttctgctggtccatcagtaaatgaagtcatccccattgatgcaaaggtcagaccaacgccgttcttcttcacacttctgttaaaacgctgcgcttgaacagcctgaaacaatacaataaacagaattctagttaagtttttgtgcttctaaggaaaaatcgttgaggtgggaaacagaggttttttctttagaagaaaccaaaaaaaaaaaactcacacggcatctttgttgtccagatgtatcaacccaaataatgcgtacaaaagaactactatcttcttgaacatcaggctcctttatcttcaatttgggagatattatattttgtggactagaagaatctgtgtctatattaagcttataaaatccaatagaatttcgtgagaatatgtctttagctgcatcaatagcttccatgagtgagagatcaccactggcacaagcatcactcagaactaagaagataacctcacgtgctttctttgcacctgcaaaaaacagcgagctatgttcaagactgaagcaagacgatttcaagtgccaaagcttagaaacaggattggaacatatataagtatgttacaaactatagaaaagaggtagaaacttgagctaacctaaatagtaggtctcaggagatgcatacccatcagtgctgaacataacctgcaataatatcttatggttactcatgaacaataacaaagataatgcaagtaaaataaattttaccttctttattgatgctaagtcaaggagctctttaactgaagaaaccataccatggacactaagctttggaaccgccaagccgaaatcaaggtaaaccttaaggaacaagaaaataagttaatgactaggcatgattttacagataattgaaatgggatgaagaaaaacctgaggataaactgaagacagaaaggatgcttcctttgagaatggataagctgcatgaagaagaactatacgacactttccaaatcttttgtcttcaagaagggttctaaggtgaagaggattcgacaacctcaaatccaaatccttgtcaccaaaactggctcaaacaacaaaagaaaaggagaattttcattactacaaacctctgagcatgagtttctgtttctgtgtaaggtttgtttgataaaaagatcagactttactaacatcaatcatatagttgatcaaatcttgcatacccggtgtgaatctgcaagggcaagtcgcgacgcacagcgacctccaaactaatggtaaggatgtagtcaatcaagcccttgtttcctatgcggacaggctttccagctgcagcaatattagattttaaggtgatcagacaacaactatgttacttcttgatagaccaagcacaaccatcttacctcgcaagacttcaacaaggccattctcagcaacttctttactcacataagtatcaatatccaaaccgctacgatatgcagcaatagttttcaaagcaacaatctctggaacaagcgtgaccgaagtagtcaaggttaaccaatactactgagtatagtcacaatcattaagcgtgtattaaaaaagcaaagataaaaggatatgaatttaatctttcaacaaaggttttggtgaaagaatctaaatcccaaacaggcggttcagtactctcagaaccatagaaataaccaccaggacactcctcttcgaggatttgctcggcaagagtttcgatacgcaacactctaccaacgaatggaacaaagtttctatgccattcaatatcatgtttcttgtctagctttaatccatcatcaatgaggagagcagagattcgagcttcttt

SEQ ID NO: 35820 - DNA, 3293 bp, Arabidopsis thaliana landsberg
ttttttgatgaatatgggttatattcgggtcggctgactacattttgtgctttatgttctacatttttcaaaaccttggatggatatggaacaaagttgtcatagctatactaacacataaagcttaagctaaaagtttaatgaaaaatgctcaaaaaacctcacaaaaaaatgaaaattgtatgattgaaatgtataacaaaatggaatttgtataaccaaatgaaaattgtaagattgatttttgatttaaaaatatttaataaattatttttttcaccctcctatttaggcggggtttttacctaattataaataaagcagtattcttaataacattttttacctaaaaggtgattttcattaataatttagttagaatttttatattgaccaatgaggagaaattttcattcgacttttttagttgagggtttttttaaaaagtcgaggggttttttgtattaaaaggtttttttctttaaaattctttaattggcctttcggcttcccccggcccatatccacaacaattcctgtaaaaatgacgggtccatcttcgacttctggaatcaattcactggtaaacacaaaacctccgtagaaatgtccaaaggcaatgtcagacacaacgaagaaggcgacacgaaggcaaaaaaataggaataatatcgtaatttccaattagtagaaaattgtcatcctcttcttctaacttcattccacgcttcagatccgagtttaagagaagctctctctatctctcttttctatttttcagagatccttcacttttttcttctccttcaggtcaaatattcaatttcacttacccgcaatccaatcttctctttattctatcaatttttaaattttcttcttgacaattcactaatgcttgcatatcgtgtttgtttgatggtctaatctacatttgtagggatttggatcattgttcaattctcaaatcttgtttaagtttctcaactatatcaatggatacaacagaactaactttggaacaagtttgtgttttgattcaatacagttacttattcattacgtaagaaaatctctagaattgataggatacaccaaattttattcaatctttgttgttgtttgtaccttgtaggtcgtgttcgtttgctcatttagatgtccatccaaatggtccaccaaatgattcatctgactaatcgatctaaatgatgttcgtttccatttttggtggttcagttggatgatccatctaattgtttttaaaaaaaaactttgcttatttgttcagttggatgatccatctagatgcttctgattaaaaatgactaaaatgcccatattttcatctaattatttttcaattcttattctaaccatattaatttgtattttactgatcaaatccatatttacaatcaaataaatttcaaattattatatttgacatttaaacttctattttcatgttttttttttgtttttttatataaaaaccaaagcatataagcatatattatgaaattaaagaaactccaaaaaatcttaataactccagtcttatatatgctaaaacagatgaagcaacaacaatataagtttttaccaaacataaataaaacatgatacatacgcatgaaacgagcatatctgaaacacatgatctattcattgacttgtgatgatgatctctcacaaagaaaaagaaacaaaacaaacaccaagagacacaaagaaaacgctgcaagcaatcaagcacattacagatggaaaattattaacaaaagggtcacttagaagaaagaacaagtccagaggctgaagcaggattttgatcacttagaagcagtacttgatacccaatcaacacacaatggcatctcctattaacgattttcaatcacctgcatttatcacatcaatgatatgtcatcaaacagagacgaatactaaaataatgtacaagcatcagatagaattagctcaaatgatgaaaccaatcaaatttgataaggatgaagtcgattagtatttagaaaagaccaatcagattcattaaaaacagaacctgcaaccaaaaatgccaacaacatcctttatattataaagcacaagtcacttgtccaataaaaatacaccacataaatttctattttataatttaatttttataaaaataattcaaaacaaaattgagatcgtacaaaacagaaaaaaggaataaaaaacaaaaataattattgaccaaaaattatgggcttcgtaatggaaagaaaaactttttaaaaagtaaaattcaaaccaatattgatctgcaaaaaaaaagtgtaaaaaaaaattatattccttaatttgctcatactaaccgattttgaatttattatccacgatcaagctaaaatcatagcatgttttattaacctattttcatcccttatttaactcaaatttattcagcttcttctctatttgatatttttttatattatctttcatttttttctcttgtacatgctatagaaacgactatggaaattctatttaggttagtgcttaatttttttttatattcattcatttgctatttaactcacagtaattgtgattttattgtacttatgttttccaaattacaaattatttgtagtttaacgaggactgagaaatgcatgacacacaaaataagaatattattattaggtgaaatgtgaatcaagaaacgtaccctgaagattgtgttcgagccatttggattgttttgtacgtatgtggcttgcccaccaccatgaataagcattgctcgctgctctctgcaacatcttttttcttgtaccaaggaagaagaagcagaggaaggttcaaacatagccaagtcatcaacgtaagaacttgagagtttcaagatcagacaaagaaaagagaagaagcctttgtccgtgtgtagtggatatgtccgagtattttggtgaatcctctgatcaacctcatttttaggatgttacctttgacaataactaaaaagataaaaaccaacaataatagaaatatatgacatttatttcttatccgcattgttaatcaatttacatttgtgtgcgtgggatatacactaattttgacacatctttacttaatctttacatatgttttttagtcaggtccaaaactaacattgcaaaacctgttttaaaaaggttcaaaatagacagaagaatggcatcaatgaagaacattaaatacaatcttaggttaagaaatttgggttacatatatacatttcttacatccatttg

SEQ ID NO: 35821 - DNA, 4096 bp, Arabidopsis thaliana landsberg
aattatattacacatgtgcggcagagtatatgaccactgcaaattttgaaccataaattaatcgtactatacttgtatagagttgcaccaaaatccaatgtttgttataacatcaggaattggaagcagaaaccagaaatgcaatcaggttcagatatatgcaagtgagcttctgtcaaaatctggttgtggcctgcctcgtgttggagtcggcggtctctggatattcagctcctgcaaaagataaattgtgtactgtcagtgtctggttcgtagccaaaataagatatagctacataaactctcctaggactatccatatcgcataactaccaactaagatcaagttgctcagtttgtggctgaaacaaagacattatgtgcttcactggtatatgctaggaaaatgtcttttattgttcccaaactattatgtgtttccggtttaggccaaatatttctaggaaaaagacaaagacagactcttacactaaggtcaggttacccggtttgtggctgaaacaagtttcaagcttttgttttaaaaaatgtgttcttatgatgtagtaacagagttgatgtatggatttgaattaatttggaacagaagtagcaaagttgttgttacctgcatccaagcgtcgtctccagaatgttctggagagttctctggagataagatgggaggtggaagaggatgaattaacttgggaacaatcaccaatcctctgccaaccaccaatatagctcctgcattgttcgcagttcctgtttaagaaaagtatcacaatgttttatttcttgatgttttttcctatccaagaatacaatcatagatacaagatgaggttttgacgggttttgtttcgcctcaccgcagtaatttgtggcggagaaaagcgtaatcaactgtccctgtgcaaatctttcgaatccatccatcacacattcatgggccctgataattagctgtagtttattcctcttacagaattctgtgactctatcaggctgcagtatcaagactacgccctcagtgattggcccctaaaaacaatattaataaaaaacgacaataagagcgaattaggggtgatttaccccaaacgtgacaaggccaggtcctctggcgtttggtcttaaaccctcgatactatcgttctctgtaggatcagacctgtactttaaaaaatgtcattaactcggggatattagaaatagtgattgatatgaaagcaagacagcaaaggatggattaccataataaatccattagaacaagggatccagcatccattgttatgggtctttcgatcttctcaatctgttccactgtactgattgacctcccaattccaccatgcatacatataattttgttctcgattagtgcagcaagaggaagataattaaaaagttgattaaatcttgtccacgcccagatgccatcattctctccctggtaaaagtacagagcaggcttagtctacgcagaaaagctagcgacaaacacgatgaatatttctgcagagagggatttaccattctttctatgcattcaagacggaaaccaaatagtgcattaatgtcagcagcctcgtggtttccacgaatcaagtgaacattctccggatattcaatctgcaaaggaatatctcagaaccataaaaccaaaaagcacattttgaatgacactactaatattggtgatgtgaaattaggcaccgtcttgccttcaatgcaagcagcaacgttatagtctccaggctgtgttgtccccggtcaacgtaatctcccaagaataaatagtcaatatacctgaggcaaacacgtttaatcgttcagtgactatatttttttagcaaaactccacaaagttcaatcgatttcttaaacttacgtgatgtctccagctgttgagggaaatccatattcatcaaataaacgcattaaatcgccaaattgcccatggagatcgccaaatactttgataggagcctttagctgaagaaccgtttgttcatgcataaatatttgttcggcagtataacagagttccccaacttcgtaagaatccaagaaaaatttcctattgccaggaggtttccagtttcgaggtcttaacaaagcagcaatgacctgcaagcaacaacacattagtagagatattaacagggacagtgtccaggaggatgagaagattgcagaagaatgatacctttttatgcaggccttgcggagacttctgtcttgtgaacttcttggtaggttgtggcacatcgctattgttcatgggaaccatccgtcggctctcattctgaaactgatccaagcttagctgtcttaccatgccgcccagactaccaaccgtctcttttgctaccacaacctatcaaatgagatacttcggtaatcaaatacgcaaaagaataggtacaacagttattcaagcatacactatgttgggaagtatttcaaactaagcagccaatatgtccatcgcatgagacaaagagataaatgtataatattcttaggtattaacatacagctctcggatgaagcctgacatctccttcatttgcggtaccatcagtagtagattctacaattggcgagctggcatcagaggtagagggttcttcatccagagtaccagctcctagttgtgcagctcgccaaacagaactagctacctctgcttcagctgcagaagcctccgtcaatttctccaacgaattttcatccaagctgatattgttgaggagaaaagtaagataagtcatgctcaaacaactagacacagttaagcacaaaccaaaagagggtaggaaatgggatagacctcagtccctcagacatggagaagcttggttcagagcctgaaggaggtcgtgcggcataagaaaacctgggagtagaactttgttgggttctatctgatgctagcaaaggagaactgatgtctgactggaatgttgaattttcagcaactagaaaatcgtcaagtaacacatctgtgcggaaataaattacggtaatagtcatactctgagaataaggatagatgaacttgagacattaattcaaactataagagatgtaagtgtaccacaaaaacttcctaagattcaacttgacctaaattatgaaacgtgaaactacagaactaaagtatatgtactgcaataaactaaggcatcttgttgtacaaaaggaatattatcaggcctacctcctcttagaccaccatgcacatagatccggataccaactgatgccgcgccatggcgacagcgtcgcataagttcaaaagacggatcttgatcgatttgtcccttacttccacgtgcagaagtaacttgcccatttctatccaaccatacaccggcagcagtatcaagcactgcgagaaaaaaagattccacaacaattagaaagatcaaaaatcaagaggagcaaaacctgcgagaattagctcaccatcaccattacctgcaacagatgcttcagcgtctattacacggcctcctctcagcacaccaccactgacatgtaatcttgcacctacaaaaacctgataagaaaaacaatcaaggaacttatcgcaatggctgaaattagagcatggtatagtaaatgaaatcaaatgcctcatcaatcaaatcatatagaagaaaaacattagtcaactcagtttctaaagctacaatgtgcagtcctctggaatactagtataagtcaacgcttcagaagctatttttccatatgttttgaaattagagcaagatttggtttaccgctgcatgttgatatcttggagaaggagctacacctggagccagagtccactcccactgaccatttctatgcatcagtagcccataagcatctcccagcggctgcagacacacgaacacataagggaatatgccagcattcataaagaagattgaaaacataacatcttaaaattcggatctccttgcaagataagcaaagctctagaattcgagatttctgtattttatctagccctatcctggaaaaaaagtctactaatttctgcacaagagattaatggagaaaaaggtat

SEQ ID NO: 35822 - DNA, 3082 bp, Arabidopsis thaliana landsberg
  unsure (1)..(3082): unsure at all n locations
agccagagacgaaagggagagagaaagaagagagagaagagagaaagagaagttagggttagagagagaggagagagagagaggagaggggggagagagagagagagagaactcacaagctctatattgccttgaggaaagtaataaaccttttctccaaattttggaatatcacacaaaggtcccgcacagagtttccataactgctcgtacatatagctcttggatctatcaactgccgaacaaaaaccaaaacattataaccaaaacacgtgttcaataagataaaataaaaaagtcaaaatttcttacttatgcctgataattcaggttgtgcattcacaacgttgccagtttccataacctcttatccaaagatcggtataccaaaatatgttatctcaacaattattatacaactttctctctttcctcaacttctctcgcgaccatgagagcgcaaaatatcacatttataggtaagaagtatcaaaacacaataaaatacttccttagatttgaatattaaatttaataaggttaccaaaaaataataaaggtaatttagagaaatttcattaatattttgactacatataataaaatcaattttcttatatatttattgattaacttaccaaaatcaacatatgcattattcatatataagttgagtaatataatacagttttaatactcacagtaaaaaaaaacaaatctttgaaatttgtttatagatagccatataaatttaactaggagttcttgctagctttttattttcaacatatgcattactcatatataagttgagtgatatagaaaaattttagtacttacaacaaaatatttttttctatgaaatttgtttaaaagtagccatataaattttaaatatgagtttttgcttgattctgattgcattaataggaattctctagcattgtgatcaaacctttcatatgggatctatggtacatctcatgttaggttattttttttttgcttcctctttaagtttttaaggatcccatgtaaaccggctttctcatatattgtcgctctttggagaaatttccaagggcatgttctcttttccatttagcttcccctttccatttaactatgatgtgaatttgcatgtatccgatgcctattgggaatgtccttggtatcaggggtggattaccgatggtggttgttgttttgccttagaagaggatgtggcttatagtatgatgagttccatcaaaaatgtacaagggcttctcgctgcctcttaacccgaatcatgtatgaagatgtagagtttgatcaatcagctgatggcgatcagaacgttgatggatttcaggaagctgtatcgagttgcatcagacgcttgagttgctaacatgaatgcaagagcagacgtggcaagttgtggcggatgatgtggagagccaagaatggaagctggcttggcgtggtatcaaagacaagattcactgagaaaatatagaagatatcatctcgaagaataaggaaaggaatcggcttggaaacaaggaagattccatatcaagagattctcggagttcctaagtttagggttctggagaataggtataagtattctacgacaaagggggagcagccttgagcacactaaaatattcgatgacaatggtctgttgattgttcagatatatgttgatgacatagtgtttggttcaacatgtcaagagtatgtcgaaaggtttgtttaaagtatgaccaaggagtttgagatgagtctgtgtggtgagctaacctactttttgggtctgcaaatcaaacaaacagaacatgatttcttcatatctcaaagcacgtatgccaagaatctggttgagagatatggtttaaaaggaagcaaaacaactagaacaccaatggatgtgactgataagctgtccaaagacgaagaaggagaggatgttgatgagcgggtatacagagggatgatcgagagtttactctatctgactacaagcaggccatacatctgtttagctgtgggagtatgtgcaagatataaggcaaaaaccaaggcctcacatatgttggcaataaagagaataataaagtnnnnnnnnnnnnnnnnnnnnnnnnnnnnnnactacaccaaggatactaccagaagtttgatgggctactgtgatggtgactgagccggatcgctggaagatagatggagtaccagtggaggatgcttctttatgggaaacaacatggtctcatggcacagcaagaaacagaagagtgtttcattatctactgttgaagataagcatagcaaaaaatcatgttcaacactctcgcacgaaacatattgatattaggcatcattttattcgtgaacttgttgaggcaaaacaaatagtgattggtcatgtgggtagtgagcatcaactagctgatctatttaccaaaccattggatttcaacagatttattagtctgcgaccttccattggtgtatgtgaactatgaattgtttgtgagttgtgctgatctaaaacagggatataaagtgagatcaggtcacagaaatccaaagatgaatagaggatcagcactatgtaaaattatgtggaaaatagctgcctgtcatgccggttcaaatcagacgtaaaacattgtcgtctaacaggaggtcaaagaggtgagaagatcaaccaaccgaatggatttgatacacaaaaaaaaaatgtgtatcaagatcactaagtttgaatattagcaattgagaagttaagtgatattgctgatttaacaaaagagggagcagttcgaaaaacacatatcatcaagctcttgtttggtaaagctatcttcaaaggaaattccagctgcctgttacacgttgccctgattgtttagaactgaaggcatgacagtgtgaaagactagccgctgaacattgagctgatctatcaacgatctgaatggttgtgacagtttcttgctaagttctgaacaattgatgggaacaatagaaagaaccgggtcacaagtgaaaggtatattggtgcgctcaaacatgtaggtactcgagtgt

SEQ ID NO: 35823 - DNA, 1081 bp, Arabidopsis thaliana landsberg
aactttcaatattatatagtaataactcaaattatttttatgaaaaatatatctcatatcagtgactgtgggtatacttatatgaaaaaactaaaattaaattaattcatcataaagtttttgaatgaaaccaaaatggctataaattagacatattaaaaatataaagatgatcgatcaaagttgactaaatctctttaaatcacgacacatgataaaatctttgattgataactattcatgttaacattaattactaactttgagaaatgaacacaacatattaattatataataagatatgtttcccttataataacttttcaccacctcggtaaccatcaacaaccaccatcgtcacatacataacaatcacatgttactccgatattttgtagtgtgacatgttattttattaaatgacattgtttttcctttcattcccgttgtctttaaaagggtagtaaaaaaggttagttttgcaaatctccctattatttaagacaacaacgagccaattttgaggaaaatattttacaaaagtgatatgtaacagttccgcacgaatttttcgagccaaatagtgcactttgacatttgcgttgcgagagattaaagataaagaaaaggaagagaactcttctttgtaacgctggaactcctccaaataagttgaaaatgctggctattcggttggggaagacaccatcttcactagctaggtctgaacagtctgaaaaaagctacttcttggttgtcggctccaatcatacacttcattgcccagagtaaagcttcgacttctgtgtggagaggagaaagacttctacgcagattagcagctcccatagttgatgaccctgcattgactaatgagcaaaaccaccctagacctgaaactttttcgctttctttccatgaaccgtccacaaaccacagaaggccagagtacctattatcttgtgagttgtccctcacccgaacatgtttttccgatcacaaggcgatatggttttcattgttgaactcaacttaaacaaacagccacgattgtgcctctttatctgctagacataacacg

SEQ ID NO: 35824 - DNA, 2908 bp, Arabidopsis thaliana landsberg
tgccaacgacctttgttacgaggaattccaatatataattagctgtcctagtaactatgtaattttgttattcaagtaactaaaattattcactgtttacatatataggggaggctatagttttattgatcttagtttctctatggaaatattcaactttctcagttgtactattccagcaagttcagtgattataacatgtgatcatgagtctttagagaacccaaagaaagccaaaatggcagcaaatatgtttgaagagagcaaagccttaagcaccatcttcttttttggtgtgtaaggaggatatctaagatccgcgtcccctgaaaagctccggtaaagaactcctttcttatggctaaacgtctcatacgagaatttcccatggtaagcaccgatcccactctccccaaccccaccaaatggcagatcttttacagtcacctgcagacaaaacaaaccatctttaataagtgctagcattatggaacattggttttgtatgacaaaagacttctttttgtacgtgtaagacagtgtcattgatggtaattcctcctgctgatacgtcctgcacgaattgtttctccaactctttgttgtttgtgaagagatacgctgctaaaggctttggctttgaacgtataacctgaaagccatcttcaatcttttgtaccgtaattatgggaagtaaaggtccaaatatctcttcctgcatcatggaagatgcttcaggcacatccagtagtattgttggtgatattttactgtaaaaggaaagtacagaacacagttattagtttgtttcatcaccatgaaacaatgtcatggaatggaaacatgtttctctcacagtttatcttcggttattcggccaccatgaacaattttgttggctactccattctcttttaacatactttccaaccttttgaagtggaaagagttcacaatccgcgacaggtcctttgattctaatgcgttttgcccaaaaaatgtctccagttcagtcttcagagcatctatctgtaccacatgattttgcatcagcaagattgagagaaacatataaggcattgtgattcactggcttttatttcaagtagccattaccaattttgatgcaaaatcctttgttgtgatcacgtaatcaacaccaatgcaagcctgtccactgttacaagcccatttccctgcaatgatcctcctagcagccaccttcaaccacaacaccacaattagagtatgagacctgaatttaactattttatgctttagaagcagagaaagatcttaacttgtagattaacatctgaatcaacaagagctgggcacttcccaccaagttcgagaaccactggagtaagatttctcgcagccgcagccattataatgcgagcaactcttgctccacctaaagaaatactttaaactatttaaaataatgttttcctgagatcctaatcaacatttcaaagattcttgaaagaaaaggagagaggacaaaccagtgaaaaagatcttgtcccatttttgatccagtagtgccgttgtttcagggactcctccctcgataactctgattgttgtattgtccaagtattcactaaacaactttgctaaaagagaagatgctgctggagcaatttcagaaggttttagcacaaccgcattaccagctgcaatagctccaatgactggctcgacagacaatactaaggaaaaaaacaaagcaccatgaagacatataaactttaatagtttagaaattgagacaaaattgtcaataaataaaattgagcttacagaaagggaaattccaggctgaaataaccaaaacaactccaagcggttctgagactatttgtgcagacgagggaaatgttgtcacagaagttttgacctgaaaggtccaagcatagaaaaagcaagtggttttagaaaggacacatatcaatgaagcagcaaagcttgaacggtctagttaccgtttctggagccatccagttctttaactctttgattgcaagcatacaggatgattttgtattcgaaatctaaaaaacgagaaaaataccaaagagattcaacagtggataagtggaatgcagtgaagaaacgggacattgaaattatataaaaaaacctcagctagaaaagcttcaagctcaggcttaaaaagatcttgatacaaagcttcggtgatgcatttctccttctcatcaatcatcctagcaatgttttgaagctgagaaattctccactcgtagctcttcgttctgccagagttgaagttgcttctgagctcatctacaagcaaagctgcttcttttccactaaagtctgatgcttgctcctttaccacagcagatagtgttgcataacaagtactgattcaagacaccaaaaccgcaatgtgagagactttaagactaaaaatcatggataagactaaaaaaacatggataagtatcaactgttctcacgattgtttattcataccactgtacttaaacttaaaacccactatactaaatagaaaggtaatcatcaaaaaatcagtatgtaaaaaccacttttgtgaataaaatatgtaaaatgggtgaataaagaaatgtgcttacaatttcaaccgataagggatacaagcattgctgcaatatccaccaccaccacgacgagatatccgaaaaggtgaagttgcaacatttaatctgcaacaaaagaggccattcattaaaatggtactaattagatctaatcatatcatattgaatgaccaaatcattcacagaagcatccattgctccaattaacattctagaccaaattcaacttaaaggtaactcttttatacaggaaaccgagaaaccgaaaacgcaattcacataaaaaggaaggcttg

SEQ ID NO: 35825 - DNA, 3112 bp, Arabidopsis thaliana landsberg
tttggggggttctctgtttcttaactgttactctacggcataactaatgtcaccctggtatctatcttatgctgttaagaactttaaacacatctaaactaagattgcacattaaacacatccaaactattagaataggaattttacaagacttttgttttttctacaaatcacatgttattcaactaatgatttctaaattccttttaaaatcctatgttattgaaaatgaaatttgtgtaaaatcattcaaaatcatttgtaatcctttgttattcaatcagtgattcataaaactcatatcaaatccactgttattcaaaaattaccagttttcttaaagaagaggtttaaaagaggattttaggagacttcagatacatttgtagttgaaaatagaggccaaaaaaaataggtgggatttgagagttttcagttttcacataaattttaaaataatgtttatataaaaaattgcattaaacaaaaagcctacctgtatcttcttctcctcctctccatggctttgactacgtacttctttgttttcaacaattagttctctcttttttttgtgtgtctaaaatcaatagtttgtaaattctctagggcatttttcgaagaatatattatccatggtaaaattttcgcagagacgacgatgtcatgggggtacatatctttaattcattttaccagtatagtggtcatgtagataaagcttcagccatgaattagatggaattaagagcctaacgtggcctatacaaacttgtattcaagactaagtgctgctctgaatcaataatccataatgcttcatccccagtaatgcatgaagctttttacatacttctacaatagttagtactcgtgtaataagcaaaaactttgatcaaaaactgtttaattgtttattagagaatcttgagattaatgtcatgggataatggcaaccatatgatcaagctggcacgagacttgagcttttggaggtgacgagaaaaaacataatcatacacaacaccaatgtcacaaagtttaatgataaatctcaccaaatcactagagctttgtttttgtagctacagaaaagtctatagttacaacaaccaaggattttggattttggattaaatcaactagaattaccttaaagtctactaaaatctctccaaatctaattccactaaatcttacagaatgtttagtccaatacacccccctaagtcaattgatctaaactcaggaaattcttctgaatcctataataattaatgaagtacaaaacaataaataactgtcgacaattttccaatcaaagtacaaaattgattcataatcaataaatcaacttaccattacgaatctatatctcacagactttgagattttggtttgaaattctttagacttggagagtttgagaggttgagactttgagtcgttgacgtgatcagtttcgtgtcaagcaaattatgctaaagtcgtcaaagcttctaggtttttttttttaaatactaacttcaaagcttctagatagtacaaaaggtttgattttttcatttagttaacgacgttagctaaacaagttcatttaagttaaacgattaagtcaaaagcacttaacttgactgaaactagtttcataaagtaaaaaacattacaaagagttttatgacatcaagtcaattataagacaattcacaaacagaaatataattgtgatacaaagagtttgatgacattacctggttcaaaaattcgttgagtcttcttgtacttctaatgatactaccctccaataggtcgagtcttctaggattttggaagactcataaagaggcctgaggactttaggaacacttgagacctaccaaaccaaagaaacttatcaatcaacataaatagaaggcttctaagggacataatgttttattatcattccaatatacttacatccaagtcaacatgatcaacgatgtgaataatggaaccaccaccatcacaaggacggataagaaacccgcttgacagcattttggctctcacaaagcttgaagagaacggaccattggggccaacagttgcagaagtgagtgacctctcacaaacctgaaggcaaaaagcaaatataaggcaaatctaataaacataatcatagatgaacaaaaccaggagtgagtgctcctaataaatcggttcttttgtctattcacaagtgtcaaaacatgatataggcacctgcaacagcatagaagctttggcacagaggacaccacttccaaaacttggaagaaatgagctaccgtattgggagccaccaaatttagcaggggacaagtttatcattacagtaacatcctctgcaccatcgctacccattggagaccatccatcatcgacaaaaccatttacagcatcattgaaacccctgaaagttcatccatattgaacaattagaataagaataaaagaaactcttggtgataaagctattaagtaaagtagatacttaccgacagagtctttgactgaaggttcttaaaaccgcaggttggcgccctccaccatactgaacttcttcacttgtttcttgtgcaatttgtcttagatggctcaaagcctgaaataagactccgaacttaagaaacattgcagcataccaagtcgttcaggtcatatacagtttggataaaggtatttgaacttacagcaacagtcattttctgagcaagaatcttcgatgattcatagagaggcctcatgacttcagggacactccaggccttgcaaaaccgaaaaaacaaagtcatgatcatattataaagagagaactgaagtgttatgaaccgattcgagttgtcacttacatccagatcaacatgatcaacaatgtggagaatggaaccaccaccatcgcaaggacggatgagaaacccgcttggtttcatttcagctctcacaaagtttgaagaaggtggcccagtggggccaccagttgcagaagtaagcgacctttcacaaacctgaagacagtgagtgaagacaaaagtattaaaacagaaactacataacagaaaaagcagattcaagaactcaccacatagct

SEQ ID NO: 35826 - DNA, 2660 bp, Arabidopsis thaliana landsberg
aagatcaataccaaatcatattggaaactgttcacaataaaaagaaaaatgttgttctatttcccaaggccaaagactacaatgctcaatggtccaatcttttatccattgaagaatcaacctttacttgcttaatcagagtccactaactcaattcgagaacacgatctaaagtcataaaggaaagaaacagaaaccagtataacataccgggtcaaaattctcttttaagattcctctacttggagaagccttcttaacctcagctatcaagccagggaagccagttcttttatgagccatcctaagagccccaacaaaatccctagtaggaggagcatcctctacagctttcttcagcacgtcaagcggatttagctccttcatctgaagaaccaaaagacaaccaccattaagaaaaactcacacaaagctctgaaagaaaagtcttgtaaaagaaagtctttacccgggaaacttctacgtctttgtaccatgtgatctcctccaagatattacgaggagaatcagcatcattgttatgcaatctcaactcaaatggtccagagtatcccaaaggagccttacttggtggttttctccttatcctaataccttgactaatagctaattcctcctgatacatctctacttcccattccttgattctaagaacatttcctttatcctctactgatgaagaagacacagctaagctttccttcaaatccgacttatccaaaacaaaaaggcaaacactttcagcaacagattgataacattataatcagaaacccccaattttgttccagatagggttttagactcaaggcaatcacaaagttcaatctaacaaccgtggacaacataaatcacacagaatcaaacgaaagactcgaactttaatggagggtgttcatagaatcaaaaaaaggagaaaaatttggtcgcacctgttgagctcggatcgagaattgcgacggagccctaaagtttatcttcctgtccatggcaaaacctgaaattgaacgtctgattgagacagaattgttacaccgatacagagaaggtgaagccactttaattggaagtctctgtaccggaactagtccctccattgccggaaaaaaaaaagtttcgaacttttgaagaagaaagaaaattcaaatggtttttgtaatttatggtcaaacaaaagtttatatagaagttggattatgaatatttttggtagttggtgtgattaacacgtgggttaatagtaagacggcgattttgtttttgcaatggttggtgaaaaatacagttgagcagagactggtctagtctttacctttgatttgtcacattttgattgtttttcgtttactacactactttggttaggaagtcttctatactttggttaggaagagttcaaattccttcaaaagttcattccttagttcattccttcaaaagttctcccttcaaaacttcttgtatagtaccttatgcacggttcatccacttaaatgcactccagttcctcgaagccaacctttttcttaaccttacttctaaactccatatataccaagttcctgacactcatctagggaacatgtaataattttgctcaatttcttttgttctataaatcttcaaagacattcgattacaaaagtattctaattttgctttctccaaacctaatttacgtagttaattcaaacttgaaaaaaaaaaacaaaaattaatggaataattttacgaaattgaaaatttaagaacacaatttatatgtaaatgtaattcgggtacatttaattatatttagctataattttattacaaataacatatcttaaataacatagttattagaaaattagttatatttatcaaaagaaaaattataatggatatgctcagataaatgaataatgaagtatctatccatgaagatttgttatttaggtgggtaagagagaaagtgatgttttgacatttttacccttgtgaaaaaaaaaagaagttcacgttttatgataactcataagttaccggtgataaacaaattagcatgataaataaaaaaactaatgcataaattaacatgttacgagaatagataattgttaatctattagttaccgattgttaacatgatatatataaaaaaaactggttatgtataatagttatctataatagcatacaatttaccactttaaaagacatgttagggtgataactaaattgttaatgtaaaaaaacaataataattaaattatcaaaataaataaatatgttattatataatatatattatataatacaagatttaacacgagaaacatgtttttgacgtaaaatgaatagtattttcactttgttactgttttttaaagacatgtttatcatactaatcaaataattaactatctaaacttgttaccgctaaaattcacttttttgttgttgcatataatgagtttatcttgatatttttctgattaacgtgtgtatgtgacaaagggtatttttggtattaatctgagacagatgaaagagaactaaataacaaatctttatagtcaaatacttaattattcattcttctaagcatagatcacccttatcaaaaatatatatatatatatatatatatatatata

SEQ ID NO: 35827 - DNA, 2283 bp, Arabidopsis thaliana landsberg
  unsure (1)..(2283): unsure at all n locations
accactgcatggggtgtcctcgacctcccttcacggtgagctttgccttttgttattttccgtgtttgatgtcccttttgccggggggaaccgccaccgccacatctgatccgcctcgctcgaattaggtcagatcttcactttttggaggaaagttttaatttgggcttgggcctttgttgggtcttgtggatatttgggtggccctttaagcttgttgggctgcatgattgtttggtgcatacatgttttttgggcctgccctattgtagtgtacattattccatctgccaatcgttcgccactttgccaatctttcgcctcttcacgtttcatcactcatcggttcaccggaaatttctccgggttctctttgcctatgtcagatatttcttcggtaggctcagtctgctactggtttagcactacttttgctggttcgatttctgcctaaattcggtaaagtttgctcaccggatacttctccggcgtcactatgcctgtgtttaaggccagtccaagttgtttccaatctagaaccacgtttgttggtttgaatttcaacggctcgtcagtttggtgctttgtcacctctatctcgatagcctctctttggattggtttatctgccctagtggcacaatcaatctcgcgcaacattgcatttggtgtgttttgtgttgtccaaggtgccttctcttgtttgctttaatgttatcatggtccatggacgctgcaacgacatgtatggcctaaagattaaaactactttgatctatcctttaatctgcttatctttatttattgctttgcttttgatgcatggattgtttgcttcggctcctccttatgtagccctatctgtaattgttctctcttttgaggatgattgactatgatataaaattgtacacacaaaaaaaacacatcctaccttcagaatttgattaatcttcatatccatggataatttggtatatttggaaagtaagaaacgaaaaaatatttggaaatatggataaaaannnnnnnnnnnnnnnnnnnnnnnnnnnnaagaggcacaatcgtggtagttagctcaataccaaaaatcacggttccatgggtcggaaaagcaaaaaagggtaccgaatatatcacatgataatctttattctggttttcattgttttgtggacggatcttggaaaggaagccataagttttcaggattatgatggttttgcacattatcaaatgacgaaacatcaagcatgagagctgttaatctgcgtagaagtctttcctactccatcaaaagtcgaagctcttctttgggcgatgaagtgtatgatcggtgcagataatcaagatgtagcgttctttacagactgttcaaacttgctgaagatggtggcttccccaactgaatagccagcattttcaaaataaaaggaatttctgagcgacaatgatgagttttcatacttctttttatctttattctcttgaaagagaatcgcaaatgtaaaagtaaataatttggcacggaaaatccgttctgaaccgcatcaaattatctatgtaaacaatattccacataaataactcttttgagtttttattaaaagcagatgacaaaaaaaaaaagagatatctctcgatattaatcaatcgattaaagaaataaactgagtttgtgcttcaatagaatttggggctcgtgttttaattctagggaagtgaaactacatcactttaagaaagaaaaaactcggtgggtacccaaaatttttcatagggtaaatccgagtagaattgtatttttttcgggtatccacctattttaaatctgtttttttttaatacaaaaaacaagtctcatgcatgtttaataataaacatatattttgggtattcatctgattttaacccagttttaacattcctaaatatagacatatataaagaaattaaaaattaaagcatgaacaaaacaaaaatacaaaatccgaagaaccataaatacttatattgaaacaaaattatacaaaagctatatgcagtgtaaactatttattagatttacctcatacatgttgttctctaaaagccaattgatatcaaacaactttttcaaaaataaagaggataaatttttttttgtaaatattgaattataaaacagagtaatttattttttgttatataaagttgtactcagtgtgaaaactatttgtttaaatttgattggttgtttttcaaaaaataatgtgttttaataaataaaaaaatgtatgtgta

SEQ ID NO: 35828 - DNA, 4518 bp, Arabidopsis thaliana landsberg
  unsure (1)..(4518): unsure at all n locations
tgcatgttcatcaatcatcagtagtacatagcttgattatgattttcatattgcttaaataggagcaactatggctggagaacttgtgtcgtttggaataaaaaagctttgggacctactgagtcaagaatgcgagcaatttcagggagtcnnnnnnnnnnnnnnnnnnnnnnnnnnnnnnnnnnncttgttaagctcttttctaaaagatgcagatgcaaagaaacatacaactgcggtggtgagaaatgttgtcgacgaaataaaggaaattgtttacgacgcagaagatataattgaaacatatcttcttaaagaaaaactttggaaaacaagtggaatcaagatgcgtatgagaagacatgcttgcattatttcagatcgtaggagaaatgcattagatgttggaggcatacgtacgaggatctccgacgtgatccgagatatgcagagttttggagtgcaacaagctatcgttgatatgcaacctcaaggtgataggcaaagggagatgcgacaaagattttctaaggacgacgatagcgattttgtggggttggaggtaaatgttaagaaactggttggatatttggtggacgaagcaaacgttcaagtggtttccataaccggtatgggtggtctaggtaaaaccacacttgctaaacaggtttttaaccatgaggatgttaaacatcagtttgatgggctctcatgggtgtgtgtttcacaagattttacccgaatgaatgtatggaaaaagatcttgaaggacctcaaacccaaagaggaagaaatgaaaatcatggagatgacacaagatacactccaaagtgaactaattcgattgttggaaacgtctaagtcattaattgtcctcgatgatatatgggaaaaagaagattgggaactaatcaagccaatatttccaccgaccaaaggttacctcttatggtacacacactagccagtggtcatactcaataaactagctaactctttgtgtttgtttttgacaggttggaaagtgttgcttacttctcgaaacgagagtgtcgccatgcgtagaaatacatcatatatcaactttaaaccagaatgcctaaccactgaagacagttggacactttttcaaaggatagcccttcctatgaaagatgcagctggtacttttaatgcatctctatattgtcagtatcttggttttgtagtctacttgtaaaacgattttgacatattgataacgttgtgcagaatttaagattgatgaggaaaaggaagagttgggtaagctaatgatcaaacattgtggagggttaccattggccatcaaagtgttaggaggtttgttagctgaaaaatacacatcgcatgattggagaagattatctgagaatattggatctcatatcgtgggaggaagaactaactttaatgacgacaacaacaatacatgtaactatgtattgtctctaagctttgaagaattgccaagttatttgaagcattgtttcctctacttggcccattttccagaagattataagataaaggtagagaacttgtcatattactgggctgcagaaggaatattccaacctaggcattacgatggagagaccattcgagatgttggagacagctacatggacgagctggtgaggaggaatatggttatttccgaaagagatgtagatactgagagatttgaaacttgtcatttgcatgacatgatgagagaagtttgtttgttaaaagctaaagaagacaacttcctacaaattaccagtaaccccccttcaactgcaaacttgcagtctactgtcacatctcgcaggcttgtctaccaatatcctactactttaactactttacatgttgagaaagatataaacaatccaaaacttcgatctctcgtggttgttacctttgaagaatcattaagaatttggaagtggaacctatccggttcaagctttacaaggttagaacttctaagggtgttagatctcgttcaagccaagttgaaaggagggaagttagcttcctgcattggaaagctcatccacttaagatacttgagcttagagtatgcagaggtaactcatataccttactcactaggaaatctgaagttgttgatctatctgaatttagatatctcattatcatcaagatccaactttgtgcccaatgtcttgatggggatgcaagaactgagataccttgcgttaccaagccttatcgggaggaagataaaactagaattgagtaatctagtaaaattggagactttagagaatttctcaacaaagaatagcagcttgtaggatcttcgtggtatggtcaggctgagaacgctcaccatcgaattaattgaggagacgagtttagaaactctagctgcatctataggtggattgaaacacctggaaaaacttgaaatagatgatctcggttctaagatgaggacgaaggaagcggggatcgtatttgatttcgttcatctcaaaaggctaaggttggaactgtatatgcctaggctttctaaagaacaacacttcccttctcaccttacaaccttatgtctagaaagttgtcggttggaagaggatcccatgccgattctagagaagttgctacagttgaaagagcttgaattagggcataaatctttcagtggaaaggaaatggtttgctcgagcggtgggtttcctcaattgcagaagctttcaataagcggactagaggaatgggaagattggaaagtagaagaaagctccatgccacttcttcatactctccgtatttgggaatgtcgaaaattaaagcagcttcgtgatgaacactttccttctcaccttacatccatatctctagggtcttgttgtttggagaaggatccaatgccgactctagagagattggttcacttgaaagagcttgaattctataaatctttcggtgggaggataatggtttgcacgggcggtgggttcttttgatggaagtgagaagcaatatgatatattaccagatttctctcccgctgaagttgcagaactgtggccagctttttctggcgagcatgataatatggacgcacagagccttgtgaaatgtacttttcaaggtattgtttctacccatccactcagcaatatgttttcttacttcaaatttatttgatgacccttacatcttttgacatctcaagcagggggcagatgctcaaatgaagagaagccagttgaccggcttcttattacactgatgtctgaatgcattgaatctgatgtccaggcgcagtcagtagtaaagcccccttttcaacaagactgtggagacctgaatccctttactcgacacctggcagttgttcaccttcgctgtgtttgtcgcctgattatggtctgcaaagagcttgttcaattgccaaatatgttggatgagaagacggttgatcaagctgtccttgataaattgtcgttctgcttaagaattttgaagctgcttgggagtctttcaaaagatgttcaaagtatagaaaacgacggctcattgttacaagcagtagcttcatttacagatgcttttcctaagctgtttagggttttctttgaattcactaaccacactgctacagagggtaatattgagagtctttctcttgcgctagtggagggatttcttaatctcgtccaactcatttttggcaagagcagtgtttttcagaatgtccaggcatgtgtggcagcttctattgtcagcaatctagattcctcagtgtggagatatgatgggtcctcttgtaatttgacacctccacttgcttacttccctcggtctgtcatctacacattgaaactcattcaagatctcaagagacaaccataccatatccatgatctgagggttttagagtctgaagttacctatgaagatgtcagttccactgttgattctgtttatttccatctgcgccaggaaaagatcccgttgctcaagtgcttcacggtcgaggatataatgagagtgatatttccttcatcaagtcaatggatggataacttcttccatcttgtttatttcctccatcgcgaaggtgtaaaattacgaccaaaagtggagaggacgtattccagtttaagatccaacagttttgcagaagttgaaagccaaatttctcatgacgatgaagccctgtttggaaacttattttctgagggtagtcgttctctctgttccatagaaccaaatgatcaaccacctgtttctgtcagcagcaatttactattgcaagctgctaaggaactgttgaattttcttagagcatgcattctttgtcaagaatgggttcctagtatatatgaagatggatgtaaaaagcttgacactggtcacattgatatcctgctcaatatagtaggctgtagtattgaagacaaggcttctgatggtggttgcatgctccaagatgagggaagacctggacatgttgcttttgagctgtactgcaat

SEQ ID NO: 35829 - DNA, 1668 bp, Arabidopsis thaliana landsberg
  unsure (1)..(1668): unsure at all n locations
tgcattgatcaagatttcaggatcttaacttaatacatattgtatgattctttttcatgtgaaaactcatctcaccaaatctgcaactaacaaaaaaacaaacagaagaagaataaagaaggacacaagaatttacattacaaacaacaaatacaacattctaaaacacacacaccaaacttttctttttctactacttcttgacttcttcttcaacaacaacatcagctttcgttacaaggatatccgctttttcgtcagcacattcctcgggaactatcgccattgactgcctattaccgcatattgtccaaaggtataacgcgaacatggctcccaatgttccacaaaccgcccccaaaaccaatgcaccaaggattctccatatacattttcctttccccttaacttgcaccgtcttctgcccttgcttaacagtcttggaaacgtcgtttggatcaagcggctgcgagtgaatcctcatcgaaggatgtctcagtttaaagctccacgaatggagataaaccggctttgaagtgtttccatttgcagaggttaaacccaccataaacttcccatctttccatagcttagccaagtctacagagtaagacacgaatggatccaccggctttaaggcagcagatagactcaaacgaacctctattctctttgagcttgcctcataatcaatccaacaattcaatctcttctcttcattgaaatggtgaccaaaagatgataactttctaactttaccagattcaggacgaccaactaagatccctacatgattccctctcttggagataccaaactcaacagcaacaactttgtgtttcaataagaaccctaaaccagaggaactattattaccctttctaccaaacaacctaagatccaaacctcttggaaccattataaaagccaagacactaccaatctcatcagacatcgaaaacgagaaactagttgagaatgatccggaaaagtttctctctttaccttggaacagtctgatgggtttcttgtaaataactcgcccttcactgcgactcactgagtcagtcaattgaatcgatggaccgccatgaacgagcttcgaatctccaaacagagcaacattattgtcaaagcttggagctttcacaaacccattaaaggaaaacgatgaatttacatctgtaacagccactgattggtaaatcacgatgcttaaaacgaataagaaagctagggttttgaagaccgccatagctgagcttgaagaatctgggtttcaagaaaaccaaaggagctctctttttaggattcgtgaatgagttccagttttcaagaatctagggtttgttttttaattgatgaatgtgtggattttggtgaagcaaaaggagaaagggaaattaaataagaattaaagtcatcttcctnnnnnnnnnnnnnnnnnnttcgctctcaaacaacactcttgtaatctcagtggttgctgagtaagggaaataaaaattcaattaatgctatttctgttcttatacccacttcttttatcttctctcctttgtatcccccatgttctcgattgtgacattttgcccccactcttttctactataaatttgcgataatctaaaaatctattcaattgttaatactgtaatgatggagaat

SEQ ID NO: 35830 - DNA, 8481 bp, Arabidopsis thaliana landsberg
  unsure (1)..(8481): unsure at all n locations
tactaagatgaccaaattataaagcaaaactcaacaaatatttgaaactacaagggtggtgcttctttgctcttgccactgatccatctctttattagcattaaccccatagtataaatactacatctcagatattcttcaaactagtaaatagtaatgcaggttgttgtttatattatatgacaagaaagaaagtccaagattgttgatacatcaattgggcctcaatgatcagccggcccatttcaaggaataacggcccagccccgaccatcactttagaacccgaaccagcccattgagtcgaaacccggcctggtcgagatgagagtttggctgcgcaaaaaggggcactcccgggaattcaccttgcgtaccctactatacggacgggtataaataaggaatagaaagtctcgggaaaagacacttttttggacacctggagaaaggactagacaagtcagcgcggcgatacaagtcagctcgtcaacacaagtcagttcgtcgagagaagtctgctcgtcaagaccagccagctcagccagaagagccagctcgccggaataaccagctcgaaacggcatcacctcgtagcgccctcaaatcactacgttctcagttcgcaataagcctctcagcccgtcggttgtcctgcttcgagttcagctcgtggattagagattgattcttcatcttccctagggactcactcgtacttgtttaattcatgcattaacagttggcgcgccaggtagggggatagctcggagatatctatccaacaaaccacgaactcacgacggagatgacaacaggcggaccttcgggaacgctcgatgcaaacgcttccagctcgggagataggacaacggcaccagccccaggacggatccacatctcaacatccatcccggctccatcactccatctaccccggaaggacaaatggcaggggccaacgtggaaactcctccgctgccgggttcctgctcgcaaactccgctggctgagcagaacccgccagttcgtcagaatacggaccaggaggaacgacgcgttaccgacggaacttgtgtcgggcccggaagactactccagagcatcctcgatcacttaagtcgacaggaggccagaacggaagcacgattcgccaccctagccgctgcacaagcgcattcagtggacgaaatcaatcgtctgcaagccagccgagcttcagtccataggccaatgtttgaaagcatcgagcatcgtcctcaagtccgtatcgccggtcccaccaacgatgtcgcaagagacgcagaagtcgccgacctcagacgcactatatctgaaatgagctccaaaatccaccgcgcaacaagtaccgcgcccgagcttgaccgcgttctggaggagactcagcaaaccccctttactcgacgaataactagcatctcgatcagaggcgcccaaaaaatcaagctggaaaattacaacgatagaagcgatccgaaagagttcctaacatcgttcaacgtcgccataaaccgggccaagctcacgattgacaacttcgatgccgggaggtgtcaagtattcatcgagcatctgaccggaccggccctcaactggttttcacgtctaaaacccaactccattaacagcttccatcagctcacctcatccttcctcaaacattacgcgcctctaattgaaaatcaaacatcgaacgccgacctatggtccatctctcaaggagctaaggaatcacttcggtctttcattgatcgtttcaaactggtagtcacaaatatcactgtgcccgacgaagctgcaatagttgcgctatgaaatgcagtatggtacgactccagatttcgggatgacataacgttgcacgccccgaccaccctagaagacgccctgcatcgggcatccaggttcatcgaacttgaagaggagaagctcattctggcgagaaaacacaactcgaccaaaacccccgcgtgtaaagacgcagtggttattaaggtcggaactgacgaatcaaacgagccgcgacaacacctcgatcgcaatcccagcgcgggccagaaaccaacttctttcttagtaagcaccgaaagtcccgaggttaaaccttagaacaaatatattcgcgacaccgattccccatcagcagggccgatgtactgcgaataccacaaaagcagagcgcattcgaccgagaattgccgtttcttgcagggcctcctgatggccaagtataagagcggtggaatagcaatcgagtgcgaccgacccccgataaataacaaaaatcaacgatgtaacgaaactacggcccgacaatatttaaacgatcaaaccaaaccaccgaccccagcagaacaagggataaccacctcggctgacgacccggcagccaaaagacagcgaaacggaaaatctatcgccgcggaaccagtcgtggttagacaagttcacgtaataatgggaggactccagagttgcaacgattcagtgcgctcgattaagcaataccgaaagaaagccgaaatggtggtagcttggccctcatccataggcacgacaagaaatccgaaccaaaacgcgccgatatcatttaccgatgccgatctagaagatttggacaccccgcacaacgatccgctcgttgtcgagctaatcataagcgatagcagagtaacaagagttctgatcgacactgggagctnnnnnnnnnnnnnnnnnnnnnnnnnnnnnnnnnnnntgaacataacggatcgttaaatcaagccagtctccaaacctctcgccggtttcgacggagatttcgtcatgacaatcggcacggttaaattgccaatctttgtcggaggagtaatcgaccgggtgaagttcgtcgtgattgacaaaccagcggtctacaacgttatcctcggtaccctctggattcaccaaatgcaagccatcccgtccacttatcatcagtgcgttaaattcccaacgcacaacggcatcttcactctccggggtaaccaacaggtcgccagaacgtgcttccttattgagcacaaaaatcgaaccgccaaaaagttatagcaattaaccgctccagcgccgaaggaagccaaaaccccgagtaggtcctaccaggagtctgagctgtgtcgcaccgagatgataaacatggatgaatctgacccgacaaggtgcgttggcgtcggcgtaaaaatttctcagtcagttcggcacgaactcattgccctacttaaacgaaactctaaaacgttcacatggagcatcgaggatatgaaaggaatcgacccggcaatcaccgcgcatgagcttaacgtagatccaactttcaagccggtaaaacagaaacgaaggaagctcggcccggaacgcgcacgagcagtgaatgaagaagtggataaactccttaaggcggggcaaatcatcgaggtgaaataccctgagtggctcgtaaatccagttgaagtcaaaaagaaaaacggtaagtggagggtttgcgtcgactacaccgacctgaacaaagcctgcccaaaagacagtttcccattgccgcacatagatcgcctcgtagaatcaacctctggaaacgagcttctgtctttcatggacgcttttgctggttccaatcagatcatgatgaaccccgaggatcaagaaaaaactgcattctacacagaacaaggaatcttttgctaccgagtgatgccattcggactcaaaaacgctggggcaacctatcaacgcttcgtcaataaaatcttcgcattgcagatcgggaagacaatggaagtttacatcgacgacatgttagtgaaatctatggcagagaaagattacataccccatttaagcgaatgtttcaagcagcttaacctctacaacgtcaagctcaatcctgcaaagtgtcgctttggagtaagatccgacgaattcctcaggtacctagtcacgcaccacggcatcgaggcaaatccgaagcaaatcgaggcattgttgggaatgacgtcacctcagaacaagcgagaagtgcaggggatgaagtaagaatcaataccaacattgatcttactagaactgacaaacttgctgatggattcgctgaaggaccaactgaaggtttcgctgaaggactccctgaaggacttgcagaagtacttttcgtacaagattattcgatgccaaataaggaaagggacattacccttattaatgatgcgtctaacagaatcaagaagatactccaaaccgtccataaagttccccacccgagttatgctacacctgacctcacccaagattaagactcgtcttaatcttaaccctaattaaaggtcagccactatcgttgttgttgagtgtgttagtcattgtgaaacgcttttaaaggagaagaaaaaggaatagaaagagaagagatgaaatataatcgtgaggaagatgagagaaagcggagacgaaggacgatacgtggcggaggagaagagatcatcaccaccgcaaaggaaaggcattaagagatggagatttcgtttgtgacagtaaggagaaatgagatgaagcggatcctagtaaattagagaagggggctaggcaaaactagaatcatataaggaagaagatgaaaagaaaagagtagctttaagttgaggttatacaaggatgttttccgtcataccagagagaatcagttgttaaataaaacatctctgcaaagatcacgttgccatgaagccatatcaactgacagagtttcaatcggatttatattcgagaagttatacacgtttttttctggacaagtaactgcagaagctgtccaaatctgtgctaagtataaatccagaacagtgtgtgactactgggtttgtgatgcgtttttcagatgtaccagaaagaattatatcgatatcaagatgtctacggaaagatattgcttcaaggaactcagagtatctgacaccttgtgcatcggatttaagctccatccagaattgaccttagaagtttgcccggaatcatctcaagttgcagaaacctagatatcagttatgatgcagcatcttcagaagaacgtgggagattcatgtgaagtctgatcgagatgaaactttgtggagacgttcatgttactactttctaactgatataggtcaaattgccttaagaccactctctcaaataagagatcgattgtagcacttaagggtcaaattccacaaagctctcggatcacacaatagaccaaggtattgaattaagctaagtaaaatagtaatgaaaattaaaagaatagaagaaagcaataacagattgtgaggttgtaagacaagaaagtaaaaacgtcaggcttaaggtattctcaggaaactattggttagtagatctaattatagctaggttgttatagaaccattcttaaactcaaactctaattatggaataaccggtggcgttccgtgaaactctctatgcctatagctaagaactttaacttaaacatgcattctaaccgagttcaattctttaccttagtagataggctgattcttattacacacctataaactaggctagtcaaataatagatccaactacagatacctatggcgggtatatctattgtctagattcaagatctagttaattactctaaatctagcattaagaacaatcaaagatgaagaattctacaaataacctagcaaagtgggcgatctactaaaccatatgaatccctaatgagaaaccgtattcttaacaagcaaactactcagacatattgattgaaacaagtaacatatttgatatagaaagcataaacacagcaaataagattagagtatgaaaggatctcttcactgtattgaaaatttgaatgaatctctaaagaacaagggatgaatagcttatgtctctcaaagaaaactagatgaaaagcttgataaaacttgatagaaaagaacttaggtctaaacaatgactttaaaaactatatatatgacctaataaacgtttagggactaataatgcaaatagggaagtcttctagagcaaatttctacttctgtaaacttgaaagcgttatggacttctttggacggaaaccagtgtcgatcgaccccaagagtgtgtcgatcgacagtctcactgaatctgaaactgaaatcgtccttaccttctttttccttaggttttgcttcaaaatgtctcctcatctccattgttgtcctatttcatagaatacctggaaagactctaaaaacactaaaaaaataacaaaaagactcaaaatcctatatcaaaaatatagtttaaaacagtaaaaatagggttatatcaactctttcagacttagcttttgcttgactattatcagacaagaattggaacttgaaccaatggagcagcttgtagccgaggagcagcttgtaccggaggagcagcttgtagcggaggaagctttgggggaaccaatcggtcctatgactcgttcgaagattagacttctccaccaagccgttaccggacttcttaaccacttgggcaagcatccaaatgaagtcatacaaaccgtttggaactcgatagcagctcaagacaattggtaatgggctaagtgttacttaggtactctttttcccttataagattttgccccaatgggttttccttagtaggtttttaatgaggcttgagtaacacttccaaatcccccattatcaatccggcccaggcccactaagacaaccaagaatttaaaaggccaagggtctatttttgttcaaactttcatttatgatttctccttttccgagttgtcttatagtttgttctaagactaactcttccccttctcttcttctnctaatnaaactcttgtatttcctcattgtaaactcatctatctttttactctcaaagtcttttaagctacatcaaaggtaaatcaaacgccatccgcatcctttgtgtgaccatttgctccacatcctttggtttgagtgatctcatgatctcttagatgcaaagtctatcctttgctcaacttaagagtgccgagtccttgggaggatctcatcatgtggtatcagagcacactctgaaagttgagttctctatcctttcatcacttcatcatttcgtttcattctattcatcatttcatcacctcatttcattttgtccgttcatcttctcatctgtcttttcatcttcgctgtcatcttgctttaattttcataaataattggcttgggataaaattgcgaaatcaattggatctgaatctaggacgagtctagtattttatacaattgtttctggaatttttgagcatgatttgataatttattttgttcgatctagtttgcctgttcttagaaaaacgtttgatattctccttgaactagtgactggtttagtgttgtttgttggcaggaatggtgacatccaaatcaagctcgggagtgagtgctaatgaccaagccatcatcgatgctatcacgttacaaatggagaaaatatttgatgccaaacataagccgatcaacgaccaactcaaaggaatagagcaatatgagcagatctcgcatcaaaaagaggcaaaacgaaatagaccccaagagaagcataattggaggagtagaccaaccaaagatgaatcaaattgttactactatattcgtgatgatcatagacgttttgagcaagctagacaacaacctaatgatgtgaaagaagttaagaccatgaagcaaaaccgaaaggaaagtctagcctcaaatgaacagttaaaggatgagcttcttatgattctcaacgcttacaacaaactgaagaaagccaagcatcctcttccttctaattcagaaaaagctcagattgctcttccttccaaatttaccaaagatacttgtgatctttatgagaaaacttattttgtgcttgaaataatcaagcttgtgaaaaactaatcttttcaaatccggtgcaaccgagtagtatgtcttgtttttcgcaggttcttgaagaaagatctcaaaaagaaggtcaaaggagtttgtcatcgattgttaccgatttggagcagcaaactatctctattacagaaccaatccttaagtcaaatgaatacgaacaaaagcactataaggaaactgatttatttagaaaggagcctacttggtttgtgttggtttctgctcaagaagaaaaacgttttggtttagaaaaagtaaaggaatttagagtttcaagtcctgtgtttagcgacatgattcctacctttgaaaacctcacacttgaaactattttaaaaccgaaagatcttttagctaatgacttgcatgaaattaattcctctttgagtgtttttgagtttagtcccatccctaatcttattagacctcgaaatgaacaaaaaatgtatgaagtgttcccttgtgtgaaaatttc

SEQ ID NO: 35831 - DNA, 553 bp, Arabidopsis thaliana landsberg
atacatacatacatacatacatacacacatacatgcgtgcgtataacatatttttccattttgtaacaagaataatcaaaagaaaataccatatggttgtagatttttattatgtacaaaacctccataaatccaggaaataactccttgtttttccccttccatctttaagtataaataacactagtgtgcatgtattttcatatatattcaccttgcatctttttcatctctctatcactatttccagagatcaatctgacaacttgaagaagtagaagcagcatgagcatttgaatactcttctcccatttcaacaaccctttcagaatcattctccggcaaatttattccctcatctatcacatgataacccgtgtttctcgagtcaatcttgacgttgttttgatgagaagaagaagaaaccacggctgcagcctcttcatcattgcttagctgagaagcaacaaatttatcgagaactctccagtcagtagtcatttgctctactccttgatcgaaatacagagagcttgaactttgattcccttgt

SEQ ID NO: 35832 - DNA, 1012 bp, Arabidopsis thaliana landsberg
aatccgacaacacaacgcaaaaggaggcggatattaataaagatgtgctgattggaaacctacaatgcagcaccattctatggcccgcgacgtgtaattcgagtgcatcacccatctttttcaagttctatgaatcccaaacccaaaccattcacaaaaacaacttaatccaactcaaactaagaacggctacgaccaacatcaatgcgcaagaagctgtcatagagttaaacatgaaacttagcagactaatctcccaaatgatcctataagaatcctaagtaaagtacaacactcacatagaggactactagcgatcttgacaagtgcgttggatggtaccgttagacagctctcacaaagctcgcaagataacgttatggtgagatgtgagtcgagaagtagccactgcactgcacagaggcaagaacgactgtgtgcaaccaagcgctcctagatgcctgaagaggatattcacagatcaacatcagattctttccaattagagatctaaggaagctacgaatctcaaaattttcaaaatcgagatacgaagattttcaattctcactgaattgattggattttgttgaaatttgataaagagactgtgaaggagttaggttcacgaacctggaaggtgatgagaaggtgaagcgacggctaggtaaggaggattgaggaggacggaggcgaggaagcgccgtggtgggagaacggagagatggtgatcttgcggtggcggagacgaaagaacgagcggcagatcctgcgttgcgccaagccattgaaggaggagaagtgaattgagagagagagagaggtttttgctagggtttagggaaatgaatagagagaagctctcgatgtgtttggttgtacggaagttcagtatggtgcatcgtagtggatgattatatttattgggctgaagcccatatctataatcgccattctaggcacaatatagtcctgatcgatgtatagtgtcattttataaaattttatattt

SEQ ID NO: 35833 - DNA, 1456 bp, Arabidopsis thaliana landsberg
tggggtattaagtattatgaatgtttttttataaatccattatttgtgctattttctgagggatatgcgttggggtctcataaatatatatatatatatatatatatggtatatttctgatccaaatatatatacggtatcaaaattaagttattggtttgaatattattcagagactttttaagaaaattatctcaaggtatttaatattatgtgttgttttaatattattaaacatctagattattatcaaaccttaaaaaagaagaacaacatttgtaagaataaattagaaggtaaaaatctgaatcatatatttaggtttggtgatcatctacaagagagaaggcacttgacgtcgttttattaagactagagtccattatgagaattcaaaggacaatgaataaaaaggaacagaaatgagaaatgaagagaaatatgtcattgccgaaaaaaaaaaaaaaaaaaagagaaatatgtcgtctagatgaggaattgaaaaaactttcatagtaaatggtaaccaaaaaaattgactaaatatttaatagaaatgtctaaaaaatatatttaatggattatattatctatagtataattgttacttttctgctctaagagtaactactcggatccaaatgtggtcatatgtccttaatcaagacttttttttttgttagtgagcattaacattaaaacaaagaaaaaaagtctattacggtaatggatctaaaaataatgataggaatggttaatgataatatgaggtcctatggaccaaaaccaaggaactagttatttatggccaaaggaattgtgtggcctaaaatggtttttttcttcccaaactacctttaattttagttaacccccttccagtaaaataataaggacccggccttacctaactccaaaataaaggttaaggaaaaccttaagtaaaaaatttttaatctccgaaagaataaaataaataattacccctctgggtccaaaataaaaaattaaaatcttcttcgatgtatcttggggctcaagcctcaaggcaatgggatcatcatcgtagtggattctcttttctttgtcatccccttcttttagggttttctttaggtgacctctgattgagacaaatctcttatggtggattttccaaaagctcgaaaacgatcaagaaagagagtgattcattttgagggtgtgtgactcataaaggaaaagaagagaaacaaaatgtatactataattttacatacatcaaaatcaatttcttttttatctcgtgggttttataagataaatagtttggttaacgaaacaagatgcaataatgacgatgaaggtcaataagcaacaactatattcactaatattttacgtaggcagagaaacaggttgaaaataatcactgtattaaaatcaatagagccatatagacagacatattcaattc

SEQ ID NO: 35834 - DNA, 2842 bp, Arabidopsis thaliana landsberg
gattaccatgccttccaataagaaattctaaccgaataatcggttagaaggattcgttgtaggtctacagctcttggcccccgtgtgttgccatcatattttggcttaattatgctcccgatttccctcgttgttgctcccctgtggtagttactccgttcttcgactgtgcaagtgtgctccagtgttgcacttcgaatttgataattgtccgagtcctccaatttgacaatgtacacacgcaaagggcacgattccgaaatgcatgtcaaagtcattaattacttgcaggagcgatgccggcgaaaatgaaaacgtctatttagtgcgtgtactactaacttgacattgcaatcttgtttgtttttgaatacccggccgacaaacagttcatcaccttcatacacaacatcccgaattgctagttccatcctgacacggcctgtaaaaaaattacttaacttagctatcaaatcagacaacaatgtgttccaacgtaacacatgatattacaatacacatgaataaatggaaaaataaatagaaagtacacgatataagtaagcatgacttgttatagttacgtataccaaagtaaatataaattattgtacatatcaatccgatgtaacgtagttataaaccaaaaaaaaatagtttccaatgtatcacatgctatttagcaacatacaggactatatggaacagaaataagtagacccttgacggatacagaatgtgcaagatatgttataggtactcgatatcaaattatatataaatcgatgtgttttatacgaaaatatcatgctattcaattggtaccttcttctccttgttcatctagggttggcgccacatccctgttgaaagatgcaaagttaatacacatatcttcaagagcctgttgtagtgggacctgtaggtccaagtgtacacctagaggtttggtcatgattgtcgccgacggcccgaaaaagttgcactcaagagtttctcccccgtcatattcattctcgtcgttgtacccttcacttccgctgtcagaaccgtaattatcagttgccagattaattgacggtagccctagatttgccagcaaatctgcctcaacaagatttgagtctccttcctgcgtaaacagagttgatataagcttggtaccttcttggtaattagaatgtattgaactactaattttttacctcatctgccttttcactcgccgtgtccatactttgatttgtctccaaagtcaaagctggctcaacagtagctcccgcaggtggtgcatgtacgttggaggaagagtcacccatgtttgtaccttctgtacctttcgaacgcatccatcggaggaccgcttcatcatccattagctttctccaaatggcggactcgtagttaggagatctttcctcattgcaatacaatggtgatttccccttagctggcaacccgtaactcgatgtctgactcgttccatcatcaaccggaacaccatctaccgttagcttagagacaaacaaactcaagtcttccaactcaaaacgcatagctaggaaaacccccattgtctcatctgtggcgatggttactggcttcgttcgtcctccaaaggtagcctccatgtccatccaatcaggccattggtatgtcatgtgtagctgacatcccatgtattcctggccgtacgcttctctaaccagctcccgaactgatgacagcttttcaccttcacgaatactcaaccgtctgacagcattattgtggtttgctatgaatatccatgtgccatcagctccgattgcccatgttccactcaccgtccggacataacagtcttcggttatttcggttataataaccattggtacctacatatcaataggattgcattaaataccatataaaatcaccatgcgatttattaatataacatcaaagtagacaaaaaaaacaatcattaattgcataccaaaacagcaacgatcgacctctgagatgttgttggatacttcgtttgtgttttttagatagaagaagaggtgtgagagatgatatcttgccatctattttcttatatagaaaagttgaactttttagggctacagtagtctagatattttgggcaacagttgctgacccatttacaaccacgtgaatttgaaaaggttatgatttccctcccaacacccgagggcggcgagaagatctcttcacgaatgtcgcatcaaacaggtacttgttctttatttgtattgcatgttatcggaagtagaaccaagtgatttaccatatactcatgtttttacacattaacttgtcccgaggtaggatacactatatcttcgtcctcaacttgctctgtcgttacgctgacgtcatttgagacgtgtcacctacttgagtcgataagatgtagcgtacgtgagaagcacatatatagcgtgtgttaagattggtacacatgagaaaaagtttccattttttaacagtttaataccttggaagctgaaactctctgacgccgcatttaatgctatggatacgtacctactctcctctttacacgcgctattcactgtcacatctgttaccttttatacttcttccactatgttatttttgctagtggcagaacaatgattgttgcgtttttttaacaaaacatgttgttttcgttgtacttatgctgtttcggaaatataatttttggagcttcttctcaaaagcccattatactttaggtaatccagtccagtacatttccatttaggccttccaaataaaacttcgacttcatttactttacattaatacatgctgctaaggaaaattt

SEQ ID NO: 35835 - DNA, 1493 bp, Arabidopsis thaliana landsberg
gtgttcctatgaagtgtacatgatcttaaagactcagatttggaataaaatcattgttatggggaagatttgttatttaatttgtgtagataataaactgtgaaatgatgccaataaaaaaacaaactgtgaaaatggatcttgtgttgtaaataaacagtcttctactcttcattgaacacttggtctacatataatgtcaaaaacatgtaaattaatttagccaccttcctaacatcgaaattcaaaattttgaccttcaaacttactcattttaaaaagtttatgagaactcgaaatcaggatttatatatacacaagttatcgacctgcatagtattctttcaaaaactaatcaatatgtaacacttaactcagactcggatcaatgaatggttgcttgtgatataaagaaaagaactgaaatctgcataccatgtccatttttatggtaccaagtaacaatttttattgaaagaaacctatagtggtctattattgccagatggttgtcttttggagatcctctttgaatgttcgacttaattctggactatcatcaatgttgttgtatatacgaaagattcaccaattcaatctgaacgttatcttatagacaattcaatcttattttttatcactaatttccgtaggaaaaaaacaaaagaatcttgatctctgcaaagaaaattctcttaccttgatttttgcttaacagccaagtcagagtcatagctatcactttcacataaagtcatgtcaaggcctaaaacaggatccacatatgtaggttcggcccaaaacgtattatgtatctgctttaaaattttgatggttagcagaaatcagaatatcagtatgtgacttttcaaaaacatatatttcttaagagtaaactcttccactgggtgtattgaagccatcaaacaaataatttgagaggttttttttttttttttttttttccgtcacatgttgagagggtttatatgaagcttttttggcaggtgttgtaacaaaggaaattggggaataagaagcacaacattatgggtaagtgtttccggtagttatttgatgtagaatttgtattaagataatgaatctagtaattaaccagtcagcatagttcgtaccggcctataaaccgcatttacttgtggagtttatcataattaggggatttgtgtcgaatggaaaaacaatattaaaaatgttatagtgatacccatttgttttctttgaagtttctctcctagacctagtgtagagtggctcgcaattttatgcgatgtaacatgcgaatatcgttaccgtctaattaaaaacttatgtcaagtagtcaaataaagaaaccctagaagtagaagactacgaaaatagggttcggcgaatttgtctcgagtcgctaacaaacatgcatgatgcatcaccttccactatggcttacacgagtttccatttattttctttcttaaatcttttttgttttt

SEQ ID NO: 35836 - DNA, 1450 bp, Arabidopsis thaliana landsberg
gataagaaaaagaaatatattaaaattacgattttttgcaaaatcttctccttttttacaacccttttggggcaataccgggttatattgttcatttttaaaaatatcccttctcttcaacagaatgaccaaattaccctcatttaataagaacatgtatttggaaactttcagtttcccgccaaatttttggtgccaaaatttatttttcccgccaaaaaaaaaattttccgccaaactttttttcccgcccaaaaaaacaaattcccgccaaaaaaatattttcccgccaaaattttttctcgtaaaatttttttcccagcaaaaaaaatgcttttaaaaatccttgtaaattttttaaaaactcttttaaaaaaccttgtaaagttttttaaaagctttgataggtgctaaaaaccctagtaaatcattttaaaacctcttaaaatctttataaagtctttaaaaacataggtaaatactttagtacccctttttaatcttatgaaaatcattttaaaactttttacaatagttttacaagatttacaatcgttttttaagcataagtaagtggcattgaatgatttacaatggattttaaaagcttataaaagggtgaaacatgatttacaatcgttttaaagcataagtaagtggcatagaatgatttacaaggtatttaaaaagggttagcatggtttacaatcgtttttaaagcatatgtaagtggcattgaatgatttacaagagattttaaaagcttataaaagggtaaaacatgatttataaccgtttttaaagcataggtaagtggcatagaatgatttacaaggatttttaaaaagggttcgcatggtttacaatgttttttaagcataagtaagtggcattggaatgatttacaagggattttaaaagcttataaaagggtaaaacatgatttacaatcgtttttaaagcataagtaagtgacatagaatgatttacaagggattttaaaagcttatagaatagttaaacatgatttacaatcgttttaagagcataagtaagtgtcatagaatgatggacaaaggaatgtaaaagctttttaaagtgttaaacatgattcacaatttttttcaaagtatttactataaaacctttaataatagtctctacattgtcttttgttcttacatgaattcaatgtgaacctgttaatagggaacttcgacgaaaggggaaagatcttgtgtaaaagaaccatacttttgggcgagtgaaggagtatatacacttggtgatctcgaagatcgattgttttcaaaacctaaggaaggtgaacctgctgttgaagatgaagaaaagttgtgtcttaaagcagcccttgttgcttgaaggaattctattcacaccattagtaaagaggaagatacttttgtcacgattgcaacatgcttcttat

SEQ ID NO: 35837 - DNA, 1414 bp, Arabidopsis thaliana landsberg
  unsure (1)..(1414): unsure at all n locations
tctcgtccctgttgttaccggtgttgtcattgcaagtggggtaattgccttttaacttcaaaatctgctctttgctttttgtatgttgaagaaatgtgtttgttcatagctgatgaaatgtgtagctttagggagatgggaatgtgatgtaggaatagaagattatgagctgaatctgctttgtttgattcattttggatgatgatagaaatcgtaggtaacatttatggaacaaggatacgatggtgtattataccttagaaacatccttgagatttgcctgagcttgatcacttcatgatatgtagtttatatgctgctcaaattagactagaagttgttcttttatgcgtgcatagtgtgaatcctgttggatcttttttacatttagagcatcctttttttctacattgactttggttctatatttgattttcttcaaattttcgcatatcgtcagagtgagccaagtttccacctgtttggattcattatgtgcattgcagctacagctgcaagagcacttaaatcagttcttcaaggaattttgctttcttcagaagggtaagattcttatcagccaaagttttatccttcaaaagtctgtgattttagagtgctgctgaaaatatttattggatttgtttgaagggagaagctaaattccatgaacctcctcctttacatggctcccatagctgttgtgttcctccttcctgctacacttatcatggaaaaaaatgttgttggcattacaattgcacttgccagagacgattttagaatcgtttggtatctgctattcaattcggcgctagcttattttgtgaacttgaccaatttcttagtcacgaaacacaccagcgctctgactctccaggtaaaaacacatctcttctttctatacatcacgtcgatcatctaaagccattctgcatctgaccatgtcttatcacttttctgtgataggtgctaggaaacgccaaaggagcagtagcagtggtggtctctattctaatcttcaagaatccggtgtcagtgaccggaatgctgggttactccctcaccgtctgtggagttatcctgtacagcgaagccaagaaacgaaacaaaaattagaacactaaacacacacaaagcttttacttcttcttcatcattcccccctatatatatgttttatattttctcccctatggatatacaggcaagtagtctcttttgctgggccaaactgactcttgtcttaatgaaaagctgggccaaaaacatctcttttttttggcagaaacagagaagcaaagccacacaaagattgattaccaaaggcaagaatttagagaacttcctcctatgaataaggtaacctnttggttttcattttggtctttcttctcggattctcttgcctttc

SEQ ID NO: 35838 - DNA, 1361 bp, Arabidopsis thaliana landsberg
  unsure (1)..(1361): unsure at all n locations
acatacatgaatgaaaattagctagtgttttatgggaaatttttgtttaaataaatattatttgaataatatgttttaaactctcatttttaaaaaatataaaattatcttttactataggtagaagtagaaccatgacccgaatagtcattcaattttgaggaatatactgtatatataatagcaaatgtaaaggcatattgtttgtatgctagtgaagagaaaaacaaaacaagtgccaaaccaataatattttcccactctcttaggcatttcaacatcaacccaattctttttgtctctcgcgcatttataactcatagaaacagattcccacatacatacacacacacacatatatatagatcatgcatgcgtgtgtagattattcttttataaataaccgcatgaaattaaaggaaagatgtaaagtaataacgagttcccattctcgtaacagattatcccatcacccaaagcacctaatagcttgattctccaaccaaatcaagcaagtttcatgatctaaaccctaagtcaccacatccacacaaatgaaaaaactattgggaaaatcacatgtctttctattcttttcctttttaaatttgtttggttcatttttaacaattaaagaaagtggtccaaagtgcattttaaggcaaacccttatgaaatgttaacatcaacaccataaagacacgcctgcccttactcctagacaaaaccctaattatcctttttcactcttcctaactcggntgaataattaaactaatcatctaataacaaaaagctgnttttcttgaaagacttcaattaggtttagttcttcaatggcagaaactcatatttatcagtgtttgccactaatgttcttgtctttctggccatcgggacaaatcccttcttttctcagtggaaacagctcaagtgtctgttcttgatgatccaattcaccgttggagcaatcttcatgttgttcttgatctttattatcatcaccatttcgatgacaagtctctgtgttcgttgcttctctcgtacgtagaaatacaggtgaaaccgcgaccgtatctttagaagcagagacagcattgttgctgctggacatgttggaggaaacagtccgtgaaagaatgaggttacgttgatgatgatgatgcgaagaagagtagaaactcggtggcaactgcatcatctgccacgtggtgtttatccctaaaaagcttcgtctctcgtctcctccacaacgagcattgtgctccacccgtatattcgctggctcctccagatgataatcacgggaaggtttctaattatgcaaaagaaagaacattcaagatgtgttgaaattagtc

SEQ ID NO: 35839 - DNA, 2315 bp, Arabidopsis thaliana landsberg
tacgatatatatttataagaaaaaatcaggtagaggtgtgctagtgtatatgaaaaccagaagtggcttattaaaaataaaaccaatacataagataaaactttcaaagtaattaacatcggtttgaaaaaaaaaaaaaaaaaaaggacgagagcaacaaacaaaataaagtttccttttatcccacattcaaagctttatttagatgaaaggaagtcataagaaaaatgaaatattaattaagaacacaaagatcaaagattcttagattgatttcatataagagaaaaggagagttgctaggaatctaaacttaaatgaatctaaacttgctattaaatcctaagatacatgggtttgtaggctttgagagtatatttagtaacttcaggcttatcatgcgacaatatttgcgcttcttagatatgctctaacaaaagataccatgatacttttatcccgaaacaaaaagaaaaaaacgaacaacaattcaaatgacacaaagtaatccatttacattgcaacaaatatatgatatctttctaagaataaagtaaacaactaaacaaacattttctctagcacttgcaccacttccttcatagacggtcgcttttgaggcaaggaggagacacattcatagcctaacttcaagcatgcgaccgcctcatcctcgcggtgagccacctcaaccctaatttccccatcgaccaacttcaagaaccaacttttctcatcagtctcagaatcgcgaaccaaatctcgatcgaccgaaaaaactatgcctgtgagaagttccaagagtataacaccaaatgaatatacatcccatttggggtttggcttctggcttgtcgaccactctggtggttggtcttgtaagctcgacaatggcccgtccgtgagtaaatgggccgaagtcataatacgatcaaggcccatatctgtaattacaggctcaaactcggagtccaagagaatgttattggccttgatgttgccgtgcacatgcttcttgtcgtggatataagcaattcctctagctattcctcttgctaacttgagccgtgcctcaaaggagagaggtttatgagaaaacgagcttgattttgctgttttcatatcaaacaaaattaatgtcaaaatatcaagattcgtaaaatagtttgtttgttaagagcaatgggctaacatgcgccgactagtagtgcgtattctagcaaatattaagtaacgtacgccgtttgtagaaacttaccggagatggaggatagaggtaggtttccatttgggacatagtcggagatgagaagcttctcttctttcccccaaacgaagccacgaaccctaacgagatttgggtgacgaagtttagcgataccctgaacttccttttcgaattccttaaatttcgccgccggacaactctccgccccaatccgccgcactgcaaaagccgcaccgttctctaacaccgctttatacacaattccgtcgcttctgttggttccaagtacgtaagctgatgcctttagtagagtatctagctccagctgagtttctccatccactgtcactagttgagtttcagtattgtgttttactcgcccaccacctgttcgatcaaatgcctcaacgggtttttggttctctatgtcactctcggatgacaccgacgttgtttcttcgtaccttctgcttatccatgaaccgcatcccatttttgcaggcggagatttcgtgaactccaaggcgtcggcgacgttgtgtttcgatttcttgacggataatgtatcgtttttctccagacatttttgtaagacgttgaaagtgctgtattcttggtagcttctacgtttcttgagctggtatatgtagaggatgaacatggctatgatagctagaccagctatatctgcaagtgtaatgccgatgattgtgcttggttttagtttgcttttggctgtttgatttgttgattctgttgaagagtttgttggtgttggagttgtgggcatgactgctattgcaggtgaagtagtttcagagatatttggtgggtctgatagagtagaaggggttgaacaaagggtctttaatggctgaccacataagcctatgttaccagaaaaagactcggtcttttggttaagcaatggtggtgtgttagggattggtcctgttagattgttgaaggagagatcaatgatggcgcttgctggaaatttttcggcgaaaggtggagaaatcatgccggagatttgattgtttgataagttgaggtaaaggagacttgttcctctgaaatctggagg

SEQ ID NO: 35840 - DNA, 1153 bp, Arabidopsis thaliana landsberg
ttccggggactcgcggtcattctccggggaagttctgatgatctcttttttctttccaactttgctagttctcggatcctttggaacgcgacattacgtcaacacgacgggataagaacaaccatggtggttcaacttctcttggtggctggctggctgcttatggatttatatatactcaaagcttcttttgcggctcaaacgagaagggtgatacattatgcacacatgacaaaaccctcctagtttttacgaatttatgtttgggccttaatgggctgtaattcaaaatggcccacattttagatttggggatgttacaaaaaatgtcatccgttgtctagcgctcactgctcagagattaggtctccacgggattctgaacgtagctattcggtatggtctctttaattcgtaatgagctatgttgtttgctgctttgatgtgtttgaaggtgttactcaatagaggaagcactacgtagtttccgtccaaggtttcttgggtttttttttggtagcgatcgggagacaatgtctctcataatttattataaatctaaacaaaacaattatacgagaattcgtctttgtcacattgacccaaatgcatcattttttaataatcgaagcaaactccaaaggaacggtagataaagcgtgaaagcctaaaggtaacgaaaacgcataattagccaaaatttattagttctttaatttattaagttatggttaattttattttttaaataaggtttttttttttcattatttactaacaaaatactatttggtgaatcagataaatcaaccaaattccttatcactattcaaaacacgttgtttaaaaattaaaggtgcactcaaattcttataataatttttaaaactactcatcaagtacatatatgctctcaatctctcattaaaatatccaaaattttacaaaagttgaggtgaattttcataaaattgttgtaagtttaaactttttacagaagttttctcaatttcagttactcaacgtcatgcatgtacattgtcactaccacactacgtacctataaaaaccgattgattttcatggttaattttgccatgtgggataaacggttgaatttgctgcttgaaggctaaattggtttgagttttgt

SEQ ID NO: 35841 - DNA, 527 bp, Arabidopsis thaliana landsberg
cttgcaacaaaccaatggaggcggcacatcacaatagatcgccccggaagaagattgatagacattttcaaaaccagcggagagggtacgtgatgaaggtgatgaagaggaccgcttgagcgaagagagctgggccccagttgaaaaatggaactacaagggcgctgagaagagccggaccatgagtgttaacaaaccaaaatgtatgagcccatccatcaccccatatcgaacttgaaaccagggatgctgaaagggaagaggccagaaactttcctttgtcaaaccgagaggaaccaaaatcgggaaccccaagcgaatagatacaaatggacccaggggaggcagagttcccaggagcatttggaacctttcggtactgagcggaagagcccgttttcaagtagtgttcgatcaattatgtattatatattattcgattgattggtctgaggttattgataaaaaagatttgtctaagtcacttcctttctttttgtctaagatacttcgtttctctcagccca

SEQ ID NO: 35842 - DNA, 2062 bp, Arabidopsis thaliana landsberg
tgacttaataagagatatagctcttaggtataactaagaaaaatgtaaaattaatcttataatagaattcaaggatcaatcttatttgtaaaagcataactataatataagcttcattacctttttattcatgcgaaagtgtcaaaccgatatttaatgaaaacggatgtaatattaatttaaatagctatcggcactcttaaaaatcgtttttgatagtattagatatatatatatatatatatatatatactattagataactatatgtgtgactcacattgtacaacgaacagaggcgatacttgaaaacagttttcttcaaaccaacaccggcggttctctcctccgaccggcgctggcctctccggcgtcggtagattctatgttttctcttttccatttttttattttgttattgttgttgttaggttttatgcaataactcgagaatgatagcgatgatgatgaaatcgtgttcgtcattacgttggaatggtgttttactgttttccggtgaatctattgtggtttcttatgttgttacactatttctatgtcggttcgtgttctcggaatgtatgtttagtcaccggcgatttcgattcaaccgttgttttgctatgtccggcgattgcctcgtgaatcttttggctttgttagccgtgtgtttggtcatactaacatctgatgttagttatgcgatagttcccgggcgtcagtatgatctactatgggcgttccgaagtttaacacaaatcctatcggatttgatatgtcaccatcgaccggcacggaaaccaccatggaggcaatatgttgaggaggagttggaggctaataggagaatcagaagatggtttataccatatcaacaaaaatggggtttaagaaaaaccaagattaatgacatttctttctatatgagagtttcgatcaattcgaaggttttgcgatgtaacagatggatcgctgcctatgattttcgtatgcgttaccggtatttcatctataaaaagaagatgattcccaagcaagaaagtcacaccaaattgacggaaatgatgaagacgattaaatatttgattaagaaagcagagcgtaatttactttatcgtttcttcattatataaactattgattatatctgtaatctcattgatacttttgtatacaatgattcatattaatgaaatatttttagatgaaaaaagaaaaaaagatacatatatatatatgtgtatatatatacatattttaaatacaaatgttatatttctcgaaattgtttatcggtttgcatatatagtcactcctaaattacattctttaattgtcgcagtaaaatattagttcatataaaagatacttactgggaagattcatgcgacctacatcttccggattcatgcaaatgttaagaaaggaacaacttggttttgttaaatgtttcatatatcatttttaaatttgccgcctttaatttagttctaaccattgaggaaaatctaacaactataggtaaaatgttatttacttatgccaaaatgttaacgaaaaaagttatcggggtcccctaaagacccttttcgttctaataatttaagcgtttcatgtcaagcacatgaacctctcctaacgtgtttatattatactattatatctagtgtttatcactttccaaagttagaatcgaaagaaacaaaaccttaatgtaaattcattgtaagtttttgttttaagagtttttttttataacttttacacgttttgtgatctcctagctcaatgagcaatatagtttcacaattgcaaatcagagatcaatgaaatttttagttcttctatttttgtttttataaaactgtgcagtttagtgattccattagcaatagaaaaagttaagtaagttccacatcagacggtgattatctgctgatctagtctctttcattgaatagttttttttcctcacgactcgtccccttggacccatattccccagtcacatcatgaagtccttaatacggtaatgtatcaacaattatgaaggcttttggaa

SEQ ID NO: 35843 - DNA, 3293 bp, Arabidopsis thaliana landsberg
aaaaaaactctttctgttgcaaaattaaccattcaaatcaattactctccaaagtgtttttttgttttgtttacacatatgtaaagagacgaccgtagttatcaaaagcattttggtcacaacaaagtaagcttaacaatcaatcagcaagtgaaatcaaatgattacaagtgaataaagagacaaagagacctcgtttcaagccttgtgacgcaattattaaacagtagcagcaagaactttcaccaattcacattctttaggcactgtaagcacatgatcaaaccattcaacttcccaaaaatttcgcaacttttgcttctttcaagcgaaatctccgcacaccaaatcttcttcttatagacgaaactagtcaaaccataaagcaaatcctcgtcccacaaaaccgctaactttccaccataatcagccaatctaacagaagcaccaagaggaaacgtaagttgtcctaagccctccaaatatctccacctgcttgcctcagtgtcataccatataaccgttctgctataaacagagtacaaaatatcatctatctcacaataagaatctgaacgcatatactgatccaaatccaaccatataccttccttgggattgtaagcaacaaccccctcactgtcagtcactacatggatctttccatcaatacaaatgcttttggggtgaagaaagttgtattttctgtcgctgtaagggatgggctcactaacccaaacttccgttttcgtgtcgaacacctcaaagaaagaagaacctaaatgcatatcgctgtaacatcctgctacatatatcttttcaccaaggacgctagcagtaagtgacgaatgttccaccggcaagattggagccttgcgccgcctgtgagaccgacaatctagaatcgagctttgaacctggcgccacgtgtgagaccggcaatccagaatcgagacgttagaggagggcccgtggatgtagtagatatcagaaccaaccaccacgagactcgaaaagcgcggtttatgaaaactaggaatggggactgttgccaaaacatacccacttgacttcttttcagtggtgtcattggatagggtttgatctggcttccgacacagggtgaaccagcgataaccaggacagcaccgtaagcacacatagagacaacgctcggtgtgacccagaatgacctgctggccttgtaaagctccggtgaagctaggagggatcgaaagctcttggaaacgagtgagagagtcggatagtacaatcttgggacgcgtgcgatgatgtccaatagcaaatcatagggaattgactgatttggggacagcttcttcttctttgtcctagtcgtagtcttcctcttcctcttcttttccagggacgacattgatttcttactcttcaaaagaagaagaagaagaagacaacacgttagggtttttctgtgacttttgattatttctatttttgctttttaataattaaaccgaatacttcatgcaattaagaaatggaaaattagttttttatttatttagtgaagctctcaagatctgtatacaacatacttacaacatagaattcttttttatctctacagaaaaaaaaaaaataactctgtactcaattctctgtctatgagttgttgttctgtggaaatactttcttgatgaactcaagaaaacgttgggagtagaatgtaggatcaacggctgagatcgaaagagaatcaaagtgaagagatttataagcatgttcaatcttcttggtcatgttgtactcttgtaagatgtctataatgccaaggtagagtacgacgtcgcagcagtcatgtaaaatctgcttctctttatcttctcttcccggtatcagctctgctcttgccggcatgttcactccttgctgtatctgcagcctgcattttatagagattgttttcataaattcaactagactaagtttataagcgacacctaaaagtctacattacttgtcagcatcggttttatctggatgaattcaatttcatcatgatctaccacaagtgtgtaaacctccaaatgataaaggttcccgcttttagtttgtagttttaacataacttcagagttttggagttacgataataaattgagcatcattgttcctcatatgttaagttaagtctaagtttttcaattttcaatgagttgagagttacctggctgttccaggaagaaggagatcgacttcttcatcgccaacagcggatgctcgtaatctgctgcctctgatgtgagggccagttacaatgttttcacttccccgaggaacgagaaccaatccttcatggtaagacaacatgtcgtcgtcgattgtatctgctttcatcatcatcatcatcagtcgaagaaaaatactatgaatcattttagaggtgatgaaaaaaaaagaatctcaccgtcttcagctacactttctagagcatcagttgttatactttgagaacggaccaattgggatcttaagtgctgtggagctcgatgatgcacaccgagcaaaagactgtaatccattatgttctgtgcttccaagaacttgctgtcgatctctagttgcctgtttacacagcaagaaaagaaattttaaactgcggaatatggattaatacatgtatatatcttacaagaaggtcctggagagagtaatacctcagtaaaccttcccgccaagaaggctccaagaaaaagttgtagttcagatctaaatctttaagtatcgtgttctcgtctatctcgactttgtctgcagagcgtcccaaggacgaacctttaaggtcaaatctccgatggattcttagatctgtaaagaacatgttacccatcaccacaaaacggaactgcaatgcaagataattttcaaacatagttagttttaagattgatttggatttccaaatgtttctctaatgttagtttggatttccaaatgttgctctaatgttagagttctactctacatcgaggcagcaatgtcggcaacctcaaagctaatgataataaaaaaatcaaaatcagaatcttgaggtattttggttcaggaccttttgaccacttgatggtttgattctgtgaaggccgaagaatttagtaatgagagtgttctcatatgtcttcacatgatgatggtaatctggaagcatcctcagaagaacctacacagaaaatctggaagctcaatggcaagacggacaaagagtctacacaaagacatggggaaaactaagaagataataaaaacagaga

SEQ ID NO: 35844 - DNA, 6777 bp, Arabidopsis thaliana landsberg
tttctttttttttcttttctaaaagataccataacccattgttgataggctgaggaagatgcagcatctcttagagcagagcttaattcgatacaacagcaagcaatgggtaattcatttgctggcatgtcgccaatgggagtttccccagaccaactaccaatattagaaaaggagatggctaacctaaaactagaattacaggttcgtatgattttgaaacagataatatgttcctcgtgagagtctctgtatctaagataataattttcttaacatacacagaaagaatcagtgttgaggcagcaagaacaacatcgtttagctgaagaacaaactcgagtagcttctttaatgtcagaaaagcaggaactggaacagaaaatttcagttttatccagcagggcctcaggtaatatgcgatgccacacattttttttttttctcttcttttcaaagcaagtctgtatttgcagctgttacgatcatcaggtgtttggatgcactaactgacgtctaaatgcttttgagtcattcggaatttttttttactgagttgtgcattgttggatacatatcaatgactttttttgtgttatttattatgcagaagtatcagagtctggtcaaaaagtattttcagtggtaagaaattgttataacccatttttcccacttgccagcatataagctttcacgttttatggaatccctaagttttaggttcgatggttttcatgtaggaagataaagaaaaactcgagaagcagttgcatgatatggctgttgcacttgaaagattagagagtagtaggcaaaaacttctcatggaaattgacaaccaatcatctgaaatagagaagctatttgaggaaaactcgaacctctcagcttcgtatcaagaatcaatcaacatatcaaatcagtgggagaatcaagtaagcttgtcacatttacatttgcttaaaaacattttcttggactttacgttgacttgtagccaactgcataggtgaaagaatgtctgaagcaaaacgtagaactccgtgaagttctggacaagttgagaacagaacaagctggttctttttcacgagggccttcagaatttgaggcaaatgggtcgcatggaactgatactctatccctcaaggttttggtcctcaccgactcttaagtattagaatagaaaattcaacacaaatagtgtttgtggtgttaaattctgcctttgtttttccagggtgaacttgcgaaagaacagagcagagcggaatcattatctgctcaagtcctccaactctcagctcaactccagcaagcaacacaagcatacaatgggcttatgcgcatgtaagtttctcacggaactttcttcaatccattgagattctatcctgtcttgttaattgttttctattacgatttcttgcagctataaacctgtgcttagaaacatagagagtagcttaatcaagctgaagcaagatggatcggttacagtggcacagtgaatcaggaaccaagggcacacttctgagtattgaatatatttttatacaacaaaacatctatttagaaccaaggggacaagtgaatctaacacttttttctttattgaacaatttggttcgttgtgttgtaactgttgttcattgaaagcttcggttcgttttcctcaagtttgattttggaaggtttggagtttggttatagaagtgagactaaaccgaatttctaaatctcgacaatgttcaaattggtttccttggtttttttttttatcttcatcaacgaactgggccttttgttacaggcccattttacttggattgggctaattataaccgaaaattgtaacggtttagaatcttcaattgagcgcgaaatgatttcttccttggcagcgatcaccggagggccttcaactttccggcgtgatcccgattcaaacactctcaggctttcacgcaggaaaacattaatctctgtattacgaagctgcaagaacattgcccatgttccatcgattcacgccaagatcattaggaccttccatgaccaagatgctttcgttgttttcgaacttatccgtgtttgctccactctcgattccgtcgactacgcctacgacgtgtttagttacgtatctaaccctaatgtatatctatacactgctatgatcgatggttttgtgtcatctggtcgttctgctgatggagtttcgctgtatcatcggatgattcacaattcggttttgcctgataactacgtgatcacctcagttttgaaagcttgtgatttgaaggtatgtagagagattcatgcccaggttttgaaactagggttcgggtctagtagatcggtagggctaaaaatgatggaactcgacgggaaatctggggaattggtgaatgctaagaagatgttcgatgaaatgcctgacagagatcatgtgcagcaacggtcatgattaattgttattctgaatgcggtttcattaagaaggcgttagagctttttcaagatgttaagattaaagatacggtttgttggactgcgatgattgatgggttggttagaaacaaggagatgaacaaagcgttggagctttttagggaaatgcagatggagaatgttagtgctaatgaatttacagctgtctgtgttttatccgcatgctcggatttaggtgcgttggagctcgggaggtgggtacattcgtttgttgagaaccaaaggatggagcttagtaatttcgtaggtaatgcgttgatcaatatgtactccaggtgtggtgatatcaatgaggcaaggcgggtttttagggtaatgcgagacaaagatgtcatatcatataacacgatgatttctggattagcaatgcatggggctagcgttgaagctatcaatgaatttcgggatatggtgaacagaggatttaggccgaatcaggtgactttagttgctcttttaaacgcatgtagccatggaggtttgttggatatagggcttgaagtatttaattctatgaagagagtttttaatgttgaacctcagattgagcattatggatgtattgtcgatcttcttggtcgagtggggcgactagaggaggcttacagattcatagaaaatatgccaatagagccggatcatatcatgttaggaactcttttgagtgcttgtaagatccatggaaacatggaactcggtgaaaaaatcgctaagagactattcgaatctgagaatccagattctgggacatacgttctcttatcaaatctttacgcttcatctgggaaatggaaagaatctacagaaatcagagagagtatgagagattcagggattgagaaggaaccaggatgcagtactatcgaagtggacaatcagatccatgagtttcttgtgggagatatagcacaccctcataaagaagcaatttatcagagattacaagaactgaatcgaattcttagattcaaagagaatcaaatagagattataatgggtttctagtgtcagatacactttgttgatttgttctcaagtaagtatgtcttagtccctcaaaactttgtctcttcttctctctgtttttgatgatacaagaaaagaaaatgagcataactcctttcttaaggctggattgagtaagcaacgattggacttctgacactgtgactcccatcagaccaaaccacagacgaacttacaaaacttccatccttcagttctttaccagagatggtcacaacaaaagatttcttctcctccaggaaaccgaatctcagtatttctggttctatgctaatctgaagctccggttggagaggaacaacacttgccttgtacgtagagtttgggaatccaacattagtgacagttcttttaaacgtgacattgaatggatcaagagaagagacaaacgtagtcattgttgggtaattcagatccttgacttctgttctttccgaacatgtgacgttctgtcctgaggttgttgtgagcgttgttgaatcaaaaccctctgcacataacattttgaggtaatcttctgtttctacttcatatacaagtccggggtcacttgctttggtcgggttaatttggcctgatccatatgcaaattcttgctcggggttcttcttaaggttcatgggggtagctacataccatgacaataatacgtttttgtattattccaaaagtaagaaaatcagaagaacgtattgttgttttgaattataccggtggtcattatagcggatttgattgccgagggagaccagtcggggtgaaaagacttgacataagccgctacacctgccacatgaggacaagccattgatgtgccactcattacactatacctcacacttctcttgtcctcagggttcaaaaaacttgaaggagaagctaccggagaaaatgcagccagaatctctaatccaggtgcacttacgtcaggctgcaaactaacattgatgttattccaaaaacaatgattcggatataaagccaacacaagcttaatgatctttgttccggttgcactaccttcaagaggttctgaatgacgaaacttggcccgcgagaagaaaaagatggaacatatggagcttctctatctactatctcctcggttcttagtatctctgcttgtggaggcctgcaaagttaactcttttaacatctcaagaccgaaaaacaaagctgttcgtattcattactgcttacatactctgcagattcaatgtatgacttgatagatttgtagtcctcaaatcccagagaagaggcaggaaagggaaccacaaaggcgctgtctggaagcaatgtgttttgaacaatgactccaatggctccagctaagtaagcttctctatatcctaggaagtcgtcacatagaacgatcttccctttcaccagctcactatccacacacccacttgaacaataactgtccataataataactattagaggcatcaatgtgttttgattcaagattcagatgtgaacgtagaataatttaagaaaaagaagagacttcttactcacccggcttgggcttgggaacaatttctcgacacgttttggccgtaaacgatcgggaactttgtcccattgagattgaatgtattaactgatataccctgtataaagaaacagagtatcaacgactcttgaactttgtcactaaatctgaactaggatgtgaaatgacgttgtcactagataagaaaatgtaccgttaatgcttttccgttaccaagaacgactctgtcaatgaactgccggtccgtagcgctggctgcaacggttatcatccatggcgatacattagccaccgaaccttgatcaggcccattgttcccagctgaacctgccgtgatgattcctctcatcattgcgtgaaaagaaccaatggctacagaagcgtttaataaattggagacgtaatcggctgagattgagatcgagataacatcaacaccatcggcaatggcatcatcaaacgcagccagaatatctacatcgttgcagcggttgaagcagactttatatgcggctattctcgccgagggaactccaccacgagcagtaccttgagccaaaccgtagaagctagcagcttgaaccgcattaccagcagccgttgacgcactgtgggttccatggccttcctcatctcttgctgagtcggcaaatttattgtaaaacctagctccgatgagcttgcttgtaacacaagaaacgtaacccttatatcaataccatgtccaggaaattgaatgattggattcttacgaggttagaatataatttacttgttgcaagtgaattttaggccacctttacaggaacctttccatttttttggaggcggaccaaaaccttcgtcgtcaaagctctcagattccggccagattccactgtcaatcactccgacaataacatcactttctttcacactctctcgtctcgctttctcgccaaatccgacaaagtcccatgatcttgttgtcgtcagttcatgactcttgcttggaaacactgacactacctctttcatatctacacatttataaattgcagaaaacgttgtgtgttttgtggaagattttccaaagtttctgacatttgttttgtaagaaatgatgatttatgaaatactcactttgcagtttctgactctcggcttgagatagattggcagcgaatccattgaagctccttttataacttctaattaacaaatgcgatgcagcactgaaaaaaagaaccagagacagagaaacatgttgatcctcattcaaaaattacatatgtaaagtgtttggaataaggataaggaggaaacaggttgaatcttacatagtgccaacaagtttttggagtatactgagatggtgagagggaggtgagtacttaatctcaggaagtgttcccatatacacaatatacacctgcatacatttatgtaaatcagagatagagagagagagagagagaggtattattagatgtgttgttcatatgggaatctcacaaaacagagtaggaacttgaacttgcctgtctattatcatttgcagacacatctctagtgaagatgaatgctaaacaaattaagtagagaggtgtagagagcttagccattttgtgaaactctaaaagagagagcaaagttgggattgtgactctgagagaacgaatgtgttattgaatagattgcatactcatcattgttatgaaactatatgggac

SEQ ID NO: 35845 - DNA, 814 bp, Arabidopsis thaliana landsberg
tcattaaattttaaacgacatgaatgttattattttaatagtttctgcttaagggtaaagcaaatacccagggcggggggggagtgttactcattctacattctccgttcagagctccctctatcctggggaagggatttttagggagtcctcttatttagggatgagtgttccaagggttgtattctatcataaaatctttttgatttctaaatgaaatggtatcataatgttcatatatacacaaagatactgtcttagttagggttttactgctgtgaacagacactataaccaaggcaagtcttataaaaaacaacatttaattggggctagcttacaggttcagaggttcagtccattatcatcaaggcaggaacatggcagcatccaggttggcatggtgcaggaggagctgagaattctacatcctcctctgaaggctgccagcagaatactcatgtccaagcagctaggatgaggatcttatagcccacacctacagtgacacacctactccaacagggtcacaccttctaatagtgccactccctgggccaagcatttactaaccatcacaggcccctagatcatcataggggatgcttagggtccctggctgccaggggccttgggaaaaactggataaggaattgactcttattctttcttttttcttaagtctggagtttgtgaacaatatggagggggatctgtttggctttaatattgatgctctccgctggactcgggcactttacctggggcgcgtgatgcaccttttttatcataccagatcctcgcacggtctttt

SEQ ID NO: 35846 - DNA, 3593 bp, Arabidopsis thaliana landsberg
ccaacacaagaaatctgcaatgattcatttggaattactttcaatagtacaatctacaaaagcagtactgcttcaataattaaaagtctgtagcagtcatcaaatctctacatctatccctgcaaacagaacaaaaagacataccgcagaagtcactccctcaagagcatctttcaataaatcagatgatagaaggtttcctggaaacaaaagtgaaaagcaaaaagaatatgaacacacaggaaaaaattgcaagttcctacaaaaatgttgaaaagttaacaacagtaccttgatgccatgttactctggaggcccaggactcttgtaaagacgacctacctgacctaaaacccatacaaatggttaaatgcaatcccgtaaatcaacatccaacgtagatcagatttcaataaatgagaagctttaactgtgatccacaaatttcaaccaaattacatttgatctaagacatgagttaactccctacaatcaaagtttagatacctgctaaggctagagacagataagccgcgatctaaagcttctttacagacatgtgatcccacaaaaccatttcctcccaggacaagcagctgacaatagaaatgaaagataagttccaagatcatgatcatcattgcaatatctttacaaagaattactatgtaagatcccccaaaaggccaatacgtataccttctcagtaggaggtggcggcacatgtacagtctcagcttcttccacattgaagggctcatcaattttgttagagtctgtcgagagatacctcccgccagcagaggcagaaacaaacctaatgcaacataatccataagcacagaacagtaaagctaaagtcaagtatctgaaatttcacaaaacactcaattgcaacccaaatcacctaattgttagaatctagatcatgagaccaacctagctacgagtaattaccaaaacaaatgcacatttccttcaacatcctactaattgatgcttagaagacgattaaggtgcgatcagagttattaaagagctggggaagagactattcaccgtatctgggaaagagacgattgataacgaatcaaacgcgaaacgattgtcctcattttcgaatcggagaagaagagaaaaagcaattcgacgtagagatgagagctaacaaaaatgaaaagtttgtaagaggagagagtccgatggcgatggaaatggaaatggagaagctcacggccaaaataatcacagcaaaacgtcgaaaagagcgctacgaccgtgaacacgtcgcctcttaccaaagtgccacgtagaccctgacccgagtatccgaacccatgggaagccacgagagccgcgcgtggcttcaacacgagatcattggctataaattgggccgaaattaattgggcttatattctaatggaccttatatgtatggtctggctcgctccgtttcagtagaattcaccttttgtcatttaatttaggagaatgccacttgcattttttccgacactaacaagtaacaacaatccaaatccaaatccaaacccaaaagaaagtaaattaaaagattcttgttctggatgatgatgggaacatttggtacatgcatggagacttggcgagtttgataatgaaaaaatacaacattcttaatttcttaatcaagtaatatttacaaatttcaaatacaaagctagatgaaaacgtcaaacgcaaacctcatttttattttttgaataaactatcatgaaatttaaaacatttacacataaacaaatacaaaagtcgatgcatgtattatatacacacaaacgtaatcataaacttaaaacaatcgtattaaatacatcttcaatcctaaatgcaaacgcgatcaacgatcagtaagtttgtttgccgtgtttgagggaagagaacactgtctttagttcctagagaatagagggaatcgctatttataccttgtcggtcactgaattcctctcaagggtcagtgtatcagttgagcgacttgcagtgtccggttttcgattcgttacattctctggtttgttccctgagccgatctggacttgcttagcttcattcgatgagatagcaaggtctccaagtggaggcatttccttggcttccttggaggaggaagagctaatgtggcttgatgaagctgacttcttctccaagaaacgaacgacaacacatgtgatgttatctgcacttcctctctttattgcttcacccaccagttttttcgctgagtcctcgggatcttcaacttcctttaccattgcaactgctgcctgcaaaatatgatcatgtattattgtaattaaattgttggagtaggaaatagaagatgttaaagaagcaattcacttcacagacctcattagagaaaacatcccacagtccatcacttgctagaatcaaaaactcaagagtatcatcaatcttttcttcctgtattcaatgacaaaagtttgagaaatttgtcagctggagacaaaaggggacataaagattatgcaatgtgattcttagagaagtgatgaaaagacctggatttctggatcagcaacaacatattgcttcagaagccgatcaccaaacgcacgagaaactgcaagaactcctcctaccctccaagttcctatttagtttatgaatgaacacacccctataattaggactatatgttgaaaaaagcatgaagcagcagaaaatatagtcctatagtttcttgctacttacctgcccacatcacaaatccaccagcattctcaatcctttcacgttcatcactttggtccggtttatggtcccttgacacagcaatggctgcaaggtacagatttatgaaaaaaggtattatctatcaggatactactacatgatattggtggtgccatacaaagatattgcttacttaacattacaatgatatccaccaaaaacaaaaaaagataagtcataacggatctcatagaaatttaccttttccgcctctgctgataacagctctagaatcaccaacatttgcaacaactaaacggtcaccaacaagaatagctgtagacgcagtagaaccagcgtctctattgtgactattttctgacttgagaagttcggagtctgtatggttataagcatcagctggaaaacattgaagaaaatggaatgtaaataagagtcctgctgcatctacaacaaattgttttaaaaaagctttgctcatgatttttttacagtacttatagctgatttggtgtcagagataaactttgggtgggtgatcagattactgaaaagatggcgcttcacgtactcagctgctctggctccaccatggcctggcaaaatagtaagtaacattattaatttcttgttttctaatgtcaatactaagatataagctacgttacagcgagaacacgaagttaattagcaccaagaccaatcttaatgtcatgactcctggcacaaatgaactatcaggattcataaaccaggctaagtttctcaagagtaatgtataagttcttgttaagaacagagagggaagataccatcaaaaactccaaata

SEQ ID NO: 35847 - DNA, 2972 bp, Arabidopsis thaliana landsberg
tttttgattttgaactcggaacgtgttccacaactagagccgagaaggttttaaatgaataaaatatacaaagacaacccacaaaggcacaaatgacattacaaaaaagtgaaaatccatgtccattgaattgaattcataacaatttaccaaacttcaaatacattaaaatcactgctaaaaataaaatcctatagcaccatatataccattgacggatccatattcttgcttcatcttccacttcaagttttcagcaacaatggcagaactcatcatcgttgactttcaaaacatatctatcttcatcctcttatgtctcttctcattcctttgttacgctctcttcttcaagaaaccaaaaggctttgacctgcctccgagccctccttctctaccaatcatcggtcatcttcaccatcttctctcatcatctctaccacacaagtcctttcaaaaactctccttcaagtatggacctcttctctatctccgcgtcttcaacttccctgtagtcctcgtctcctcggcgtctgtggcctacgagatctttaaggctcatgacttgaacatctcatctcgtgacaacccttcaatcgatgattccctcttgattggatcttctgtctttggtagtgctccttatggagattactttaagttcatgaagaagctcctggttactaagctgcttggaccacaggcacttgagcggtcaagaggcatccgtgcagatgagcttgagcggtttcactcaagcctgcttgataaggcggtaaagaaggagatcgttgagattgggaaggaagcaacgaagcttagtaataacagcctctggaggatgagcattgggagaagtttttcagagaagaatggtgaggctgagagagtcaggggactggttactgagttagatggcttgacaaagaaggtcttgtttgcaactttgctgcacaggccccttgagaagcttggaatctctctgttcaaaaaggagatcatgtgtgtttctgacagcttcgatgaggtccttgagagggttcttgtggaacatgaacagaaactggacgatcatcaagatagggacatgatggacgtgttgttggcagcttatggagatgaaaacgcagagcataaaatcagcaggaaccacatcaaagcatttttcgtggtaaatgttcctctcattaagctgaatttatttgaggatcaaaagtgctcttactaagaaacgttttgtaactgcaggagcttttctttgcgggtactgatacctcggcgcaatcaatacagtggacaatggcagagatcattaacaaccccaacattcttaaaagattgagagaagaaatcgattctgtggtagggaaaacaaggttgattcaagaaactgatctaccaaagctcccctatttgcaagctgtggttaaggaaggacttagattgcacccgccattgcctctctttgtaaggacgttccaagaagggtgtaagattggaggtttctatgtaccagaaaagacaacacttattggtaatgcttatgttatgatgagagatccgagtgtctgggaagaccctgaggagtttaaacctgagaggtttctatcttcttcaagatcaacgcaagaagaggaaagaagagagcaagcacttaagtacattcctttcggtagtggacggagaggctgtcctggatcaagtctgggttatatctttgttggcaccgcagttggaatgatggtgcaatgctttgactggagtatcaaaggagacaaggtccaaatggatgaggctggaggactaaacttgagtatggctcattccctgaagtgcactcctgttcctcgaaaccggcctttacttgctgatcagtagatgccaagtttgtaattttcagatgtcactgaactcgcaaacatagaaaagtgctgaattcagatgtttactactggtatgttttaattccgtttactgtatgaatataaataaaatagaaaattgtcccactatttctggcctgtttctctttacagttccctgagtccttttaccgtaggattggtatcaaatcaaagaaataatcagctctcaaatttgatctttggctattatcgatgattggttcatataatctgatttcatcttccgcttccttcttctggttggttcagttttttgttttctttcactcttaagctcatcttgaaattggtgagtgtttgatgtttttctaatctgattcaatttggtgacatagagctattcagttctatagtctttcctgattcaaacgtccccgggggagttatatcttttagcaaaaaaaatatctgtgtagaacgtgctttgatcattgtgtgttacatgtacaaatcatcaattatagaggagaatatactctgtttgtcccagctcttaacattgcgcaacaatgatcatcgttgactctcaaaacgacttcaccttttgtaccctatgcgttttcactcccctgttgctccttcttcaagaagtcaaaggatcaagtgactaaagcactgtaagttctcagaaaatgtgtctcttctttatgtgtgtattagactagaaaatgattcgtctatggtagttattgagtctttatatgcattagactagtttttgtaataataagagcttgtttaaattggtgtttttttttgtttttttttttggtaagaagcttgttttgattgttgattaggtgaagatttgctaacttacaagttgtatcagtaataataatatatatcgacttgtttaacaattgattcatctttgtattctcaggtggcagattctttgtgtcttgctatttatgtatacctttctatattattatttaagtcataagctcttatgatgcatgtgaaaccttagttgtcactttggaattgggggtgcagacaagacttgtttttaaagttaataagtagatgataacgagtctc

SEQ ID NO: 35848 - DNA, 4210 bp, Arabidopsis thaliana landsberg
  unsure (1)..(4210): unsure at all n locations
acttccattattccacgactctgatttacacacaattgaaaacattggactttgtttaagaagtttaagggggaaaaaggcatcgggccttgttcaaatattttgctcaaacagaaaaaagaatcccaaaaagaattattaaagtttatcaagtacatcattttccgtccataaaattgtattgacgatgttgaatgtccatcaaattgatctttttatcttctattatcgaagactctgatttacacaaaaatggaaaaagggtattatatgtttctaaaatgtttaagacgtttaaggaaaaacaagcattggaccttgtttaaaaaaaagtacttgacagtgttcaaatagaaaaagatcccaaaatgaattattaaaattgaagtacgtcatttctgtccataaaactgtactgacgatgttgagtgcccatcaaattagccattttcccatcaaattgatttttttatctcattgaatcaaaaaagagttatgagaattttagacaacaaaactgtcaaatattaaaaaagtaataatgtttaaaaaagattcaaaataatgaagctaataagtccttgactttttttttaatgttttaaaaatattttgtttaaatttagataatgttttaatttaaaatcgggagtgactattttttaattggttttgatgatttgtattttacagattgttttaggattgtttgatcatatttagatagataataaataatattgtaggttagaaatcaacaaaaatcaaatatattttttaatcactatgcaaaaactttaaacctcaaggaattatgaggctgattgagtattaaacaaaaacaacatagtcgtattgaaagcatgtggtggggttacttggagacaaaaagtatatcttataaccgtattgaaagggtacaatttacacaccaagtgattaaatcgctaattctaaatgtttaccctttctatacggctattagattttaatgcacatatgtgagaaggtagaagatgaccaaacccttgtgaggttctaaaatctgctttggtcttcttcagtcagctttccttagtgaaagaataaaatgcatatatttgtttttaaaagatactttacgtgtatttaaatgtggatggtgatacatcaacaatattaagacaaatttataggttgcgcatgtcttagtcaaagttttctaaaatatataaacatagaaaacaaaactatttaacttatttaacactcactagacttttgagacttattttgcattttatgtatggaattctttgttttttttttgcgcaactatattgaattctattttctattgaaacatataaactctttattatatgtttatttgtagtaatttcttagtccaatattcaatagtataaatgtttctaatcagatatagacatataatagtcgattagtagagaaagtacactattacaaattactgatataaaccttatgagaagtttcggcatgctacagatagagaactattcgacgtggtcttaagtgtgttgcaaaaatagattaagaaggtatagagaatatacaatatgctgattttgtttagaacgcgccaaacaaacttttttacttattcttattgataataaatcttttacaaaaatcaattatcttagaaattatttgatatattctacatgaatgatcaactccgactaagaagaaatgtatgcctaattctctcttctgttttttctaccacatgcctgtgaaaacaaagagaattacaaacactcacattttaggcttttgctaggctttgaagataacacatgtataccaatattatagaatgcttaggtggctcaatgcaaactctagaatatttatactattctccagaactctaaaccctaggatctccgagaatcactaaaaggaatctttcttgtttcccaagcctattcatatattattcttcgagaaataatatcttccatatcttctcgaccaatcttgtctttgataccacgccaagtcagctaacttctttggctcgttacatcaatcgccttagctcgtccatgtcaactcctgcatccatgtcagcaactcaaacgtctgatgtgatatgatatagcttcctgatatccaacaactccatgatgtccatcagctcgtagncttgatatccaacagctctctgatgtccatcagctcgttgttgtcagaatctgcatcttcaatctccccctttttgacttagtttgatactcaagcatccttctgattcaacttgaaaagatactaaacaaaccaaacaaagataaacagaacaagcaatatctagctatagataaaagcttgttcatatgagaactatcttaagaacgcaaaacatcaataacagcgaaaatcaaattcttaaccgtttacatcactcagaacaattctaccaacgaactctaacaacaggcagtgaaactatgtctaaacttaaaacgaatcaaattcaaacaagtctcccacataaacagtgaacactgctcaactagtaattagtcaacaatacttatcaagtaatcagtcaactatgaacattactaagtagtcagcagtctgtcaaactcccccacaatcaagcattctataaaccagagtcatctccccctgcttgagtgcataactaagttaaaaacaactacttacagaagatctacatcaggacaagtagttaaaaatacttacctgaaatcagtgtatcgtaacacactttgatgaccatccacttctcagactactgcagccaaaccgggtttgcttccaccagctgtttgaatcaaacaatctccttgacgggacctgaaagtcaaacagaaggaaacccaaacacagcaacaagacaaaatctagaaacgtttctagcatacctatcaaaagataagattcgtccaagcagctgtgtttaacttattacagacccaagttttcagaggatacatatcatcagttcaaaaagaacaaaaataaaagcatggtgtgaaataaaaacaagcttgtcaaaaacaagattttaaacgttaaaaacatcaagctcccccttaaattagtttctcccatcatcagattcagacatatctcctcctgcttaagtgcatgacttagtcaaaaatcacacaaacatcattagctgagatataatatttcaaaggaaaacagaataacacttacttgcatctaaagcagtctgcagaacttcaatggccagtttcattgctctacgatgttctgaaccatcagtggagtcaccagcttgcactccttgggttgatggcttctttgcagtcttcttcttagtctggactaagggctctggcttctcaacaaacttcacaggatgctgcatctgaagaagttgatacacaggactcggaaacggaatgtagaactttgcctcaggtttcaaagcaagctgcagaatagaactttgcctcaactttcaaagcaagatgcacaatatgctcatacaccatctgcccaaagtcaaaagccaacttgtgtgcaatccgatacataagcaaaaccctgtctatacttgcatatccctcgctggtcgttggagaccaatttctgcacgagaacttgaacagcttcctacagttctccgagaaggtgctcatgggaagactctgaagaaccttcacttgtccgttagtcagatagctggtgacctcatcatcaatcagactagcaatttgcacctgtagagctctggcatcaactaattgcagaccaaacgaagagttgatcttggcaggagagaatttgtactccattcctcgcacacataccttgacagaatcaccttcgacctcttcttagcatcatgagagataaatcgcaagcggtcaaagccatctttatcaacaacacttgaactagcagcttcgttcctatcgttagtcttctgtctttttatcctctccacaacactgttttcttttcagcagacgcgaggacacagacagatctgttgagtcaacagcttgtgctgattcagatgcatcagagatctgcactacttgaggattcttgttgttgagttatggaacttgatcacaagtcttgtttatggtctcagcttgaatgggtgtccagatctatgcacatgaccaacagaagattcaacacgtcaggcagttcacatcaccggtgggcg

SEQ ID NO: 35849 - DNA, 1449 bp, Arabidopsis thaliana landsberg
tttgattaatataatttcaataaaaataataattgaaaggggatcaaatttgtatttaattttagttaaatcaaatcagcccccacaaaaacattaaagaccaatataagagagaacatgagagtccaaacttcattcaattcaagtctcagttccaagaataaaaacaaagattttgtattttcatttaaagagatgaaatcaatcttagccaacacttctctcgactcttcattctctctttctaaacgttacttcaattggaagaagaagaaagttcaagaagacgacaacgaagaagaggaagaagaagaagacgattacaacaacaacgaggaaaaagtcttgacccgtttcaatttctcctctgacccgaaccgaccggatcatttcaatacccaacagataatgaagaaaaaaaagaaaaagactctcgaaaagatccgttacgctctcgggttctctaactcgggtctgggtttccgggttgtgggtacgttattcggtaaccgtcgtggacacgtgtacttcgccgtacaagatgacccgactcgtttacctgcggtgttgatccagttaccgactccaacgagcgttcttgtccgtgaaatggcttcagggctagtgagaatcgcgctcgaaacggctgcgtataagacagattcaaagaagaagcttttagaagagtccacgtggagaacgtattgtaacggtaaaaaatgtggttacgcggcgaggaaagagtgtggagaagcggagtggaaggtgttgaaggcggttgggcctataacaatgggtgctggagttttaccggcgactacgacgacggtggatgaagaagggaatggagcggttgggtcgaaaaaggtgactcatgtatatgagagcacatttcgagagagtgattgggtcaagagactccgagacgtattacatgatgaatcctgatgggaacagtggacctgagcttagtatctttttcgtgagggtttaataaaacgacgtcactttaggggaaacataaaaacttcatttttctctatttatttttcctgttgattttgtttcttttggtattcttcttttctaatttggtaaattattcgaaatgatttgttggtgatgtgtatacatgaaatatatatatactacatcttctgtggctattagggaaatctctttggatatgcaaatatgtgtagatgataattaatgcaagtttggttagcaaatttctaattgtattctaggtgtcgatgtgtctaatctgagttttcggttataaaaatcgaatgaaaatggaataacattcaactcattttatttgatgctttggttcgttagtttctaaaatatttacatttgaactagtttatcctatttttgtgtggatttggtattggttacaccctttaatttgtaaaataaatatcgtctctgagagaacgg

SEQ ID NO: 35850 - DNA, 1812 bp, Arabidopsis thaliana landsberg
ctccgaatctacagatgaatactaagagagacaaggtatatataaattgtgttttcttttatctttttatgcattagattgagatataatggttttattggtttgcagaatcaacaaggatatggacttttttatgacgggtttcttcgtgggttggtatgtggtgtttttatggattctttcttccaaagcattcgactcatcagctctagatgatactacaactcaatacttctggtgcgtatcaaacgaaatttccaatcatatgtataccttaaaacgtatatattgacctttcttatactcatgcctttggccttcttcattgtctcttttgcaggttatgtttggctctccttactttcagttgcattagatatgttctttttaatctaacattggcaatggtctgttatactactcctttgcttttacttacgcctgtggtcatatgtgttctccttgctgtggaagtcttaaaaggcattgtaggatgcattgtatcatgcatctgctgaaatcgaactaataaaaatattttgtttgtaagcctaggagaatgggcgtttaaaatcaaagtaaagcagagtaccagaataaaaatgtattgtgttcatgttgatgattttaatcttattaaggtagagaaaaacagtagctaaggttttttgaaatgatcaaagatgatcatcttgtcttatttcctctttttattttatttttctctctcgttaatattattctccattaaatgacagttttgattgaccattcttattcgtgcgttttcgctattcagatatgtattttaagggcccgtagtttaatgggctttttaaagtctgacttatttcgagtcgagtcctacctcattgtgacatttaaccaagagtgagcacaacgtcgaagacgttacaatccatggcgattcttcctcaaatgatgagcacatcatcgacattacaatcaatggcggttcgtcatcagctgatcatgagtaaactccacatgaggcatttcaatggagttgtccatttacaagtggaagtttctggattttggtcgagttagctgtgactttggtccacattgttgcagccatattttttttgattctaacacaagatgaacgagatccagaactagatgtagcttctgttatatggatcatcttttatacttgtgcctctattgccactttgccttttgaatgttgccgtttatggcagtatatccaaaacgctaactcaaagacaaggtgtaaactgtgtttctttttctttttcaggcattagagactgatatcctcaacaatggtttttattgatttgcagctacgaggtgatcggtttggaaaattttcttgaatctttcttcgtctgtttggttgtggtgtctttgttgggttttttaaccgagtcatcatcacgtgatcctagtactagtcgacacttctggtacgcatctaactaaatttacaattatgtctaaacaacataatttacctctctagaactaaccaatgtccttttccaggttatggctgggtctaattgctttcagttgcattcgatatgtgcttcctaatttccaatttaccgtacagttattcatgttgcttggggtgtcccttgttactgcacttgtggccgccatagtaacgatgattaattcgttactctcactctttttggtcatcattggactaaatgcgttaaccttttcgtggatcattggaatgtgcggataaaaatgatggatcatgttgttttcttcaacaattgttgtaatactctcattctatttattaaa

SEQ ID NO: 35851 - DNA, 4870 bp, Arabidopsis thaliana landsberg
tattgttaaatcttagttttcccttgtattttgtgtattatcattaaatcctaacatatcaaattccaattcatatccaaattgaaatccaaaaaaaagcataccaaattcaaatccaaacaaggcaaattgaaatcctaaaaccaagaataccaaattctaatcctaaaaccaaacattccaaattcaaattctaaaaccaaacattccaaattcaaatcctaacaagtacaaccaagttcaaatcctaacaagaacaaccaaattcaattcttggttctccgagtgatccttcttgtgacgtttgcttccacgggttttgaaggatctccatccttctctttcgggtccttctctttctctttcgggtccttctctttctcttgatccttctctttcgggacatcatctttctcttgatccttctctttcgggacaccatcctcctcttgatcaccatctttctcttgaacaacatcctcctcttgatccttctctttcggatcaccagcctcctcttggtccatctcatcttgattctgcaattgaacgaagttatattagtattacgcaattatactctagttatcacagtgttactcagtattacgcaattatcaatacgtacctttccctcctctgctttctgctcatccttgaatgcttccaacgattcaactcttttatccaaatcagaaatcattgttataatttcattcagctggtctaccatcttcttatccaagttttcaatcatctcaaccacagaaaccaaactcgggagtttttgtccacctactgcgggaatatcctccgcacccgcaatctttggacctgcggtgatctgcagggcttgaatatcatgctggtagagctcatcaaacctgattacacggcccactttacgacgcttctcccaattttcaaccaccatataagccacgtcaacatcgtcttcttcttcagtgatttctttcattagtttgtgctccttaattccaggtgtgacgatagaatcaatgacctgtaaagatcaacattatgaatggattattataacaaaatagaataacattcgtttgtgaaacagtatatctaagacaactaacctgagttgtacccaattctacaaaaatggtatcaagagaaaagcctttcaaatggttcttcttgaacctcaccttacacatcctaggacatcccagatcttttcctgcaatgtcctcaataaatctttccctcaactgtgggatagcctcgaatgcaagaagctacagaataagaaaacaattttaaataacaaatagtattccgcaatattatcagtattgcaaacaatcacctattctctataagttgtaactaacctccatcggaagacagaaacccggaaccgaccatatgtactatttcgtgttggtgactgaaccattaaaatgattcaccgtgtgtgagatggttcctacatgtaatcgaaagatacctcccccactgaaaattcctacagaacggagatcactcaccaccttgaggcaaaattcatccacttgaggtgccttatctccggtcttgataggcgctatgataatgctgcttaagaaatacaagaccatcatcctcaacctatcttttgatctttcaccctccggtaccattcctatgagcttctctctcacgtcttcgcgtttcacaacagtatccttgaaatgcttcctcttgaaatccaaattccccgtatttttgtagccaagtttatagttcttgcaattgaagcccgatatcaatgcgtgttccaatattctatatcggattggaacgccattgacgatgaaccacacttctttcttcctttcaatgcacgccgtgcgaagaaggagcatccacatccccataagtcggtggttcgggtctcttggcatgtggaagatatgttggaaactaggatggttctcaaaccataacctctcggacttgctcatcggcggctccaacttatcgaatgtagtcaacaattcgtgaatatagcaccgagttgaaagcttgattttcttcacatattccgagggcgggaaatacatactcaagggtggtatttgataataggtttttaagtcaattaaacctaaagcactatcatgtcgttgtagtactgaaggttgtcaatccaaaggagtgtgatgctaacaatcaagatgtgatcagaagtcactaagtcaagccaagcaataacaggttttggtttattctagcagtcctaagtgaacatgcagaaaacagaaaatcaaacacaaatagtaaaacactcgaccaacacagctcttggcagagcactgggtgaggtcgagtgacaggtcgagtaacagacagaaaataaaacacagatactcgactgcatagtctgttgtcagacaactaggtggtcgagtatgaggtcgagtaacaagaaagaactgcagaaattaagccacagataacaagatgcagtaaacaacagtagagtaaacaaagaattcaataagataaaaaattcccgaggatggggtaattgtgtagtttcgtttcctcagtttacaggtgattgacatgctcaataaattaaccctagacaacaagttcattaaccaaatctaagtgccaccgcaatagagaccctcaagttaacctagtcccagactcaatcaccattgacgagagctaacctaacatgcattacgaatcaacaagttaaagccaaaacgctccctgcaaccaataccttggtacagggccacgaatctctggaactagtggttcagacatttcatcgaataccttttgggcgcagatatgtctgggctcaaattccagttgatcagaaagcaataggcattaagaacaactaatccagaagggatctataaatcaatactcaaccacctagcgtactgacaattctaaactactctcaccagtttgatacatctagcggatttggatttctttaacaactaagattcctgttttttaaaattttacccttcttcattagctaacaagaactcttttcttttctttacaaattccaaaacctttactagactttttctgcttgtttagcttacttcacctagagtcttttaacttttcttatcaatgaatccatcctttttttttcttttagacatatcccaacccaaagtataagcgcccacttagtcctatctagtccggataatgcgaactatatactatatgagacactatctctgtcgttacgagcctggcactttctaccaagcttaatcggaataagacctcacaaacactcacaagtgatatagggcttgaaagaaagtctaggttttggttcgagttaacagctttaataaagagagtcagctacttggattaacaagagtgatcaaaacgaataagaaaatctaagtattttagggtatccatgagttcaaatttgatgcagacatgataattaaagatcagattcatgttcaaattgatagggaatggtatcagatcatgacagtgtggtcgagtagagcaatctaggcatggttcagtttttttttttttcaaattcattgactatgcaacagacaactagcaacgagggcactgagtttatccggtgaatcaaaatgcttacaaggctatctcatcattatcccctatgcatatgcaacaatcctaaatgaaacactctagactcgatcctaaatgtgatgcaactacatgaacactcttttttttttgtgaaatcattttctgaaatttttcaaattttttggtttttctatgccttagatgaatgcagactcaaaaatatacacaatgcaacacacacttcctgagccctcccccaaacttaaatcacacagtccactgtgtgaataaacttggaagagagtactcaggacaaatccaatcacagaaacaaaaaatgaagaaacaaatcacaacagacggtataatacaatggtgaagtgaggcgcttacctcagtcgaagaatgaacgtagttgctcgtcaatggctgcctgcgattgctcccaggccatagacgaaccgccttgttctgtatcagctccagcaggtgggtactcgacctcgtcagctctgtggcggccagcaccgctctgaggaaactcgacctctctccttctgctgcagccagcaccgcggtcgagtgatctcctcgagtgaatgaggcgtgatctgctgctagatcgagtgagtgtagccttccttcttctcttgtgttcccgggattcgaatgacgaatgcctagcctggacatgtgggactttctgctcgctaagctcaggcctgtgcgcaggtgcattaaatctcctcaatggcatctccagaggaggctgtacctgtggaatagcagtggtggaggaagagcaactcagcttatctgttagaagcttgaaacacttggcgatcagcttgtcctgcttcttgcaccatttctgcaatttactgttattcttatgagcttcagtcaagctcttgctctgcctcgctggaggtacatgttcaccaaagtgatacatgctagtgtcgaactccactgccctatcttcatccatcccatccgaagcagcttcttcaagaagatcattctcatccaatggcggagcgttctcatagtagaggcgtccaacctcaggcctaaaatcaatgttatctccctctattatccgtgtaacctcagggctagggagaaggatgttagctctcctatctgtagagtgctcaaacctgaacctgtggaaatcgtcaaccattgcaaactccaggaattcgcagtgacgtaggtgctcgatatccattgctcgcggctcgagcctagcagaaatgattgggac

SEQ ID NO: 35852 - DNA, 3910 bp, Arabidopsis thaliana landsberg
  unsure (1)..(3910): unsure at all n locations
tcaacaaatagtttccctttatgaaaaggtaactgtgttttttttggcaagcaaatcaagagaatctgtctctcagctcatacttttctctaatgttcacagaccgacactgcatcagttcttctagacgcgatgcattacatagagtttcttcacgaacaagtgaaggtctgcagttcaataccaagcatgattcattcatctttatctgagttcccatgttcttttgtacaggtgctaagtgctccgtatctgcaaccggtacctgatgctacgcaggtgagtatgatcttgaatctcaacttcatttatacttagttcactagttctactctgcatctgacagatcttcacttggaacttgaataccttgcacggactgattttcccgtcttttgtaaccaggaggagctggagcagtacagcctgagaaacagaggattatgtcttgttccaatggagaatacagttggagttgctcaaagcaacggcgctgatatatgggcgcccgtgaagactcctctatcaccagctttcagtgtcacatctcaatcaccctttagatgaccaattcgactaatcacctactacgatctttgtgttaagcctaaaaaagaatgaccaattgttatttttctgatgatgcctctgtaacatatatagacagagagcacatgatgttggtttagaacagctcatggttggcaatgattgttattattattcgactgcttaatgcatccccttactttggacttgtgtaatatgcccaaacaggaaccaaatgattttaatgcaaagtaatctttatcccaaaaaatgcctcagatatcttaagcttttctttgtgtgattcttacctacagcatccaatacattattctagatctaaagacccaaggcaagctttctttcagtgctgaaggtatgatcgtggatttccctaatacatatagctttctttcagtgcttgtaatagtgccaaactgctgaccacagaattaagattatcctttcataagaacattggattaaatacattaccactgagaattgcaaaggttcagaacatacagactgttgataccaagggaccaaatagcttggacaaagataagataagtcggtcataatgtgtttttaactactagattgcaatgctttggcatatgtaaatgtgacagggaggatcatcctcttcagctctacatgggataaaactaacttgctgcagtaggcttgaccttctctcgcatatactgcagtagatgttcgcgtttccagttgtcgattctgcaaaacaagcaaatcaagaaacaaagaggtcagctacaaccttggaggaatgaagttgtgttgctgatagaggatgaggtgttaaagacatcaattattcatgctcacaacgagaaaatcctttcaaaaaccaatttaaactagaggtctaagtaaatgatacagcagaatgtaacagagcaacgagagagtgagaatagaaactgctgcagatccatggatagttatatttttatctaccaagctaacatggatatatcaggtcaccttgaacgtcttaaatcaggtcaactcgttcccccacccaaactctaatactaaagattctagcaaggagttgagcaaagggggttataaagcaactgacctaattgattcgttatgttcaccgtcttcgtcgagcatgatcagcttgggtggtgagttgaagatgtactgaactttgacgctagggaacttttctttctgttcttcannnnnnnnnnnnnnnnnnnnnnnnnnnnnnnnnnnnntcatacacacctctaatatagcgccagaataggtaacctgcaatggcaaaaaaatgtaaacttctcttcattcatatccatgttataggagatgtttctgtattcatctaatctattcccattaaaattcaaaagcactacaaattacatgcctagtgatcgtaccttgctcatggaatcctcagaatcatcagcacaacatttcaagcaatcagataccaactctgcaaacaagatcaatcaatataagataaccaatttagtaattccactcctcaaaaccaactttagagagaatgatctagctcataaaatacacaaaaactaaaatatagaatcttttgggggaaaaaaagcaaaactgcagtaattgagatcaaataaagcacgcatagaaaggcacgaaccttggtccttaacgtattcagagagtgagtggcaatcggagcagagtgcaagaccgctaaaccctagatcctcacattctttagtgctgagctgctcttttgctgagatcgtcgatgccaatatcaaaatcatcatcgctgataaaacaaccatcttcgccatctctctctgtttcatcaactgatcaaagtcttcgcagatccgacgctactctaactaatgtcgctgccttgctatgatccgatccggtcaattccggctttttaagtatccgaaaaagcaatcttggtatacaggaaaccatctccggttataaataaaaaaaagtcttaaccgacgtgaaaagtgttaaaaccccaattcacattagcctgttgcgatctaaaacctctaaaaccctagaatcaaaatcgcccattccagatcgagagagacgatggatcacatagcggcagcggaggagcaaattgtaacggagaggattagaagaaaacttgcagaagttaatgcaactgctcaatcgcaactctctcctattcaagatcacatcaatttcaccctttaggtatattaacaatcatatacctttttgtagcattcctgatcctcctactcataggtgtatgttatttgtgtgctcgtgttgattttgattcgggtgacaaatttaccaattctgaaaaagccgaaattttccttcaacttgtaatcgcaacaaaagagaaaaacttgtccttttgttccatatatagtccaattcaaggcattaatctgttctagttaagttcacttgtggacttgtggtatatctcttttataatgggttttaactaagttttctgagctaatttttgctgccctttgatacaatctgtctagttaataacatgaaagtttgtagtcatgttaagttcctggaagctgtgtcttgttgtagtcatgttaagtagttcctggaaacttaaacttgacagttttcattatatctctacagctatattagtataactcaagttgtatgaaagcgtattgttttcatatttatttgttaagttgatgaatcaaacccggaaaattgatcaattgcagcaagcctatttcaaatgtgcatacgagtgctttgacagaaataggaagcaagaggagatagccaactgtgttgagcactgcagtgttccagttgtcaatgctcaacagcatttcgaaggcgaaatgtctcagtttcaggtataatataatttcaactcacaaaaaatgcataattttacaatggactgagaaacttgcaattgtaattatgatgcaggaaaggatgaacagatctctcatggtctgtcaagacaaatttgaggctgcaaagctccataagaacaggggagatgccgccaaagctatggagagttgtgtgaacacatccattgaggatagtctcgatacattgcctcatattgtgcagagaatgaagacgtcattctccattgccgactaataataatcctctgttgggaaaaaggggcatctttacttttgtctcttgctaatcatattcatgccctttcactatgactcaatagataaacacaatggatggtaggagttgtgtagtggtaaagtatatcagaccataactttatataagattatgaggatcttgaacacaagctttcacagtatgggtatgaggaaaacaaata

SEQ ID NO: 35853 - DNA, 2053 bp, Arabidopsis thaliana landsberg
caacggattatagaaacatttgtttattcattattatgagatcttattttcatttaatattagaaggagccacaaatggataacacaacaagccaagaaaaaaacacaaacttaagcacacaagctttttatttgacacaccaaatatttcatcttcatcttcatattcaattagccccggagatatcgatggacttgacttgaggcttcttctcaggcgctttcggaaccacaaccgtaagcacaccattctccattgtggccttcacttcttccatctttgcattctccggtaacctaaaccttctcataaacttcccactagctctctccacacggtgccacttatcgttcttatcttctttctccacgtgtctctctccactgatcttcaaaacactatcctcctcaatctcaactttaacttcctccttcttcaatccaggcaagtcagctttaaacacgtgcgcctcaggcgtctctctccagtccacacgtgcgttcacgatcgctgagttctcacgagaaagtgatgatgatgttagttccttgaatggatcccatacgtcaagagagaatggatcaaagatgttgcttcgtctgttgttgttgaagaaacttggaatcatcgacattttaaagaatttactttttttttgttgatatcttcttgagaactttgatttttcgatttctgatagaacacacgaaggatttttgaagctatttaaaggtactaaccgaaatttctcgagcttctcgagttgttatggggaatacagaaacatctagaggacgtctatgagaacaatcaggtgtatccagaaaattctaggagcattttgaagattgtttgagttcattgggtttaatgggccttcatgggctttagacaaatatgtagtcttccaaaaaaaaaaactggatttctacagattatccggttcgactggttaaccgaattaaattccaaaataattggactctaatcacactatccataaaatctaaaacattttctttgttaatctgaagcatttaaggctgtctgagtattatgggccatgggctttaaaagcaattgtataacgtgctgaattgaatagaatattactaaaaactgggcccatctaaaggaggattaaacaaatccaacggtgtatattggacattgagctccactaagtaagtagggtcacaatgacgtaacttcccgcgttcattacggaatcttgagcgtacgattctactattgggcccatctttataaaaattctactgttttttttactaaatccgtcggccacaaaaagatatgttttttttttctcccaaaaaaaaaaaacaacttcgacgaaagactcggcgaacaaaacacactcgcttcaacaactctctatctctctctacttggcactctctaatctacacacaattaacaaagctcaatctctctctcttctctcactctctacctctgtagctgatagggtcagcttcgtcggatgctatttctgccggatttcacggacgatttgagatctgttcttccttcttcttttttcctctcctgatctgattcaactctaatctgcttcagtctctgtgttacgaactgattccgttcaggtacggttcgattttttccaagctttttcactctctgacactgccaataacactctcgtgttagtcctggtgttagtgttatgtgaattcatcgattcctgctttgtgtgtgtacgctttaggcctttcctgttactaatcttgttttttagtacttctttggtaaattaagaaagtttgagaagaatgtgattttgttttggttcttttgatactttagttttacttttttttctcagctttaatcttgtagagattcttctaatcagatcttacggattcttaaggatctaaaaggtctatgaagattcgttttgtaattctattaccccgtgtcccataagaaagatgtacttttttttatttggtatttgttatgacttaccattttttttgtttctacagcggaaataaatgttagcgt

SEQ ID NO: 35854 - DNA, 1685 bp, Arabidopsis thaliana landsberg
tttcatctcccaaaataaattagtacttacaaatttaaaagtgattgcatatgccaaatttttttattttttttcgtactcttacttgaatataatttctttttcttcggttctgaatcagaacactatattcatgttccaaatcaggatcaccaattaattagtgtcactatccagctaacttatgaacgtggcattgtacgaattcattcagtaatagaatgataataatactttttcacaatgataaaagcttgttaaatgtatactctattaccttatttttcttaaaaaatgttagtacagtttctaagaaacttcacggtcccatgcacgttcaaagagaggaatattggaaatcctccgaataatcatctttatctagttttttgatgtaatcaaaacagatattgcatcattattatagtgttcttgtcgtgtcaaatttcgggtttaaatccatagatgtgtatcataaaattcataattcattcaaatcattgataaacgtgttagtgttttcttagctttttttgttgtgtgaaacaaaagtgttaaagttttctctaccggatattatatatcataggttctcattagaataataaaagtgaaaactagagaaaatggttattcttaaaatcatacaaatttggatataaaagaattctgcaaagtcaaagaaagagatttcagcagctggaaatgtacaacgcaatcctctctatggtgttttaattaacacatagacatatttaatcgatagagaaacaggtgtccctccaacgactcagttccaattggacgacgtaatttaggtcatactttatgctaatctattaaccattaagatgcatatgatgtgcccaccaaaaccagcatgttggaccacttcggatcaagttttatattacaaaaatgatagttgaaattaaggtgatatacaatgtatataaatagaaagtggtgatataaaatgtatattaatagaaagcaagtacctgaattgatttgttctggcaagaagatatacttgattagaatttgttgactccaacttgtgctcatcctcctcctcgtagcagaggccgtagtggtggcgcgtggagctcaatcgccattttttcagagcagccaccatgacctgagcaaccctcgtgaagggacttcccaccggaacttgttttcgatattttggaattcctatcagaaatatcactatagctatcaccacacttcctgctattatgctgaatcctagtgaccaactcactcgttcctgtgaaaaaagaaaaaacaatagtaatggtttgatttgagatataattaaaaagcgattattttttcacaaggtgagggaaaaaaatgaaaactaaaactgaacaataatatcatcaagtaaattctgtattcctgccaaccatgttagttattatgccaaccaatttttaaatatgaaaaagtttacgtttatatatttctacattatctaggtgatctaacgtgaatgattactgaaaccagcatatgaatatcttactgaagctaatatgcttacaaaaccaaaaatagagttaatgcttagacaattgaaaagtacaagacctgaatgaagatgagagcgcgaacagctctggaagatgcgaggactatggccatataccaataattgaagaaagatgtct

SEQ ID NO: 35855 - DNA, 4706 bp, Arabidopsis thaliana landsberg
  unsure (1)..(4706): unsure at all n locations
acacaaaatctcttctctgtagcaccaacacgactaagccttcttcttagctcactggatcttcctcagctcggtgtcccggtctcagtaattgcagcttcctcttttatttctggagtggggctacttccacgttcactactcgagctgctgctattaaccacttcgctggtctcaatcagtggcagagagtctgtgattggtgaagcggaaatagcaggaagaagtacattctcctctgaatgcttcggtttgttcagagcattacagtgagggcaatagtatgtaatgtaagcaaaatcctctttccgagcaagtcctgcatttacaaagcatattgcaaaattatgttagaaataagtatatagttgaaagattcaggtaaaggatttgcttaaacattcattcaccattgtgcatacgacagtttccacaaatgagcgcatatgattgtgtgggatcttcgcccacaagtagagccgcaatgcgtgagatccaactgccatcatgagcagcatatccctgagggctgtaatgctcaaccaacatctgctggttttgctctgtggtgcctggaaatctctcgcttgttccagaatggtgagactcatcatcagaatgatgtgttgaagtgctcccagaaccgtggggtcttgtatttggttgccttcgattcctcaacccacgtgattggttaacctccatgtcattgctcttgcccgaggatggatcgagttgggattcatctcctaaatatactttcaagcctgaatcggcacccaatttggatgccaggacagttgcggcagctgcctttgcagctgggtccgggtcatatctctgcatcaaaacaattctgttagcaccagctctacatgcagtagttaacctcttcaagtcggcaaacattgatctctctttcgttgcatggctatgccacgcctacgagacatacttaagaaaaccactttatgtatttctattgctatatacaggcatagatgcatgtctctgttggcattaaatacaatgaattccaactgccatgtcagactaagattccaactttctattcataattgctattatcccaaaatatggacaacaatcttcgaaaacatagtcactcactatccagtaactataaatgataaccgttggaagaatcagtacttgtcataaacggaattaccacaaattctctgtgttctcaagactagtaatctcacctgaataagttgttgtgtggtataataattggtcctttctttaagttcattgattttcgccaacctttcagctcgaagcttttccaaggtcttttgatctctgcggtcaactatacaaccatttttacacagaattagaaacagagaagctacgagaacacaccaacatcttaacatgaaatgagcatataaacacaagactcacacatctttgagaagctgacgattgaggaataagcaagagcagaaacagcaggtaagataaacattggcaagatccggaaactcctcattctccaatccaaatcttccgttctggttgtcaggatcgcataacccacagcaattatctaaaaaggtaacaaatttaccacatcatcgcaatctactaagctcaaacattcaaatttcacaatcaattgtgttgctgacctcgaataatacagaggaaacgatgagatttctggtgagtttcctccatgaaatcgatctacgcttcatccttgataaaacagtagcttcttcccttgagatgtattgaagtctcttctcgaaatcgtcacctctaaccctaaatatcccattccacaaacgcgaaaagaatccattttgcttcttcttcacgctatcggcggttgcggttgcggttgcggccacggcagcggcggaggaatcattcggctcacctttctcaacgaccgctccttcctgctcctgcgccatatcctatcttaccttccaaccaccaccaccacaaactacagaaaccactgcaaaatcaaacaatcgattcatcagaacctgaggagacttgagaagccagaaatggtttgactcgggatcagagaatcgcccacttgcctgattctcttgatatgaaattctctagagacggaggatttgaatatctcgaagagaagaacaactggcgatgatgattggcttcttctttctctccgacacttttcttctccttcgagaagccaaaggggaggaattcgagatccaccggtacagccacaccttgacgtcaacgcacgtgatctccacgtgcttctgtattcaaaaacctcgacccattactagcccaccatcttccaactttattgggctttaaattgaatattaacaaacaaaaaattgaatataataaggttgaaaaagattaaattgtatttattaaatacacacccagtgggactcgaacccacaatcgcttgattagaagtcaagcgccttatccattaggccatgggtgctttttgtttactgaatcaaacacaaactatttctcaaagataatacagtcatagtgggcacgtcattattacccgtccgatgagatgggttaaactaggccgacgtgttataatgtcaagggcgttgcctttccgcttaaacttggagctcggcaataagctgaagggtttggtgtcggaccaattctacgatgaagcattgagactgtacaagctaaagattcattctttagggaccaatggcttcacagctattcttccttctgtcatcaaagcttgcgcttttcaacaagagcctttcttacttggcgcacagcttcattgcctttgtctcaaagcaggtgcagattgtgatacagttgtttccaattctctcatctctatgcatgcgaaattctcgagaaaatatgctgtacgtaaggtattcgatgaaatgcttcacagagatacagttagctattgttccatcatcaatagttgttgccaggatgggttgttgtatgaagcgatgaagttgattaaggagatgtatttttatggttttattcccaagtccgagctggttgcatctctattggctctctgcactcgcatgggaagcagcagtaaggtagcaagaatgtttcatgctcttgttcttgttgatgagaggatgcaggaatcagttctattatcaacggctttggttgatatgtacttaaagtttgatgatcacgcggcggccttccatgtgtttgatcagatggaggtgaagaatgaggtctcatggactgccatgatctccggttgtgttgcaaatcagaattatgaaatgggcgttgatttgtttcgagcaatgcagagagaaaacttgaggcccaatcgtgtcacactgttgtctgttttacctgcatgtgtagaattgaattatggctcaagtctggtgaaggagattcatggattttcttttcgtcatggatgccatgctgacgagcggttaacagctgcttttatgaccatgtactgcagatgtggtaatgtaagtctctctagggttcttttcgaaacatcaaaagtgagagatgttgtaatgtggagttcaatgattagcggctatgcggagactggagattgctctgaagttatgaatctgttaaatcaaatgagaaaagaaggaattgaagccaactcggttactctattggcaattgtctcagcttgtaccaattcgacattgttgagttttgcatctacagtccattctcaaatcctgaaatgtggcttcatgtcacatatcttattgggaaacgccctcatagatatgtatgcaaagtgtggcagtctttctgcagcgcgtgaagtattttatgaacttactgagaaagatcttgtgtcatggagctcaatgattaacgttttcggttttcatggacatggttcagaagctttagaaatctttaaagggatgataaaaggtggacatgaagtagatgatatggcgtttcttgcaattttatcggcttgcaaccatgctggcctggtagaagaagctcaaaccatattcacacaagctgggaaataccacatgccagtcacattggagcattatgcttgctatatcaatcttcttggcaggtttgggaagattgacgatgcctttgaggtcacaataaatatgccaatgaaaccaagtgccagaatatggagttctctgctatctgcttgcgagactcatggcannnnnnnnnnnnnnnnnnnnnttattgcaaacgagctaatgaaatctgaacccgataatccagccaattatgtattgcttagcaagattcacacagaatctggtaactaccatgctgcagaagaagtaaggagggttatgcaaagacggaaactgaacaaatgctacggattcagtaaaattgaacctgaattacagattgaagattaccaaggaaaatcgtggagtcctatatgaagattctatctaagcactgttctctttctgcatttcaaaagcagcatcactgatgcagaatgttccaacaactcaagtaaggaatagttcgtaaatatttgctgaacttgatttagaagattgttaattttacatggccacagattctaatccatgctttttgttattgcttggacctatctctgagggatgccagtgtgatcatttcacgagtatatgatgtgctctgctttgctacggatccatttctcaaactgatctgag

SEQ ID NO: 35856 - DNA, 3176 bp, Arabidopsis thaliana landsberg
atcgatgaaaaaagtctctccttcgaagaggaggaaagaagaattggtctctcaatatataaggaagaacatctcatatatgaggaaagtttctccaaaaaaggagaaaaatctctccaaattgtaggaaagtaacaaagaagactcgttaaaatcacaaagataaccggtaaaagtaatagaagcaaagagcaaacgttaccatgacatgactcatggtccaaatataatgggtctcgaggtacaaaggaagccataaacattggcccagctcaaaaatcatgacggcacgattggtgagcatagcagcaaacaagccatcgccggaaaagataggcaagaaggcggagccaggcatggaggtggtgggcacatcttcaatctctgggatactcatcggagaaggaggtaaaaggaccaaaaaagtgacagctatagatctcggaggaatatgggtgatgggtggtggtggcaatgaatctggcagatccggtgggtctggaggctccggtggacgagtcaagttggacggctccagaaaaaagtgacaaaggaaagttagagaactacaacttggacaggagaaaagacatcacagtagagcaaaacaccatggaacaacaattgaaacaagagaacagatctcatcggcggcaattattatatttcgagtcacttcttcagataataaaataaaaatattaactttgaaagcgatgtataatactttttctcccattctggttatattttatttcgcttctcttcatttttttttacatatttgtattatttcataaccattaatttttttgtattattaaaaaattgtaccattttagattaccactcatgcttgtagacttgtagttaaaaaaaatctccatttatttaacaaatttacaattaataaaaatagtacgagattgataatatttttgagttattgagaggttgataagaaaaagaaatatttataggggctaagaatctttattaacggcataatttagtctattactgtcatgacacgtggatttagatctttttgaatactattttttcttatatacatttacagcaaatcatttctctaacattttagggttttacgaaaaaaaaaccttcaccgtctctgctccgcgacgccgccttcgctttctcaaactccgatataatccttctcaggtaagcaatcttcttcgattctcattccttcgttctctaaggttttgtatcaatcgtagaaagttttaaactcgattttaatcggaatcaattttgtttcatcgagtttgttgttcgccgtggtgtcaaaaaccctaatttccgattcaaatctctagaaattagtgttgcgttatcaaatttgcgatcttgcattgattattcattcttttgattttgctgtgtgttacagagatatgtcagtaatggatgaatcaggcatgtttaacgttcaacaaaccattggaagtgtattgtgttgcaagtgtggtgttcccatggcaccaaacgcagccaacatgtgtgtgaattgtcttcgttccgaagtcgatatcaccgaaggtttacagaagagtattcacatcttctattgccctgaatgcacttgttacttacagccaccaaagacttggatcaaatgtcaatgggaatctaaagagcttttgacattttgtatcaagaggttgaagaatctcaataaggttaagctgaagaacgctgaattcgtttggactgagcctcattccaagaggattaaggttaagttgactgttcaagctgaggttcttaatggtgctgttcttgaacagtcttatcctgttgagtatacggttagggataatctgtgcgagtcgtgttcgaggtttcaggctaatcctgatcagtgggttgcttctgttcagcttaggcagcatgtttcgcataggaggactttcttttatctcgaacagttgattcttaggcacgatgctgcttcacgtgccattagaatccagcaggtggatcaggggattgatttcttctttgggaataaaagtcatgctaatagctttgtggagtttctgaggaaagttgtccccattgaataccgtcaggaccaacagctggtgtctcatgatgtgaaaagcagtttgtacaactataagtacacttactctgttaagatctgtcctgtttgccgtgaggatcttgtttgcttgccttctaaagttgctagcggcttggggaaccttggtccacttgtggtttgcacaaaagtctctgataatatcactctacttgatccgagaactctaaggtgtgccttcttggatgcgagacagtactggaggtctgggttccgatctgcgctcaccagtagacaacttgtcaagtactttgtgtttgatgttgagccacctgttggtgaagcgactgttggtgggcaaaagtacgctctttcctatgtccagattgcccgtgaatcagacattggtaagatgttttatgtccaaactcatcttggacacattctgaaacctggggatcaagctttgggttatgacatctacggagctaatgtgaacgacaatgaaatggagaaataccgtctgagtgtgaagaatgggcttcctgaagcaattctgatcaagaaatgttacgaggagcagagagagaggaagcagaagaaatcccgtaactggaaactcaagtcgcttccaatggaaatggatgattcaagaggcagggttgatccagagaagacagacaaagaatacgaagagtttttgagggatcttgaagaaaaccctgagctaaggttcaacatatctttgtacagggacaaggattatcaagcttctgagactgcttcaatgacagatggagaaggtgcaccatctgttccaattgaagagttgcttgctgaccttgacctaagctttgaggaagaagacgatgatgacgaggacgacatggctgctgaataacttcgtttctccgatactcaacaaggtttcagtattgatcccaaatcttttatttgcttctgttgtgtttctctcagtagacctttaatcttttgttgtccaagtttgctttgaatgtaagctcaacagtttctggtctagcttactttgctatatgtgctgacattctctggctattatatctctgtctggaatccctga

SEQ ID NO: 35857 - DNA, 1082 bp, Arabidopsis thaliana landsberg
gcatttccggttctaccctttacttttaatgacttctcgtgacattcgttagggtaaatagggtatttatgaagttacgggtaataaactagttggagctgaatgtaacggtcgttttgagtaatttggttattcatcctataaggtggattcatttttaaagttcaaactttattgacttaaaagtttttgaacaaaaaagaatgactagtttttctcaatatttgtttcttactatttttctgttaattattttttatatgaaaagtccaaacaaaatttgatgtaaaacttatttgtaactaaaaaagaagagccaaaaatagcatttaaaccagagacatatcctaaataacctagatatttagttatattcattaaaatttaacatattttgcaaagtttagtcaaaatttaataagattaaactaattttaatttaaattgaacaattttttagtcttttttcccaaaaatcgagcgtatttgaaatgtagatttgtaaaatcctaacgaataataaatttttttaactgaattatctgaatccaaataaatctgaaccgaatccaaacaataattccaatgtttaggcctagatagtcgtatgtctttttggcctaatcaacgcattatcatatttcgaaccgcagatcaacgtttaattcatgtataaaatggccacatgtaaagttgatgtataaaaccaccataatttgaaagttggactattaaatgacatattttccatttcgattatggtgaaacgacgtcgtttgggaactatcggagactagtttacagttgttatcgagtctattaacgccaaataacatcgtgtagattttagtgtagtcaacaattaaatttgtatgaaatggccggttaacgatttttacatgtattaaatagccatatacgaatttcacgtattaaataactatattttaaaagttcgcatattaaatgacatttttcatctaaatatttcacttgacaaatattttccgctcaaagcattctgaagtaattgctgcctaaataaacacacataaaactcgttgacaaatctccattatgtt

SEQ ID NO: 35858 - DNA, 1298 bp, Arabidopsis thaliana landsberg
tgcgaagaacaattctctttctgcttttttttctttgcttccgagttttaagattagagagaatctctgtccttgtgtgtctctgcttgcacgttgcaagcgtttctagaataaagtgaaaacccagcgcttctccttttttttttgcaatccagagagactttggctatgggttttctttaattcgcttgtatcgtgaagcgagagcaagcttttgtagcaatggagctggttggtaaagtcgttaggaaggagatccaagggattgggttttgctccgggacggttcgatctcgcgattcgtctggatttttcgagatcgtttatgagaacggtgttacggagatttcggaattggatgaggttgttgctctcgtgatgggagatggtaaatctcaggagaattcggttccagtgaagaataagagagttggtaggaagccgaagaaacggtctcgtgttgcgagggtggttgagatcaagcgagagagctctgggttgaatgaggtaaatgtcgatttaaatgatggagttgcggagaattcgggagttagtgaggagaatttgagagggaatgttgatttgaattgtggtcctgtggaaaccctaggtaggacatgggactcctctgtcacggatttgaataggacggtgtccgaatcggaaactggatttgatttgactactgggttggattggaattcgaatgaaaatctaggtttggttaatgtaaatatcgattatgaagaaaattgtagtgacaaacggaagtgggatattgatctgaacatggatgcgagctgtgatttggacaatgctgctatctgtgatttcagtgggcagaagagggaggtaggatttgatttgaacgtggaggttgatgtagagaacagcaaggatgaggagtacagtcaaatgaatggaaatgacattgttcaagaaatcaacatgcaggacggaaatggtgtccaggataatattgagactggggaatataaagaagttcatgttgctgaagtgtccagcgctgagcttttggaggagatacagaagcagaacattgtttcaccgcaagatctcaataatcttaattctaatggggttgagaaggatcctgatctacctcatcatgatgctaagactgttgatgagactctctctgataggggacattcaggtgaatatacaagtggtaggaggaaaagaagaaaagcttctgacaatccaaaattcatgagcgaacctcagttgagaagaagcgcccgttttaggactttttcgaccgccccgccagcagt

SEQ ID NO: 35859 - DNA, 1220 bp, Arabidopsis thaliana landsberg
aaatacctagaaagtcacgttttcatacataaaacctaatttacaattttattttttaattgacacttaaataattgcgaaagaaggaaggcggtaggccatttttcaaatcctaggcacgtccatgatcgttggtaatcaaaagaatgtaataggtggagaaagagagagaatggagatgatgcatgtctgttataccaaaactatttagcctacctgaacaaattcaggctcatttatgttgttaaccctgagaccaaactcaacgacagtccctaatgggctcttgagggttggtctcttgagttatatagcaaaaattaaatcataattatgtgtttagggatttggttgagagggaagagaagaaaaattatgtcctgagtttttttcatttcgattgaattttttcctttttgttatcttcaactattctacatatatgcctttaaatctcggtaatattatagcctctcgcccatgaattcataatcgggctatacatcaacaattgaaaagtgatttggttgagcatatatgacaaaaatttggcgggaatcaagctagcaaactaatcgttattctgtttttgatattttatatatgcttttgtgtcatttatgtttaaaattgtagtatttgtattaattatttagttttatgtaataaaatatttataatttttattttaataataatatttttcttaaaaaaaatgcattgaagggctctatcattaaacaaagaagaaatgggactaacaaaaactcttaattttaaatttctcaaaatctattgtttagaaatttggaagagctcaaccattggggttgctctgacgctccgggtttcgtattaattattcagttttatgtctgtttgataatgatgtcttgttggatatgcagttgaagaagataggaaacaaaattcttaacattttttgtgtttttaatatacagagtaattcgatggcaattcactacaagttccaagtgacgacgtgaggggtttttataggttagagctcggttttccagcaccaacggagctcccacgtccccttcttcagttgattgaggtaagcgttaatacgccatatttgaggctctcaaaaattggacgtacgtatagttgcggggacacgagtagcgatacttgggtttcacggaactgcaaagtctagtcttttgaatcttcttgcgggagatttagttcca

SEQ ID NO: 35860 - DNA, 1727 bp, Arabidopsis thaliana landsberg
  unsure (1)..(1727): unsure at all n locations
cccttaagttagtaattagataacatcgatgtatcttatcagtcaataaatcaaaagagaatttgacattaaggttttaagcaagattaaaaggtaatattgagttcaagttgttgtttagagtaaatcaaagtgattgacctgttttaccttttaagatatatgagatcaagaatttaccggagcaataatacatatatttttataaacaaagaaagaaaagactttttggtaacaaggacaagaaactgaatgatttgccaattccctaccaaattaagacgctacaaaggaaggcgtacacagagagcatgaaaagacacgaacaaccatttgattctgcaaatcttcttttgtcatgtcttatcgaactacaataatattcaacgtactagattttaacccgcggtataccgcggaacaatttatttttttaagttaatatatataaaaatttacaaattatatctatctataaaatatttttattttatagtttacaattgttattaagtaacgtcctgccaaacccgtcccgcaaaaaaaaaacttatttattttgttaacgttgatcttatttatgatatgtttatgaatcattctctaaatattttaatcgatgtgggacgttaaactcacatatttttcgccaattgtttaatatatgttcattttttaaatttcgaatcacaaaatatgacggaaaaaaatttgagatttttttaaactctatatattatataatgatgttaattttttttatatattaaactttttataatttcaaatattgataatgttttatgaagtttaaatatacaaataataatatttaaaaaattaatattttttgccttttagaaaatgatataataactctaaaaccaaaaatttagaagatttaaatctttaaataaatattttcatgcctaaagaattaatgtcagtagcatgacattgtaaataagttcaaatacatgatttgtttatttaaacaaaaaacgtttagtaagaacaatatttatttaaacaaaaaactttgttttaaaatattgttaataaaatacgtttatgctaatttaaagggattgatgtgaagtttgtttggattaaatttgattgataatgtaattgacaatttaaatctaaaatctaaagcaaaattaatcattttggaaaaaagatttaatgctaatggcattgggttgtaaataagtctaacactaagatttatttgctaaaatgactacaaaaatgtatatatagatgttttcaaattatgaagcaatcatttggaccatcaaatatattttatttatttttactaaacccatttgaagatatttatccaataggtagtaagtatttgagtagttttattttactgaaagagtcggtgtggttattgaagtataaattttatattacagaccgctgaaagtttttttagttgattaggtttttaaacacagacagtactttagttaatcaataacaaaatgctgattttcatattatttgtctcagaaagagagagaaaaagtgcttttgttacaaaatcgaaaggagcctactcttctgtctttagccggttggttggctcttaacaacgcaatgaaaaagcttttttttctaataaatcgaaaacaaataaaaattcataacataaaanaagaaagaacaaagaaagattcccaagagatacttgtttctttgtagagtatgca

SEQ ID NO: 35861 - DNA, 2852 bp, Arabidopsis thaliana landsberg
attgtataggttaatctgttagacctaattagtctttataattttttcccagtttaaatatttgaaccagctggacataattaacgcttgtttgaaaaaagaaaaaaaataaagacattattagagtgtgggcaataggtggagagacccatatcttatatataccacttaagatcctactcaacttccgatgtgggatattgtccctaatagacattacgttagctaggaaaatgattttctaaaattcttatctgaatggtatatttttaaaaaatgagataatttggatatcatgcatgtctaggtcacgggtgattcatatatatgtataattattccagctaaattggttaagagctggatttggatattttaaagtacaattgcgaattattttaagtaattgtgaatcattttaaaataaaaaattgcgaaattatctcggataattctcggatttgtacccccattcccctgaaacaactcgcactatgcacccaaaaacaatttcaatttactttcacatcaatcaataaagggttttcctgtgctactcgctgcagctgttatataggtggtgtttccgtgttggtaacttggtatatggaaattatgtaacattgtattatagctgatcgattgaaataatcgtggctttgaaagtgttggatctactctgctgaagtcactggatgtatttaattaggttgttgccatttactcatctgttaaaaaacaaaattttaaaccacgttcctctttgtaaaaagctaaaagcctcgttatgttatccgtttggctatgtaattataagtgtagaaatgtcacgagagccagaagttttgtccttaagttttgattcttaatggacaattttggcattttttgcttcccgtaataatggttattgtaaaaactaagaaatagaagagaagccatatctgatgaatatacatatatatataatcgcttacagaaaattcttcgtacttttgtaacactagtcactattacatctacaataaactcgattatatatcatttgtaactatatagaactgttacaaggcttcccttcccaatattcatagatatatatcctggtagttaatttaatttctcaacgtcgggattcttggtgtttctgaacctgtaatgacaaaattataccagttcattagttcctttatgcacaaggaaaaatgtaatatataacattttcttctaggaaaagatttttaaaaaactatggagagaagaatgaaaataactgagaacagtccatatcaacggagatgggaaagctgagagtaagagaacaacggagaggaaggttattaatagcggcgggaagaaaaggaagatgatttgcatttcccattatctcaatgcacagacacactctctctgtttctccactatcctgcctattcctcgatccctgcgtagttaatataattatagatggtgaaagaagaaaccgaaatagaagaatcgagaattaagagtagtaactggagacgtaaacttgacgacgttgttcaagtgggtcacgcctctgcagcaatctggagaaggttgttgaaatattccctcgacgaagcccatgcagggcatgaaactcacgaacacgtctctgcaatgttccagcggattattgtcctgggaaacggcggtcttcatcaggaccaagaacgctactaccaatatggcatgtatcttcattgaactcagtacactagctagcgaaggtgatatatatgattcgtgtacgaacagaaatctatatctatatattatatatatagcaatcaattcgtttctaaggtggagtttattatgcatggcttagtttaatgaacacatgtagttctcatgtttccttcttactcggatgaattccagctgagttctcttttagttttcttgaatcttttgaaataatctacctacacatattaaggttattgcatgtaattcgagtttattttttatcgcatgacatgtatgatgtgtcttgttatctaatacatgcaccgatctttttttctatatcctggtactctcaatacatatgggttagtacaatagcgggaagaacatttctctaacttgttttgaatcactaaattcgaaccacatcaccttccttgcatctgtaaagttctgtccggctgaagaagaaaaaaaagattcacctttctttcttgcttcttaagtaacatccaattttttaagacctagttaacaagcctctattatatttttccggcaaaccaaaaaagtcttgattattgttctattcttctatatttaattttcaggtagatgagacatatatcacataatgataaagaggtctctcactttcattaggtatgaattttatcttcctaggaaaataaattttgggtccatttagaagaagtcaagactcgggtcccttaaaattgggcccagaaagaaacgggtcaaaggagtccagtagcattttcgtaattgtaccttctcttctgctcagtttcgtcttttagtttaggaccagaagtcgagaatcatgtagaaacctactcttctcgcaattttccacagctctctctctctctctcgttaacgcttcggcgaaaaatccacggtaagctctcgactccagaagttctagctttatcattaatgcttctctcctagctctctctgttttttttggatctgcttctcgtgaattgtgttttctcgacgccactcgttgcttgatcttttagaaacagaggatttaattgagctgctgcaactaggttttaatttgtgctaattaggtcgcattatagttgacagattgaaatggtgtc

SEQ ID NO: 35862 - DNA, 3209 bp, Arabidopsis thaliana landsberg
agactgattcccactagctgtgactctctcttagggacagctttcacagagaggaatcgatcaatgatgttgacggtgttgtacagagtttcaaggttgagctcaaacttgatgtgaacttctagtaaccaatcaatcaagatcgctctcatcttctcattcatttcagtctgaatgtgcatgtacatcttaggctgactctccttctcaacttctttatagaacgagtacatatcatcaacatactccaccgcagccaaatggttatctttgtcagattcatcaatatcgataatctttggtttgttgactataccacaagcagctttgctccgagcactaagtacagacgagtacgtcactttcttattcttaggtgacatcgctacttcctttttagtcacctccttcttcgtctcgatcacttcaacaggcttcgtctgttgcttaaccactagattcttcttctgaaccgccctttgagcttctgggtttcttgcagcaagaggttgtctctttggaccaagagctggaaccttgttgtctccattgattggctttctttcgagttgggcattcgctaataactgggcacggaaacttcgagtaatgggtcgattaatcggaggttgagcctttcctccttgaactccgggaacagaaacaagatttccgatgtcaccgagggcacgccgattcttcacagcaccgtttttgttctgaatcttcaaaccatcaacgagaggagcacctgtttcacagaattcaaaagaaacccatcaagatcttatctttgtttctaaagattcacaagattaacaaaaaatcgatcccaaagaaagaccgttacaagatacttcatattcaaattggatctgtatcgtcgacgagtaatcataacaatgcccaaatcagaccgagttagggcaaacgagttatattcaaacccagattttagatcggcgaaatacaaaaagcaatgatttcacacgcgtatcgttacatatcaaacacaacccagagaaataaatcatatcgatataaagaaatcaaaacaacgataacctactgaaactcaaatcgattcatagaattaagaacaaacctctgacttgttcaggtatgtttgccctcgtcgccatgatcgctcaaaacgcacaaaacagttttcaaagttttgaattagcaaaagtgattatgagatagagagacaaaactgaaccacgaaacgtttataattgcatcggctgtggcacatgatgatagttgaaacaaacagagacaaatcatctcaaatagttgtgattttcataatcaaagaaacaacgatcaaatcaaaacacatgtaactgatgttattcaaaaccataaaacgttgatcatatatctatttaatctttcaaaaactagcaataaacaagattaacagagatgatacgaagatcatcatcacactgattcttctagatcgctaagaatagggtttatacctgagagatttgtgcgtttgtcttcaacgatcgaagcaatggacccagattcaatcaaacgcttctgttcttgaataatcggaagagaattttgaaggaaatgaaatgatcgatgaatcaaaaacaaaattaaaatcttggagagaaatgaaatgaatagtttgcggagagaaatagaaaaagctttgtatttgtagtggttaagccagttaatatgtaactacgaaaatgcccttgtttattccgttaaaccgtttggattcaaaattgaaaatgagatttttccccctggatattttttccgttaaaacgtaaaattcgacacaaaattcaaacgtacatttcgaatcacatgggctgctaataattggtttatgaataccgtgttgtttagtgtggtttccggtttgttttagtaaaccgcaatttcaaataaaaagtaatatgcccttccccaaaacctctgttgtttcgtaaaccgcgggactctatctttcggaaaaaaacaaaattaatttgtttaatagattaactatatatataacttacttatacatatttttaaaatatgcaatccttagatatatatattatttagtgtataattactatatttgaggtttgtaggaacgataacataaagttcattcagttttgatttattagaaaaataaactgtttttcttttttgcatttagaggtcagaaacggtataccactgatcaattctgttataaatataaataaataaattttaagttgtatttgttttgttttgtattaaaaattgtattattgtattttgattgttaaaatctaggaagtcacctgtggtatacggcctcgtattaatatcgacacatgcccgttccactatataaccacgtctcgtaaaattaaacaacattttgttatttttctttttaataatacttttatttaaaaacatataattcaagtaaaattaaaagtttgcttttcaatggttcccataatatatatatatttacttttataaagttcaaatataaatttatttaattatatagttaattttaattatatattcactgacacgtaccatgatctcgtgagttactaactttcaaaaccgtactttatataataagattcatggaccgattgtttagcccatggtataattgttactaaacaaaagactttaataagtgtaaaattaaaaatttatgaaatctatcaaagttcttaaaagttgtcatgaataagggatgcttaaaagtgttgttgacgaaaaagtcgtcggatatgaactgcttaagccaagaatcttgaaatgagttttcaattctagtaatcagtaagcgagaagcttccaagcagagggaactaaaaaaaaacaaagcccgtgaagattctttagacaaagtaaaacacttccattcacacacaagcacaataaccattgacaaacactttggtacttcttctactcgtcggtaccaaagtagcgatcaccaaactcacccaagcctggtataaccctgaactcttcgttcagacactgatcgatttctgacgtcacaatcttcaactttgggaaccgtttgcagacgcaatggattccttctggcgcctgcacgatgcagaatcgattgtaagtttatgactgagagatagagagagaacattggttgatttaacactcactgagatatgattgaggaatataatgtgggc

SEQ ID NO: 35863 - DNA, 152 bp, Arabidopsis thaliana landsberg
ccgggactttatgttcataacgacgtcttgcttgcttttggtactcccgaaaaacaaatcttgatcgaacctatttttgcccaatggatacaatctgctcatgggaaaacttcatatggatttgatgtcccctcatcccccacaagcggccc

SEQ ID NO: 35864 - DNA, 5469 bp, Arabidopsis thaliana landsberg
acacacgtttcctttgctctggggccttttttttttttttcgcagaactggcaaaattctggaaatgattttgccattttggtttagtggatgaaggatttctgtacgggcactctttatgattctgattatgcttctgtttttgtatgtgttaataatcctgaaactcatcggtcttttttagtcgagattgtttctccaattatagattaagaaagccagatttttgaggcattaaggtacttttaattgtataaattgcaggtaatgtattcaggctcagatagggaggcgagaggtgcgacggtcaagtgtctaatcccatgtttcaataattaagagacacattttttattttatttttgcttctaaatattttaaaaaattagatataacacaaaaattaaatttagaatgaacctataatattttttaatgcatttttttttgtttttgttaattaaattattaatagaattatcatacaaaatttctttatagcaaaaaaatactattaaagtgttgagcgggcactggatcctctctgctgtcttcatgaggaatgtactcatcatttgcagaaacaggcattcatgtttattagtaatcatatatagtttatttttttttatagattcttatacacatgaatgtgtatcgagattccaaagtggtgatgcgtgttagtaactgaatcacaaataaatatgaaaccactaaataaaaaaaactaggttttagaaaaagtcaaccatttttggtttgattaaaggttattttaaaaaagtcaaacactttgctcactgctaagtgccaatcctaccatttcaagactgtcttgacttcacacgactacttgatctacttttaagtaagtagataaaatacttaaacttcagctttaatgtcaggaagcttagaatataaactaaatgaaataatggaccgaccattaaaaaccgacacatgggtgccactcaataaaatcatgttaatttggctgttcctgcttataacatgtacatggagacaatacgttggttcgttatttaatttatcaaagaggggttttaagttaggataaaagaataggaactttgaaggtttttgtttcaagtaattagctgtcttggatacataaatagcaatgtatcgaagagttggttacttcgaagccagacccttcatagctgtctttaagtctctatcgtttctggctactattttgatgttactaacacctgatatttgatctgcgcagataataatttttctaattatttataacatgcactttctgtgtatttaaactattttagtaacattaaattaaactactaaattatatattttgatcaacattgaaatgattttagaaaaatatacagataaaattttaattaacatgtaatgtcgaatcatctaaatgttcatatttatatataagaaaaatgagcaatttttccatatcgagtcaagtttattgctacttacaaaaattaaaaagaagttgagaaattagatgaaatcaatagaaaacaattaaccaagtatattattataattctcattgacttgtttttcaacaatttagattgagtcatatgaaacaataatgaacaaactaattcaatggctactttaaaaacaaggaaccgaagatgttactataaaaaaattatcttacaggaagaaaaaaacttgagtattttagacagcctatgcatacattttttttgatcaaaggtttgttttcattcctttagagtagctgccacatacaaggataaaaggattctaagatcccaaagtttagaacaacaaaataaagggcataccccaaagttacaaccatgaaaataagagagtagataaagttaatcagcaaataatccttgagagctttgaaccaaaagctaagaggctttctagaacatgtgaggtcaaggtttgtcgaagcttcttccaagagcgagttattggatgagagaattgccaatgtcaaaagacaaaatggcgttgatgaggaggttaaagataaagttctcgccggcacgaggagaactacacaaagtagtgctttagcaacggttcaggcaatggtgatggtgtcgcagtgagggtttaagggcaattgaccaaagttcagcaagtaaacaagctcacaacttacggtacttgtgaagctattataagggttcacacatagagactgtaaagccgtaacataacaggtggatcctctctcacatggagtaagccatggagattaagcattccacgcaaagtttgtaaccagctatacacatagaaataaagcacagccttgggcttcccatacttagatgtataatccttggagttgagaagttgtacaagagagagctcggtaaacaaagggtaaggggatttggggttgaggaaaaagcggtaaccatcactccttggagtcgaggtcataatgccactaatcctcaaccttttcaaacggccttgctaatgaaagctattagaataagtcatactcaagctttggaaaccaatgacaatacttctaggtggttctaatggccaggttctaagatcaaggttgtaccatcctagcaatgatgcatgatatgaatccaaatggcgtccactgaccaatgaatccatgaatcgacacaagcaattactaagagagaacaacagaagtttttggtcgtagctgggcttttgacaaaacgtaattggacagcacgacctgaagttgggccttgagagaaaacgaaatgggcctaagcccaaatggcgacaaaaacggcccaaacgggggaccttgacacatattaggtcaatgccgtcgttcttcgatggttgcgatttccggtgggggtgggaaaatgaggacgtcgaggacgagccaaccttgagagatctgaaccgaccaaaccagtctgttgcagcttcgaaaacagaggaaacgttggaaaggcctggctcgtcgagaaacaaaatcctcagggaaattgagaacataggttgaataggtaagagggctgccgagatccgccttccaattctattaccggagagttgaaagtcgagtaaaggattaaagggagggtttatggatgattgaagaattcgccaaagacaaagtaacaagaagatcttgaataagcagctgaaagtagaagaacagaggtcccgacgccggccaacaaaagctttgacggcgtcggaagagatgggcaagaggaagtcttcgattattgggtcagggaggtcgagagagcattcaaagtaattgacttcaaatatatttttttacaggacgaagattaaaaatgcctatgcatacataagactaactaattcatcctacttatcaattaagaaaaaaagaatatgataactaaaattatgggaatattaggcaatggggcacttttttgagtttcaattatgtaatgtagcacttggaagggagtagacattttttaagttttttttaccataaacccctcagatttcaactaaccatagttactttcctttggtttacaattaaaatattaattttcttccttctcttctccttcttccttcttccttcttcctctctcccaaatgacgtgacatttctctcaaatctattttccttctttcttcttcctctctctgaaatctcaattacatgtctcaaatttttgagcaaagtttcaacttgtttgattcaaatagaaattaaattttatagattttataaaccaatttgtttgattcaacttgattagtcaaaattgttaagatccggtgatacaatcaaatattttcaattttttttttacttttctttgtttaatttgacctaattttgatgaataaggtaaagactttaatttgtttttgtgatagttgatggagaggtgaaatgtgagaggtggaagagggatgatgatgatggtggtaataatggttatggttttgatgaatcaaagaagacatggtgtttgaataggttaatgagtcggaggaagaagatgatagcagagtgataggcggctagggtttcaaggaaaggatgatatgtatacaaattactattttgtcattcttatttgtatgtaaaccacgtcgtcagagtttggtggatgtgcatcgatggtcgatagttcaaaatgattgaaatgaccacatggtcagagtttggtggatgtgtgttgatggtcgataattcaaagtgattgcgttttgataatactatccattaaacaggtgttaagttatgaaaaagatgttgataaatatggtgaaacaagttctgttggtcatatccacaaaagtttatttacgaaaatgttaatatttatttatccacgattacatattaacaaataataaatacgagtgtatattgtataattgtttatgaacacatcgatctcaataatattttacgctttcacattaagaagaatgctttagattatcatggaccagaagtgatggttatagattatgtacatataaaacttaagatttagggtttaggctttaaagtcaagggctagggtttaatgtctagggtttaggatttagtatctagggtttacattttaggatttaggctttattgttttggatttatcgtttagtttagatgatttagggttttgggttgaagaatcatggttttctacaatgatttagggtttatggttacatgtttctcgtttgagattatatattccattgttgtccatatggattagatcatgtggattttctatctcaatttgtttatattaggagatttatgtttaatatttatgggcaacaataagaaagtttaaattttagggcttagggtttaaggtttatggtatatggtatagggtatatgtatatggttgagggcttagtgtctatgggttaaagtttagggtttagggattaaatttaggggttagggttcaatgcttagagattagtatctaatgtttagggtttagaatttagtgttaaggaactatgattgtttaatatgattatagagtttatggtgatggtgtagggtttagggttaatgaaccatggtcatctacaattatttttgggtttatggtcacatgctttcgttagagattatatatttcattgttgaccatgtggattaatgaatcatatgaattttgtattttctcaattggtttctgtttaggggatttatgcttaatatttataggcactacatgaaacttgagaattgatagcagtgaattatagcgtttagtgatgttttgctatattcaagttttaaatagcgtttctaaatttggaaacgctatgtatatattgtcttctcgggaatatggtaagacttagaatatatagcatattttttttataaacgctgtgcattgtgatagcggcaaactaaattaatgacttattttaagcccgctaaatactttatgaaatttc

SEQ ID NO: 35865 - DNA, 3604 bp, Arabidopsis thaliana landsberg
ttgtcagttgaggggaaccatgtcgggagtgtgaagagccatctcttgtgtagatcaatcttagacttgtacattggtgaagaaccgtttgataagaatgcaagagaagattttctagacaatgcagcttctctagccttcgacaactagttcacaacaaaatgttgctttctttctttcttaacggattctctatatatacggcataatgttgaggaatgtatttgaaataaattgcttggggaattgggttttgttagtctaaatatctacactagagtctaccagaccaatcataatgatagaacaatcgaccccataacataaaacaatttagataccgatccaaagcgttcactccctagagaagaggtactttcactaaccattagggtattacctcatctaggaatagcctaaattcgaagctagacactgcaaaaatggtggcttcataagtctgcttcgatggaactagtacttaagctcggacagatgacccgggcacgaagttataatcggtggcacggtccttccacaaacgggagaggttttttgggtcgacccggaagctggattctctgtgtgttcctgtgacaaaggaacaggtgataatagcaaggctttgctattgctgaccttagagttcgctggtttgccatgtgaagcagacccagtgactgaaggagaagagccaccagatctcccctgtttcccctgagaaggctgcggatttgttggtgctgcaaaagaaatctgtgtctgtccgtgtgttctgatctgctgctgcgactggaactgcttgaggtttaaggaagtacacgacgtgagtgatgatgaggttgcagggtttttccactgggatgacgtggcagaaacagagtcagcctgcgaatgagtcatcatcattttactccgaccagattgctgctgcctctgcgtgagatgctgcgtaaacactgaagggtctccgtttattgctgttgctgcaggaggaggccaaagaccagaaacaaagttgagggttctcgatggattgtcaaaaaccagcgtatgtccattcatcatcccttgaggcttcccttgaagattctttttcgggtcttcggcattgcttgaacagcttccacctccagtctttgcctcacttgattgatggtttttctggtgagcaacaccaggaggtgtagagatgtgatagccattggaggaaaaattcagagttgcagggggagcactgctggcgatagacgcaaacgacatggaaaagttttgtggctgaacaggggctgccatgatctggccaaatgggcctcctttctgagtgtggctaccccttgaatcagtgttaactccagctacctcaaacttttgtgacatttgacggtgttgctgaacattagcttggcttgaaagactattcacactaacttgcggttgcctgtgggaagatgaggaacagcttgatgcctttgactccctctgggcttgactctgtctctgcagaggctgaggaggttgttggaacatctgaggcgagtaaaaagacccattgtagaaaggcaccgcctggcttggagtcccacctctgatggttgatgacagttgaaaggaatatgcattgtttggaataactgttaagtatggagaagaaacttcgctggctgatgaacttggatggctgaagttagcagatgctaaaccaacagccaaatgggggctcttggttgggcgagatgatttagaaggtaccatgactggttgcaaatggtggtttgcggggtagataaaagctggagcaggctgtgttaagagagaaagatgattttattcaggagagcagttttgcagtttcaataaaaatctaatgcgataaacacaaattcatgataagataaaaagccaacgaagtacataccactacactaattgatgcagggggtggttgaggtttattctgtctggttgaggcaaaatgaccactttcagaggctttaacattaggcgcagaaatattatctccgtttctaacgtgtggttgggagtttaaactgagaataggagagcttccatgcaaggatgggtttccagcggttggcctcaagtcaccacctttcagataaacagaacctttgtttggtgtagggagatggtttgttttgaggaaatgcttatgtagctgaatgttccgagctatgaaaaagtgtgtggcacaccttttaggcctaggctgagaggcagaaattggagcaccctgaatttgttaacaaatcatggtcctaaccagtagaagaaacaatgatcatcatattgaagaacaaatgtaattagaacagaatatacctgcactaatttagaagatccattgctttcatccacaggtttaccggtctggatcagggctacatgtctgccaatgttttttccttttagggtctgaccattaagctgtaagcacaagataacctaagagagattagggctttcagaactcacccctgaggaggaaccccgctaggccagctggctacagctactggcaaaggtaagactgaactgtgcggagctgagaatgatgtagacataggtcagacaaggtaaatctgtgtatcctagaaaaatcatcaacttaaacaaccagaacttggttggtattcataatcatattaccagatttagcctgctgaggttggctccaatccaaattctgtaatcttaaattagagtctctgtcggtctcttgattcggcccctctatatcaagattcagccagtcacgtttatcaaccttcttttgtttgacttcttctggattcatctcattcttgacagtaatcttctctttgctctttagagcactatctcgctgcataaagcaagacagaaacagtcttagaaaaccaaataggggcatcctaaacaaagcaagctatttaaatcaacacttgccttgcaataataagaaacgagtgggagaagagaaactctccctgaagaggaaggcaatgttggaggaacctaatgacaggacaaggatctttactacattagcagcattcacactgtttatagctaaaatctagaagggacagatttctcaccatgagatgaatatcgagcttactaatacaatgactctcatcttgttgttttccaattgtggaccctctgataccctggagacccaaaaatagaaaaacagatatcagattcccaaacacagaatatatctaattgttgatctatttacccttttggcacctccgaaacttgccttggttctttctcatccacaatatctgaggcgactactaacaagtttagctccgttggtgattatcaatgtggtgagtccaatctcgctttcaagtaataccgcatcttacctgcaggactgttaataccttaacctccgatatttttagaattctcgaatgtctcctctttgactataggtgtttttcaatcggaagaactctgtatttcgatctcaagtgtctcaccggcgagatttcggtggtttgggaccggattggatccgtttcattgaacaataggaacaaatatttagcggaatctttatgttatagaaaagtaagaaacc

SEQ ID NO: 35866 - DNA, 4065 bp, Arabidopsis thaliana landsberg
  unsure (1)..(4065): unsure at all n locations
tgcttaaaggctaaaatcatcattatcccctatgcaagtgagcaatcctaaatgtaaacactctatatacaatcctaaaatgaaatgcaatctacatgacactctgtttttgtgacatcattttctgaaaagttttcaaatttttaatgtttttttctatgcctttgatgatgcaaaatttgaaataagaaaagagaacacaatgtcaaacatgtcttgaaccctcctccaaacttaaattacacaaccccatgtgtaataaaaatctgagaaagaattcaagaccaaaacacacaataaacaaagaaaaataaaaacctatggtatatacaatggtggtggtggtgttacctcagcagtcaagtgaaatagacggagacaaaatcgtccatactctcttgagtataagcaggaactgatgttgaggcgggatgattttgctcgtcctgtccggtcgagtagttggtcgagcgtgtggatgctcttctctgcctactcctcggctctctcaactcggagatcatttcccgagactcaaatgatgaagctcggggttgatcgatcgtgttagctcttcttgcagcagaatttgtggaacgcttcttcttacttcgagggtgggagacggggacttggcttgctctggaagtctttgatttgagcagccatactcttcagcgacttcttcatggttctcatcttcttcttgaaacctttcattgttttgctatgaagattcccaagctcttcaagcacaccgagattcttgtgaacttcatctatctcatctcctccttgatcagcatcttcttcatagtgagcttgctcgaattcattggtctcttgctctggttgttcgctatgttgctcgaattcgacttgttgctcaaactcaacaggataatactcttggtgctcatagtcagcttgagtatcctcttgttcatcttctctagctcctccgatgtcgatgttcaggacagaggaagatggcatgaagttgatgttgcgccttgtcttaagtgaagttcggttctcgcaaggtagggataacaaagaaggtccaagatccggatggttgaacttgaagatgcagtgatctgctggagtcgtcttgtcaagataattctttctcttgagatagtcaaggtcgaggaacttggggtacacgtcaggggttcccaagtgtatccccgcagctcctaggattcgtgttaagataccaccaacacaaagacttccgcgaatccctgagcgatggatggttgcagcatactctctatagctcattaggtggtccaaaagaacaacattcagcgaagtgtctgctctgtcaaccgccatcttccttccatccttggtctctctcaaaatgaaaaccaaagcttgatcgagcatgcatagctctccttcatcaacaaatccagtagtcttcttcggaaaaagtgtgttggcgatgcattggtggaggtaccttatcacgggacttcgaatcgcagaactcttgctcttagtggacgagtagggctttggactgacgatttttgcccaaagagagagtagctcgtctttgtcataatcttggcggatttcctctctacttggaaacccaaaaatggtatcaaggtgctaatatcaagagcatacttgacacccctaaccttgaaagttatgtaaccaagacctcctctttcttatttctctaaatcatcaacacaaaagtgaactttgagggttgcaaagagttggcagctctcctctttaaatcccccacattggcagctcatgaacattgcaagattggccaattccatcaagtattgcacatctccacaaataccaagctcttgcatcgtttccttatgagggtatctagttccctcaaacttcaactccttcaagtattgatagtactcgcttggggttgactctctcttcctccttggccggtttcttctcccaacaggggctagtgtatcatccccgatgatctcaacctcttcctcagaaaccgcttcttcaaagactgcctcttcatggtgttcttcctcagccttaacaaccctcttgcccctagctacttcttctctttgcatggctgagcgacttgaacttcccccttgaatcaagcttgatctttgagcacggcgagcttggtgaatttggtgttcagtcatgccactcatgtcaaacgcctcaacttcttcatgatcaacagaggatcttcttgcccgagacgtactcttccttcttgaatccatggtggtgagtttcatcaaagcaattaaaagcaactctctaaggggtatcaaggggtaagggaatcagtttctttcgtgatgaaaattttgagcttgaaaccgattgaaagcttgaggatgaacttcgaagtgatcgactaactttggtgaagtattggtgaagaggaacggattcttaaagagtgatagggagcgattttaggggaagagtttggaatgaagactttcaaagctttgtgagggggttgcgaaaacgagatgatgaaagagagagtttcaaggagggtttatcgaaatcaatgggtcgaggagaatggtgtttggtttctttgggaagggatagaaaagttgattgaaaatggtgagggacatgggtaatcgctttgtccattgagtaaaagagtgtgggggagcaagtggggtcacaaagttatgccatggtcttcaaatagtgagagctcgagtaaaggatcgagcatcctcttgaagnnnnnnnnnnnnnnnnnnnnnnnnnnnncttctcattcttgtttacttgatcaaacggaccaaaataaacttcaaaaagnnnnnnnnnnnnnnnnnnnnnntgctcctctcatttggtcattcaaatcaatggctaaaactattcctcctcattctactcgatcaacggttgagatttttcttgacttgatttgaaattactcgaccgttgactcccttagggtcactaaaacaaacctgaaacacttaaacaaaaacatcaaaagtaacaagaaagatagaaagttatatacatggatagacatgggacttcctcccaagtgagcttgttttaagtcactaagcttgactcttacagagcttagtcagaaaaaaggttgaacagaggaacagagaagtcctcatcttcagtagttcaattttcagtgcttgaatcatactttgcatcctctcttgagatatggtaggataagtaatcatttgattgttcttcaaaataagcttctttctgatcatcagagtagtcttcttcttctgaaccaggctcttttgaccgatcctcaaattcaaaactagggtagcctttaaccatttcttgaagttccaagattgcatggtttcgttcttccatcttgtaggttagctacccaatggtatcttcctgagctttgcattctatcctgagttccagaagttctccagtaatagagtcaagtgtcaagtgttcttccttagaagagggtttactaggcattttaggcactcttggaaaataagtcggaatagggatttcttcctcactcaacaagtcatcctctaagctttcttcctctgaatgaactcctttctgatcttctggtgcaaaccattatgttgtgaaatcatttttctctttgatagctagtgtagtttccatcttctctggatcaatacccattgaatacttattaactctttttcaaaaacccatatttgatctttcagcttcatcaccctctacatcaccattttttttttttctcatctcctgccagtcatcctctgaagggtcttcagtctgagctaacccttctatggctctcttcttgtggtcaaaatttttctttagcttgctgaattgagaagtgtagttgaatcttgatgggattcgagcttctgtttcttcatcaacatccatgccttggatcccaaaattccgacctcttgttgttgatgtccctgaagctttgctgatgtcaaatttcatcttgatgcctttttcaaggttcaggatgatctttccattattgacatctatgactggtcttgtagaggc

SEQ ID NO: 35867 - DNA, 686 bp, Arabidopsis thaliana landsberg
accccatgaaaactcaatgtttctgagtacataaatcttaaaagttcataatctttgctttaaaatgtttcagcatttgaagactttgtcttgtgccaatgttcttactttggcttaccagagtcttggagtgatctatggtgatcttagtacatcgccactctatgtttataagaccactttctctgggaaactaagtcttcatgaagacgatgaagagatctttggagtgttctctttcatcttctggacatttacactcattgctctttttaaatacgttttcattgttctctcagcagatgacaatggagaaggtaaaagctttaagcctttatatcagaattatgatatgtctacgtatgtgttcgacgtttactagaaggttgtgatctttgtttgaaggtggaacatttgccgcgtactgtcttatatgtgaatatgccgcgctaagcattttaccaaatcatcaagaaatggatgagaaactattaacatatgcaacgggaagcccaggagagactcggcaaagcgcggcggttaaatcattctttgagaagcatccgaaatctcaaaagtgtttgttgctctttgttcttttagggacatgtatggctattggtgatagtgttctcactccaacaatctcaggcacattctccagcgaacttctcttcagtgaacct

SEQ ID NO: 35868 - DNA, 1820 bp, Arabidopsis thaliana landsberg
  unsure (1)..(1820): unsure at all n locations
atggtctgtgctgaccatgaatcgaggatgggggctcaccgtatattttctgttgttctggtcccatcttctgtttctccaagttcagttctcaactccagaagacctgctgatatgcagaggacactgtcaagaactgtgtctgtgttttcttcttcagctgcactctttagaaaactgaagttggagtcagataattctgttgatgatactgcaaagatggagagagtttcaacacttagcaggtcaacgtcaaaattcataagaggtgaaagttttgacgacgaagagccaaagaacaatactagctcagtactgagccggttaaagtcaagttacagccgatctcagagtgtnnnnnnnnnnnnnnnnnnnnnnnnagcagatcagaattcttctggaagttcaccagagaaaccagtatgttttacattagattcatgaacttatcattttgtaataatttggtttcaatgccttctaacggaaaactttcaggtgatacccttaagattaagcagccaccaaatttgccttttgctttcatcgatttgggtgcagtctttatctcctcacaacatgccacaaaattatgaagccattgctaatacatttagcttagtacttctcttcggccggactaaggtacagtagttaaaaagttccattgtatgaaactacatagttacactgcattagttcatgttttacaatagaagttacctcttttcatatatgtagcactctagcaatgaagtcttggtctggagctttcagctagcattttctttgcgtaatctgtctcttggaggtatagtcccctgcagataaacttgtggaccatctctaaattaagattttagtagatgcacactgttatatgcaaactatcttccttttttttcacagattactttttgtttccaattataggacccttgcagccatcacggcgtagatccctctttactttggctacatcgatgatcattttctcagcgaaacgcgttcaacatccctccctcctgttaatagcgccaaaaactcactacaggaaaaaacggtagttaatagttttacttatgttcttgctctgtctcttagtctgttgtataacagcttgataataacatataaaatgttgcatatcaggtagacccgtttcttcaattggtggaagattgcaagctagatgctgttttctatggacaagcagaccaaccagcaaagaattatggatcaaaagaagacgatgacgacgcttcacgttcacttgtcacgatagaagaagcttcacaaaatcaatctcgagagcactacgcttccatgataatgaagtttttgggaaaactatcagatgtactactatcataatgttgatcactatttatgaattatgttggagtgtataactacttacctgtgttaatggttttaacttgcagcaagaatcgtcggctataaaggagcagctagtttcagactttatacctatcgatggctgtccagttggaacgcagttgacagaatctccagttcaagtttaccgttctgaagaaaaaaacaacaaacctcgagaaaatgtatccacagtttgcgtctgatttctcaaatttgaagttagttactattctaacatcattatgtttccatttactttcgcaggctgaaactcaattgcttataccggagaatgatgcagtgccgagtcctccagaagaacagtttagtcttgacatacaacctaaccctcacactgcatttcttctgagcattgaaaaaaatctaaatgcagtgagttatttttctttttggttcta

SEQ ID NO: 35869 - DNA, 2444 bp, Arabidopsis thaliana landsberg
acaatctattaattgtttggggagtttcataaagagtgccaaaatttggggtagaaattataaaactagctaaacaatgcattgctttaacttgacaaacgcacagatacagagagacggaagatatcaaaaagctccaaacgctgaaaacgtgatcaacaaagcaacaaaagtaaactacgattatgaaaaaggtcgagactttacatgatctttatctgtctctctatgtaattgcgcatctctacatgaaacccacaagataaatgcctaagcaaagaataattgttctttttgtttctttgtagctctcatctgccgtgcagatttagagtattgaagattgaagaatgcaggttcattgaagcttactgatgaccatcatttggaagttaactgcatgtgacatctgagtagaaacctattatagtcctcctctcacaatgctggatactgagcaactccacgtcgaaaacttcaaattgcttcgagctgaagaaagtcgaaggtcccacctggtgagagcccaatgaacattgttgtgacaaaaatatgatcgaaccaaagtgaagacagtttttacacagtacaagtctaatctacattggtttagatatgtgcctaaacgagcatgctcaagctagtaattccatttgaaacattgttgatagagggatggtatattcaacggaatggctcagcaaaagtttaccactagtcaggtttacagttcagacaaatgtatacttgtaaggaacaagtaagaacactaaccggaggtcccaattctggagggattataatctcttcttcgcccaccgggcttaatgtcacgaattcccatttcaaatcctgcatcatcattatccatatagtattaaaaatcttcaatatgtgtttcctgtcaaagaagattcttcattaacatcctactactaaagagccaagttaatgtcttctacttgcctggaacaagtgcattggttcccatgcggattctagcaggagaacctcgtatgtaagtactatctattcgccttccagactcattgtagccaatgtagtgaaaagtcacctgtcaaaataaccataaaactcaatgatatcttcaattctatatatccaagtaaagagcataccaattccataaatgatctaacttcagatcctaagtttaactaatctaacatagaggaagtagtacctgctgaccatcttttgggaaatcaccttgaccaacattgaaatcccgatatatgaggccagaatcagccttgatgtaattatcagaagctaataccttaacctcaaaacctgcactatatcagcaaaaacataaacacaaacaaaaggacaataagttctcatattcttcttccactcaagaatgaataatactcaaagaaacagtgaataaaagcttaaaccttctctaacaaagttaggaaactcgtcaggagcattgttctctctctgtatcctcttgttctgttctagtaaccgtctctcatcataaggactctttgatttagtcttcgcagatgaagacaacgctggtaacaacaaacacggcgaagcaactaaaacataaacaagacttctccgactcaagctgcaattaaaagaccaagctttatctccagaatcaaaccaaaaaaaggaaaaaaattatctctcaagattgcaaattttaccattggtcttttgggtcttcactcaatgaacaacataccgagcgattgctccgagataatgacagttttgtttcacctataagattttatggaacagttttggtcacttaactagtcttatggaaccagcttactgaatcgtaagatcaataagagttttgagagatagagggaagaactcacagagaaatgtaagtcttggagagagaggaggagttgatagaatcgtcaccattgcttctccctccggcgattcctgcaaaaatccaatgtttatcctaaagtttaattttgtagataaattacattttacaccatccattttcagtttattataatttggacccacaattccttttgttaccaatttatccgtgtggtcattggtcaaacaaagttgacgaaaactttacttgtggtcttgtggactcttaaccaacttggtatttttggacaatgactccgagcaaaatttaataaggttaaaagttcatttttattcaccaatttaaacttcaaccaaagagagtgacaaccagattctcatcatcaatgccgatgaattaaaatttcaatattaataccagtaatgaggcaataaatggtggtcagtgtcatctgaattggctgtttctgaaaataccagtgcctcctcctctaggttgttcaccggatatgagtttctgcaacctaatttgttctcagaaattgggtatgcactcaacggcttttttatccacctccttatgg

SEQ ID NO: 35870 - DNA, 3566 bp, Arabidopsis thaliana landsberg
  unsure (1)..(3566): unsure at all n locations
aagcatctttcttgatagtactaagtatgttttgttcatcattttggtttggatttgacaggtctctattttagggttgtttttggttagaagttaaaaccaaaataaaatcttaacttttggaaatgggatctgttactgggttttactcaaatgaagtgtttgaattagatcctaaatgggttgttgatcctcaacatctctttgttggtcccaagattggtgaaggtgctcatgccaaaatctatgaaggaaagtaagtttatttctttatcagattaatttcatcaaaagttttactctgtatatggttctgaatccattattgtttccctttttctcggcgattgatctgtttggactggttctggtcttcttgagcttgtgtcttaatctttgcatatgtgaaaaattgaaacttttttgcttcaatatatctagtcatttgcatattcactatatcagtttcagtttaatggttgttgttcaatgagttcagaataaaaagaattactatggtttgtatcaaaaatttcagagaaatgttttctctagaaatttcagagcattagtgtgaatctgtggagcaaattcaatcataaagatagttttcatagatgttatagtttgatgaagattgaagagtattgagaatgatgtaaaatgtggtttcttgtttaggtataagaacaaaacagttgctattaagattgttaaaagaggagaatctcccgaagagattgcgaaaagagagagcagatttgcaagagaggtctctatgttgtctagagttcaacacaaaaatttggtcaaggttctgcttctttgcatttatctaatctccagtacatattgctacataatttggttagagacaaacaccaaaacgttttgatttggtatgttttgtagttcattggagcttgcaaagaaccaatcatggttatagtcaccgagcttttactcggtggtacattgcgtaaataccttgttagcttgcgtccagggagtttggacatacgtgtagctgttggatatgcccttgacattgctcgggcaatggaatgcttacactctcatggagtcatccatcgcgatctcaaaccaggtaattgtttacaataaatcacacttcaagacattatgagttaacaataatgttcttatatcttcttggattgcagagagcttgatcttaactgcggattacaagactgttaaactagcagattttggtttagctagagaagaatcattaaccgagatgatgaccgcagaaactggtacatatcgttggatggctcccgaggtacttaatggaatcttgcattttctgtgttctgcatttttcttttgcttctaagaacttgcttaatcacaaattacggttaaacagctttacagtacggtcacgttgaggcatggtgagaaaaaacactataannnnnnnnnnnnnnnnnnnnnnnnnnnnnttgtcttgtgggagcttatccacaacaaattaccttttgaaggcatgtcaaatctccaagccgcttacgctgctgcattcaaggtttcattcttgattttcaagtgtttcaaccatttggttctccaaccggacaatgtttttctgattgttgtctgctttataatatttcgggttagaacgtgaggccaagcgcagacgatttaccaaaggatttagcaatgattgtaacatcttgctggaaagaggatccaaacgatcgaccaaacttcacagagattattcaaatgcttctacgttgcctctccacaatctcatcaactgagcttgttcctccggccattaaacgtgttttctcgtcggaaaacacggtcttgccaccagaatcgccgggaacttgctcattgatgactgttagagacaaagatcagattcctaccgatgcaaactcggcgcagaatgaagttagaggaagcttcttcttcttctgctgctaatatttgatttattggttataaagtgaaacatgagagaatgtggtttgatatatcatatgtaatgtattaatttgaatgataatagcttagagttattgttatgagtttaacgtttttcctaaaaatgttcttaacttaaaatacccaaaaaaaatgaagcaaaaaatcgccgttgccggggatcgaacccgggtcacccgcgtgacaggcgggaatacttaccactatactacaacgactttgttgctaaacaagacagttgtgtcaaattaaatatatctaattacatatgctttgaaatattgttcaagaaattgtatcttctccatttccatctttgacactagtatatttagaaacacaatctccaaatgatagatttcatcttcatttttttgggttttcaaactcttaaatctttaagtaaatcgaagttgataagctataaccaattcaagatccttaagtaatcaaacacaatgttttcaagaccagttctgtaaccattcctttttcaatttaaagaaaaaagctcaaaaagagaggatatcattcttttaaccataatgcaatgatttaggcatttcatgaccatctaaatttgctaggaaaaaaatacaaactaaaaacatgaactcaaacgatataagcctactaattaagaatcatagttacagttttaatatagtggttgactactctcagaattatggagatcagtggaatatatttacatctttaacgtatttcatataaagtcgttcttcgtgatatatatatatatataaataaaattatccatggtgaatgtggcgcaaacatgttcggcttataccaaatttacattaaaaaaaaaatttggtataagctaaactaaaaaataaactcatatttaaaaactcgttttcagcataaacgaccaaaaacagtcgcttaaacctacacttaagcctccacaaataagcatatacgattgatatgttagtgttactatactctgatttatcttaggcatgtcaatcacactacctcagcccaaatccaaaatccttaaaactcgcgtatattttttcttactttttctcaatgtttcttcgaaaaagaataacaaacttataaatttataacatttcttataaaatttcaaactacattatattatagagccaacatttgaatcaacttcaatgcattttaaatattttctagtatatgactatatgtagatttgtttatggtgcagtcatctaaaactattcgttgtatttccagttaacaccagaaaaaaaaagaaacttaaattcgttcatcatcttacagtaggatggtattaagaaaaaaatacacaaagttaagacttcaaacccaaaaaatattttaaacatgttgtaaacttgtaataagttttacaatttaaaaacattttccctttatgggcttttattatccaataaatgccaaagcagcttcttcttcttcgtcccaaacgatgtcgtattcttcttgacctacgaatcacatttccttttttaccccaaaaaaaccctgaaatctttttatttaaagaaaaaatctgagactgaaaatctaactttttt

SEQ ID NO: 35871 - DNA, 2253 bp, Arabidopsis thaliana landsberg
  unsure (1)..(2253): unsure at all n locations
ttacctccagatttacgccgtgaaatccaacgtcatctttgtctcgcccttgttcttcgggtacatacatcaactcattcatcaaaaactgttatggatttgattgtttttcaattcagaagtcacattgttgtggtaagtgcaggtcccgttcttctctcaaatggatgatcaacttcttgatgctatatgcggatgccttgtctcatctttaagcacggccgggacatacatattccgtgaaggtgatccggtgannnnnnnnnnnnnnnnnnnnngaggacaaatagagagctcaacaacaaatggaggaagatctggtttcttcaactccactactctacgacctggcgatttctgtggggaagaacttcttacatgggccttaatgccaaactctacacttaatcttccgtcttcaacccgaagcgtccgtgccctctctgaagtagaagcctttgcattaagcgcagaggatcttaagtttgttgctcatcagttcaaacgtcttcaaagcaaaaagcttcaacacgctttttggttctactcacatcaatggagagcatggggagcatgttttgtccaatctgcatggagaagatacaagcgaagaaagcttgcgaaagagctcaaccttcacgagagtagcggatactattacccggatgaaacaggttacaatgaagaagacgaagaaactagagagtattactatggaagtgacgaggaggatgaggaaggcggatcaatggacaacacaaatctgggagcaacgatcttagcatctaaatttgcggcgaacacgagaagaggaacaaatcaaaaggcttcaagtagtagtactggtaagaaagatggatcttccaccagtttgaagatgcctcaactattcaaaccagatgagcctgatttctctatagataaagaagacgtttaaagtgtagtcattatgggcaaaaaacttttgtgtgaactgtttggttttagatggtaaatagttaggaaactcccttaattatttcaacttgtaatttttcttttcttttcgtttcggtttgaggatgttagatatagaaaacgagtgtagagtaaaaatacattgttcttaaactgtctcaatgttatattgtctgatttcttctcatagtagatactacttttgcatacaaactcatttttaagtctttcagaagaacactaaggtgtttatagcttcttcggattgaccagccaatattaacctcaaagatagcaaaaatctcataaagcaaccactgaatgcaattgaaattttttgaaactataagaccaaaaccaagaattagaactccaaattagtcattcatatccaattgagaagaatggatcaacttttcaacaaacctaacatatttaatgactaaaattaggtacgaagccgttttgttatccaatccttaatctctctaagcatcagaacttgacaacttattaacaccgtcgggttctctactcttacaaagctcttccagaagcgaatccaaactcttccaagacgaaccagtcccttgagccatagcttttttcgccattttcgcatactcttttacattcttcatcgttgtcttccccatctctccctccatcaattgtttaacctaaatagtacaaataataaatacaatcaaggggtactctacagtcaaacggaaaaagaggcttccttcttgttaatttgttagtcaaaaagcaaagccatgattaccatattcaaaacattttattctaatatatgcatgacaccaattaaaacaaaagatggaaacatgaaagggtatatatacggtacctttcgactaagttcttctcttgtcacgaatcctttcacacttccatcttctgtttcgattcttactccgatctttagctcctccactaccaacttcgcattgagtggctgctctgccatcattggccaagcgagtagtggaaccccagcgcaaatactctcttgcgccgagttccatccacaatgactcaaaaaccctttgacacttttatgtgacaatatctcccattggtctacccaatctctcacaatcatcccatgctctttcactctcttttcgaaccctaatcctccagttacttcttccaagtcctttctcgtgacccacaagaaattgaccattttaaaacaatcaagaccacgtaaattcacaaaacaatacttttctttttatatatatatagactaaaaaatgttgatgggtt

SEQ ID NO: 35872 - DNA, 8193 bp, Arabidopsis thaliana landsberg
  unsure (1)..(8193): unsure at all n locations
attttttcttaaaattatatgtaaaagatcaaaaatgttgagattaaggagtagtttcataacagtgggcctctgggatctcggcaaagctaacggcatagaatgttacgaccgagactgcgacgattccaagaacagggagtgcgatatggcttatcccttccattttcttctcttcttctcagaaccaaactttcaggataaggctcttgaggataataatatctctttatatagatagcatctgaattcaactcttttttttcacttatccttttaaagaatcaagattagcttatgtccaaacaatattatatggacaagagagaaagctttagtaaatatcaatcaacatctctaaaatggtttttgttctcattactgagtaaagaagaagaagaggaagaagaagaagaagagtaactattagtttctgggatacaacttaaagttggtaaagacttctattaataatacaaatcaaaccctaagaaagaatcacaaaatcaaaccctatgatgattacaggaaaaggtgcaagttcaagtgaacagattctccgaataaccgccttcgtaactcgcttccttttcccctttgaatatctcagcatcatcgaaacctgttacgcatttcattcaaaacaccttttaaacaacttctctcatgtttgtcaagatattcacaaaaactaggttctgcaaagcttttacctgaccccaagtcttctgtttcgtcgataacaacagctacttcttctgacctcttaatgaactcgagtgacttccagtctgagcttccatttccttctatacaaacttggtttctcgaaacccagtcttcaagaacttccatgttgctgtgtgataacgggtctaccgtgtcatctccgctgctttcgctgccactagaggaaacagacagagaatccttttaagttctgttttgaacaaaagacagtatagtaatcaagaagatcaaaagattccaacttacattcgtctgaggcgcatgttgtactgaacaaatacaagatcgttgagccgttgtcgctcaatagagttctttgattcatatatttgcgagattgatgtcaggtttctcactgagccaatagatgagctgcatgtctgactcagaatacgtatcgcaaaacgtgacaggttcaagcagctttctccatatgtagaccaccattcagctacaggaatcaaacatgttttaactacttacaaaacacttgaacatatgaaatctttttgagattcaattataaatggcgtacctggaagcattgtgtcacgagctctgatagctaagttccttccgaaaatcccaacagcattcttgtatgagtttatgtccttaatgacaatatcttgaatgttgacatcagggactaatttctctatgcaatcaacaaccgctaaatggatctcactacgcatttcttcgtcgatgctatacaagaactntgggttcaaatagaaaccagcagcatacggaggttgctgcaaccaccacctatctataattttccagtacactatgtactcctgcctgtgagccagatttgtcttaattgcttcttttgctcgatacattgctgcatagacataccccattgcaggcttcctttcagaacaaactatcctcaaaacacgcaaaatcggagcagttatatggttcgccaatgttaatgccttccagaagtcctcatcattgatagtctcagtcattgctaatccacctgcttccttcgaatacgaacaatcattccactcggatgatgtaaccattgcttgcaaataaggttttagatcagcaattcttcccattgttgtaaaatttgtagcggaactggtacagactggttgcacaatatcattgccaaaagtgaatttcctcatcagattcaaaacaccactgtgattgtaaataattcttgtaacagttcgagcttgttcgataatctctcttatccaatccatcttcccaaactcttcaagcatcttgtctatgcaatgtgcagcacaaggaacccagtatagagaaggatacacatccatcaactttttcccagcagctgcgtaatgatcttcacatttggtaataacttgaacaacattagtatcacctatctcttcaactacctccttaagtaactcatacaacttatcctcagaatctaatatctctgatgcatcaactgatttcagaaacactactttctcaggacagtaaaccaaaaacttaaggatcaaaggtccttcgttggagttcagttcctgaactaaaacagaacatcctgttctcttccatagagtgttgcactcatcaatctctttcttcacttcctgtacacaactcttcaaaatccaacctctgaggtcttcatgtgtaggaatagaaacaccaaatcctccagaaacaatcgcatcgataaacggttgaacattgacagaattcgccgcatcgaaatcagctccaatatcaaacagaaaccgtcccatagccatatgaactgttttctcccgctctttcgaagtaggatgcacaatgttcttcacgctactaatagccacaggaatcaaattgtccatatctcgatcaacctcaacattagccaaatcattcctctcaaaagcattattctttctactcctataagtcctctgcttcgtcctcccagtactttgacccactacgacatccgaactcggcgatttaaacccgttattcacatcagaagaagcagcaacctgagtctcaacttcacaaggagggaaataagctataggcaatggttcaggacttgatttacgtctcttcctctgacgtctcaccgtaccatcaatacactgctgcaagaaaagacgaacctcatcaggaacttgatcacagatagtgccttgtcctttcttgccagcaagatgttccttaacccttgtaataccacctcctttaaacatctttcgacagtaaagacatctcatctgaactcgatctccatatttgtaaacttcacagtgtttccacgcactgtcttgtttctgtggtgttagagctacaggttccaaatctgaatccatcctacaaaaccctagatccttcaattaaacatttacgagatcaaacttagaagaagaattcatcagctttcataaaaaagctcacaactttcgtaacaaagatgttaacttttcgttgattagataaaaatcggatcatattgaatcaaacccgtcaaagaaaagcgaaattctaaaacccagtgcagcaaaatcgtaaatttcagagtttttgaattatcgaaagaacagagaacgaaccttttttggtttgcaggtttgtgaccgggttggttacggcaagaaatcggttcggtaaaaaacttgataaaattacggtataaggacttcggttttggggatgaagaaggtggaatcgaccggagaagaagagattaaggaacgctggagaagaatctgaaggcgacggaggaatgcaatgtcggagaaatttttgagatgacccggctcgttagggttcgagaggagaagaagttgggcagcttttctggtttataaaaacgacaaattttgtttattttttatttttttttgtcttgttttggcttaaacttgtttttgtggttaaatcggtttttaatttaaggactaaagtgattatttgtataaagtataaggtctgatatgatgataagtgacttcatgtggggtatattttaatttgtcttttcaaagatagatatgattttgggtcaaaaatattggatgagattgtagaatctagagataattattgtttttcaaagtcttatcataaattaattaaggtaaagttgaatgataaattaaaaagcaaaatgtgttaatacttcaagaacatttgttatacttcaagaccaatcacaagtgctgactcacattacaatgattgttatgttttactagatttgcttcggtattagtgtgaggatgtgttttgtcaaaaaaagcttagaacatgaacggagtttaaagaatacggttgaagcaagggcttgcattgttgcgttctatatctctgaaattcgtttatgtttgctaaacagaaaccacaatgtgcatgtataatagattatcaaaatgttgagagaccttgttctgtgattctttcattgtgatattttgtacaatgttagtttcattttaagagtcacaagtatttgtacacaaatcaaaattttcacataatagttttcaatctggtatattgcaacaggtctctatgactgaacaaggaaaaattcaactatcaccaaggctatacaatacatggccactcacacaatcgtaacaatctcctaacttttcaatctaaacagcaaggttaaagaaagattcgacacctatctcgttaaaagttaaaacactctatttataacaccataacatcaacacgaaatcaagtaatcaacagtgacaactcaaacatgcatctaagactctctatatgctcctacaagtaaagaaaagagactacaatggctctaggactgactacaatggctacagggaaaatgatttgacagagaaacccatttcaatactactccaacatctcgaaattggaaaccagaagtgaccatcttcaataaccttaaacaacatttccacaatgtaatcaattcagctattaaaccagctgtccctgaagaagcagtttcatgaggtagtatctgatccatttctggatcttcatggtccatttcttgatcctcaagattaaagttgtcttcatcaaacaagttttgagtatccaattccatatttctgaaacaaataaagacatacacacgtttagcagtgataaacaaataaagcatgaacttgactaaattctttctcgaatcatataaaaaggagtattaattcagatgacctttaaggattttactttaaagaacatcaagctcaagcatatacgataataatcaataagacaaatggttcttactccatgaactatgtttttaaaacctttcaatacacgtgaccttttttaaagctcaagcatatacgataataatcaataagaaaagttcctaaagggttcaaaagaaggagattattcattgcaaaggaaggagattattcaaaagctgcaaaggcttttcgagtaagcaaagaggatagaaccattgtagaggtaaatcttcattgaatgagcaatacacaaacacaactcatgaagttataatttaagacattgtacataatattcatctctgtcttcacactttgatgcagttaaataagctatacttggaaatctgtaaatcttcgatgataactacagctggaattactgagttcactaacatgtgtacagtgctaaatgatcaggtacttatctactcctataagagtaacgctcatgtttgtgtatggtttatgtattataaaatagacatttgattgaaatatcaattttttttattggcactggggattctaaaactcagtcatgctcgagacgataaactaaagagaatgagccttagagtagatgaagcagacatcacatttgctcttaaggtatacacattacacactttgtttattattcccaaaatgcagtttcttaagttaacaccttctcttttcattgcacgaacaggagattcacgtatatacttgaactttgttcctaaagggttcaaaagaaggagaaaggtttcaaatttacattaccatgaaaaaggaattgggagacgtttgagcttgtgctttctcttctcaagctcagctggagcctaaaaacaaattagattcaagcaaaaacaaaattagcttacaacacaaagggtctctacatattgatgtgcttcaattcataatgaaattcgaaatggcgaaccataaacaaaatctgaaaagtgcccatttgctagctagctctcctcatatccaaaaagctaagattctttcagaaacactaacaattgaaatttggacaaacccacaagctagtagaactaaccggagtaggagttgagagagaggtcgagcttggtcgtcgccgagagagagctttgtcgccgggagagagagcgtcgttgccgagagagagagaagagaagaaaattgatgtgttgaaaaaattgatgggccaaccataaaccgtgtgggctagcccattaaacccatggacaaaattggtctttagaccatatagcccgttttcattacgggccgaccatggactgtccataatgttgtggactgggcttagcccatggtcagatgaccatttgacacttctagattggaccatggtttcacacaagacgtcgattttgttcacagtcctctccgattaacatcaccaaactcgtcgacgttgagcaccttcggttgagatgatgagcacggtggataagagaagaattccggcgataatatcttccgatttgatgatataaacgcgtgatgatgatgatccaatcgttcaatcgccatcgtcgagcggagttcacaagagagagaaaacgaaatcgataaatgaagaaaaaaacacgggcaaagatgattttttttttgttttgttaaaaaatcccaaccaattaaaatttgccacgtatccgtcctttaacatcatcaaaattcctaaaattaggtgcgatcctaagtatttatcacattttagatttaatttttctcaaaattacttaaggattttggttaaggatcctcccaatggacttgctctgacatatacacatataggtcctttagttatataagtattaaataaatagataaattcctaattagatggagattagcttatcacatctttatccataatatcacacatctttaaccataaccatcatccgaggattgtttttggtaaatttgatttcaacatggtttatggtgaatgatagcatttgtttgacccagcaaaaaaatagcattaatcttgcattgtctagtacataagccactgaacataaaaggatttagaatttggagattaacactcacaagacacatcactaagttggttgagttccattgatattgataataggatctgcattcaatcatagtgttacaaaagtagatatagaaactcaagaattcgaaacatgacaagagtttgttgctaatagagaaatgtttcttcttctttactggctaatttaatggcgatgatgagggcaaaaggtgacgatgtagttagccttggaacatgtggcgatactggttgggtcgtcgtaagcataagagtaagcttttgggcaagcgactttgaagattttggagtaagccgttggtttgcaagactgtgggttaccgaacaagccggtgcaacagtactgtggtgaattgaaggcagagcaagcacgttttacaggctactacacgtttcccgttacgtgaccggacttgtaaaccaaccggacacatctggtttagatcgctaacacaaccggcgtagctacattgacctgaacctttaaccggcataatcgacatggccaggttataactgtcattacaacaaacaaacaaaaagaacaaaattagtgaaaaaagtaagttaagtttgtgtaaaaaagaaagcagatttgatgtaagatttacagacccgtcgacgaggctgacgtcatagaagtctagctcagggccgagagtgatttcggcgagagtggccggaggttcaccgccggcaccgttgcaggagagagaaccgccgcaatctccggtggcgcagtgaccacggccagatctgtcgaaggtgcagccgtggcgaccccagaaacggccggaccagagtggtgggagttgaagagagtgggctttgttagctggaagcttaaaaccaccgccggcgagtaagttttgaccggcgctgggttggatacctggccacactgggtgtttgcatttgttgtagaagattacagttgaagctactctcaaagaaacaacatcaaagatagcggtattacaaaaatctgcaactaaagtatctctagatctatatttagaaagggcatttttattcatacatgggcgagactggagcaaagtctaaaaagccccacaaaatttaaagatctagcagggaatgtaagaagagtcctaaagcgatgagagagaagaataaggcagg

SEQ ID NO: 35873 - DNA, 4324 bp, Arabidopsis thaliana landsberg
aacaactaaaacttattcaccaagacaatttattaccttgtttctaatgaatcaagaatctgatccttatttcactgaaaatggccaaacctccaaagaatgtccggctaagagacaccgaaacaacaacaagacacataaacaactaatttggattatacgttaaatgaataagtaatgaagttcgagaagagacttatgaggaggagatgaattgtttatatgttggagccgaatccgccaccgcctggagtaagaatctgtaggatttcaccggcttccacgtgaaccgtattcttgcctccaagatagattcttcgtttgtctttagtgatgagatagtttgctccacggagtccgttttggccaccgttcaatccacgtggtgagtgtactcgtctctctgagaggatactaaccaccacaggctttctaaattctatctctctcaccaatccatcgccttctttatgcaacccattgcctccactattctctctcaatccaaatctatgcaacagaaccgggtacctgataaaaacccatgtgttagtctagtgcaagtaagtctgaccattcagtttttttcatagctacagaactataaggtctaacaggatgtttcagtacctttgctcgaagatctcaggatcagtcatccgcgtgttagtcatatggcattggactccgcttgtcccgtcccatgtaggtccagctccgcatccaccaccaatggtctcgtagtacccaaatgtgtcgtctccaaatgtgagattgttcatgcatccttgggaacaagcacaagcctggaatgctgttaggacaacatctgtaactctctgggatgttagaacgttgcctccaacaacagctgctttttcgcttggagacaggaatgaaccagcgggtatgcggatctcaactggagctaagcagccttggtttagtggaatatcgacattaaccaaacaacggaggcaataaataaccgctgcagatgtaactgcttctggggcattccagttaccgtagacttcagggcttgtgcctgtaaagtcaaagaaggcttctcctttgtcagcatcaattgttagttttaagtgaatgacggatccatcatccatgtaatcctcttcttctatggtcacagaattaccaaccctggaatttggtgtttccaaggaaactctattagctacagacttcagcatttctctcactgcttcttcggcgttaagctgaacgtatttcatgtaagcctgaacagttccaaggccatattgctcaatcagctctttaattagagaaattcctctttggtttgcagctatctgagcttggagatcggagagattgtcctgaatccgtctggttcctggaatcttagttgttgtctcatcagaagaagggaattgaagaagtttaacaattccttcttcctggaagacacctttttcaacaactttaaacgcttttatagcagcaccttcttcccaaatcgcctttgagaacggaggcatgcttccaggagttatgcctccaacttctgcgtggtgacctctactagccacgaagaacacaagctttccgttatcgaaaacaggtgtgataacggttatatcaggcaaatggctcccaccggcgcatggatggtttgttaccaaaacatcttcttcgttcagatttcaccccaatgtttgagctgccacgaactgtacttgacatggcccaagatgaactggaacatgtggtgcattagcaactaagccaccgtcaggactaacaaggcgcaagaaaaatccaatctttctttgatatttgtcaatatgaaagtacgttgcagggttcttcccatttgctcagctatacccatgaatctgtgattaaatatggacagttgaacaacatcggcaacattttctgcaagcttcacactgctcattgcagactctacctcaattttaatgttcccatattttgtaatgatggctttgcactgaggttctacaataactgtactgttcccgttcatgatgatcgcagggccgggaatctcatggccaaaacctaaattctccaacttgaacaatggtgtgtcatgccatccgccttcaaagtaaaccttgtagtgcctttcaaccttaggagtaccaggggcagcttcaactgcccgtggttttagtatactagtcactccgattccccgaacccgaacatcacagatgagaagatttctgttttgaagtttaaatccatactcttgctcgaaaagcttgagaaactctgcagcataatcaaatgccgacccatctccagtttttttaccctttaccatgatcgctgtgtctgtcccgtcatatcttaaattcccatatgtctcagtggagatatttccatcaccaaaaccctgctcctggagcttttctatcacttctgttagcagcaccgtgtaccttgtaacgacctatgcacgagattcagggccagttacagctgaatatggctcttgagcatcttcaatgacatctgccaaacccattccataagcactcaaaattccacagtatctgtgaacaagaacttctttcatgcccaaagacctagctattgcacaagcatgttgcggtccagcacctccaaagcatgcgagtgcatgattctttgtttcatgacccttcatctctgtcagttgtcgtatgggacggcacattgtctcgttagcaacactcacaaaccccattgctatttcctccactgacatgtcttttgcagatggatcctggctctttctatatgaattaatctgtcctgcaagcttttcaaatgcttctcttgttgctgctacatctaagggctgatcttcattgggcccaaatatggatggaaaataatcaggaataacaaaacccaaaacaagattcgcatcagtaactgctaactcgcctcctttccggtaacaaactggacctgggtgagcacccacagaatcaggtcccacccggaaagcaccaaactgaaactttagtttcgacccaccaccagcagcaacagtatttatgtcaagctgtggcgcttgtatgattgttccagcaatctgagtttctatgacttgctcataacttccatcatagcggctaacatccgttgatgtaccacccatatcaaatccaatcagcggtttttcagtttcaagaccaaagagtgtctgcgagtaaccaacaactcctcctgctggacctgataacacagccttatgccctgaaaacctactttctggtgctaaacctccatcagattgcatgaacaaaacattaactttgccaagatcatcatcaaatttggaaataaaacccgacaagtactctttaatcaccggtgtcaggtacgcatccacagtagctgttaaaccccgaggaacagcccgaaccatcggggtcaaagcagaagacaacgaaacatgcctaaaacccatctctaaagctaacttctccacagccatctcatgcttcggataagtatacgaatgcatcaaaacaacagccaaacaacttatccctttatcaagcaaacccttcaacaaaggtttcaaaccttctccatcaaacggcttcacaactctaagaaactccccagacactcctttaatcaaagacccctcatcatcatcgtcaagcgcaagcacaactctttcatcaacctctataacctcttcataaagattcgacggtttcgcaacagtaagatcaaaaatatcaggtctagcttgattacctatctgcaacaaatctttaaaccctttagtaacacacaaagctattctttcccctttcctctctaacaaagcattcgttgccacagtagtgcccattctaatccactgtatcttatctgttggtatcttagacgttcttggtatcttcttccctgtatactcctcgagtattctccgaattccttcgaccggagcgtcgtcgtagttcgatggatcaactgataaaagcttcaaaacatgaccatcggaatgtcctggaatctcagcgtatacatcagtgaaagtacctcctctatctatacaaaatcttagctttccttcgattacagttcccatctcactctctctgcataacccaacaacgaaattacactaaattaccaattcacaacaacgatattgagagatcataacagcaattttagatagtatcgattaaaatgaaactacgagagaaggggtttgtaatcaaaatccagatatttatgaaagtaccttgctttggtggcgaagatcgttgaaggatcgagttttagcgaacagtcaacagtg

SEQ ID NO: 35874 - DNA, 8484 bp, Arabidopsis thaliana landsberg
gcatcctagtttttcttatgagcgaaggaacatatatcttgtactacgtacaaatggattcttgtactacgtacaaatgtattcttgtactacgtacaaatggagtcgtgtacgtacaaatggattcaatccctttgggaagcatgggacgtagtactaattgtggcttattatcatgacaccttacgacttggtgccatcattatgcatgaaacgagagtttttgtttttgaatatcctcgttccttgccctgatcatccaagaagatcactcaactcgtttctacaactacttatatacgagtaacaacttggtgctctattcctttgagttggtcgttgatcggcttaagtttggcatcaattattttctccatttgtaacatgatagcatcgatgatgacttggtcattagcactcactcccgagcgtgatttggatctcaccattcctgccaacatacaacactaaaccagtcactagttcaaggagaatatcaaacgttttcctaagaacagacgaactagatcgacaaaaataaattatcaaatcatgcttaaaaattccagaaacgattttataaaatactagactcgtcctagattcagatccaattgaattcgcaattttatcgcaagccaattatttatgaaatttaaaggaagataacagcaaagatgaaaagacaaatgagaagatgaacggacaaaatgaaatgaggtgatgaaatgatgaatagaatgaaacgaaatgataaagtgatgaaaggatggagtactcaacttcagaatgtgctctgataccacttaatatgacttccctaagatcgacactcttgtggttgagtaagagatagactttgcatctaagagatcatgagatcactcaaaccaaaggatgtggagcgaatggtcacacaaaggatgcggatggcctttgatttacctttgatctagctgaaaaaagtttaagattaaaaagatagatgagtttacaatgagtaaatacaagagtttaaatagagaagaagagaagaggaagagttagtcttggaacaagctccaagacaactcggaaaagaagaaatcataaatgaaaatttgaacaaaaaatagacccatggccttccaaattcgtggccctcttagtgggcttgggccggattgataatagggggttttggaagtgttacttaggcctcgttaaaaacctactaaggaaaacccaatcggacaaaaccttagcagggaaaaagagcacccaaaacaacacttagcccattaccaatcgtcttggaaagatatcacaaccatcatggttcttgtccaagtgtttgggtagtccgaaatagcttggttaagaagattggtcttcgagcgagtcatttatcttcttggttcggccaaagcttcctccactacatgctgctcctcggctacaagctggtcctcggctacaagttgctccgctggttcaagttccggttggtgctcgggaatagtcatattacctcttttgggagaaaataagtataaatgttgtctaaacactcatactccatctctaactcatatgatttgtcaaatgcattggattgtgacacatttttgccatagaaacactaacaaagctatttactacttctaagcaatttttattggttttagcctcttttgggaaacaatgggtctaagtgttatctaaacacaattaatccaactttaactcttgtaattagtcaaatgcattgaattctggcacattttgaccttagaaacactaacaaagctattgactgcttctaagaaactttttgtctgttttagcctcttttgggagaaaatatgtataaatgttatctaaacactcatactccatctgtaactcttatgactagtcaaatgccttggattatgacacattttgaccatagaaatactaacaaagctatttactgcttctaaacatttgtttgttgggtctagactcttttgggagaaaaatattataaatgttatctaaacactcctactccatctctaactcttatgattagtcgaatgcattggattgtgacatattttgaccaaagtgataagtgtgtattttgcatgtttgagcatccatttgtcatcactttagcatcatatcatcactgttttataccatttcacatcatttgtcatcactttgcatgtttaggatagttttgcatgcatgttgcatatttgcgttgatttcaggtgatttggagctgttgacgagctatttggaagaagcggacctgatcacgacaaaccactcgaccaagaggtcgagtaggagcttcaggatctcaagagaccactcgacccccaggtcgagcagaggacatcaccacttcacttcaccactcgaccacgaggtcgagtgccctcatctccatcaccagaccatcactcgatcacttcactcgaccatgaggtcgagtgtcttcacctccatcatcagaccaccactcgacctcttcactcaacctggaagtcgagtatcttctaacaccactcgatcacatcactcgacccccaggtcgagtgccttcaccttcactgacagaccactactcgacctcgtcactcaacctagaggtcgagtatcaccatcacaacacttgactgcatactcgatgacaagcttcagagccttcttcattccgcactcaaccagacactcgagcacaaggaagaaaagaagactccagctattcactcgacctctcactcgaccacctgggtcgagtacagttcttaacccgtccaaatacttcgtcgttttgagtattagggtttcgggatatttggctataagtagcatgtacttctcattttcgcagacaagaagttttttacctagttttatttccgcagaccttgtgttctagactttttgtaatccggatttctctttatctattcagtattcagcttttgttcttgatttcgtttactgttgttcattctgttatcatcctgctgttacactgttgttagcatgttttcaacttgttcaatgtttatgccttctgttatgatgtctgagtagtgaataggtttatgaggatgagttagagtagtgtagaattctcagtatgctaggtgattgagtattgattgatagatcccttctggattagttgttcttaatgcctattgctttctgatcaactggaatttgagcccagacatttccgcgcccaaaaggtgttcgatgaaatgtctgaaccactaattccagagattcgtgaccctgtaccaaggtattggttgtagggagcgttttggctttaacttgttgattcgtaatgcctgttaggttagctctcgtcaatggtgattgagtctgggactaggttagcttgagagtctctgttgcggtggcacttagatttggttgatgaacttgttgtctagggttaatttattgagcatgtcaatcacctgtaaactgaggaaacgaaactactcaattaccccatccttaggaattctttgtctgattgattttattgtttactctactgctgtttactgcatcctatcatctgttgcttagtttctgcaattctttcctgcaattctttactgttactcgacctggtactcgaccacccagttgtctggcaaaagactgtgcagtcgagtatccctgtttcattttctgtctgttactcgacctgtcactcgacctcacccagtgctctgcaaagagctgtgttggtcgagtgttttactgtttctgtttgattttctgttttctgcatgttcacttaggactgctagaacacaccaaaatctgttattgcttggcttgacttagtgacttctgatcacatcttgattgttagcatcacacccatttggattgacaacctaaaatactacaacgacatgattggtgttttaggataattgactaaaaacctattatcaatttggcgctgttgccaattgggtgtttgtttgttacatttaagatttcagacttgcttagatcaagttctttttcaattttctttttagttactaactgtgtgtttttcttgttgtcttcttgatccaggtacacctctgctgtatgcgaactcgatcaacaagcaaccagaacctctttttcaacgacaacatcaaccgcacagcccgcgaaatcagaaaaaggagaaccacagtcaacctagtacctcagcaaccactcgttatggctgaagaacggaatcaacaaaatggccctaccaacattggtgctggatatgcaccacgtgatcaccgtcagaggaaaagaggaaaggaattgcacctcctgctatccagaacaacaatttcgagattaagagtggtctcatctcgatgattcaggggaacaaattccatggtttgccaatggatgatccactcgaccaccttgatgaattcgataggctttgcaacctaacaaagatcaatggtgtcagtgaagacggattcaagctccgtgcgttcccattctccttggacgacaaaacacacatctgggagaagcatctaccccatgactcaatcaccacttgggatgattgcaagaagggttttctatcaaagttcttctccaacgccagaactgcaagactcagaaatgagatttctggtttttcacagaagactggcgaaaccttctgtgaagcatgggaacgtttcaagggttacaccaaccgatgccctcatcatggcttcacgaaagcctctctgctcagcactctttacagaggagttctaccacgcattaggatgcttctggataccgccagcaatgggaatttccagaacaaggatgttgaagaaggctaggaattggttgagaacctggctcaatcagatggtaattacaatgaggactgcgacaggaccgttagaggcacagctgactccgatgacaaacacaggaaggagatcaaagcactgaatgacaagctggacaggattcttcttagccagcagaagcatgtgcacttccttgttgatgacgagcagtatcaagtccaagatggggagggtaaccagttggaagaagtcagctacatcaacaacaaccagggtggctacaaaggatacaacaacttcaaaaccaacaatcccaacctctcctaccgcagcacaaacgttgctaatcctcaggatcaggtgtatcctccacaacaacaacaaagtcagaacaaaccttttgttccctacaaccaaggtttcgttcctaagcagcaattccaggggaactaccagcaaccaccactacctgggtttgcacctcagcaaaacaaatgctacaacagctgcttcacaggcaagcctctagctccatggagatggcaaagaagatatctgagttacataacaagctggactgtagctacaatgatctcaatgtcaagatggaaacactgaataccaaagtccgttacttagagggacattctacatcttcttcagctacaaaacagacaagccaactaccaggcaaagcagttcagaatccaaaagaatatgctcatgctatcaccctgcgtagtggaaaagcacttccaactagggaggaaccaaagacggtcaccgaggacagtgaagatcaagatggggaggatttaagtctcgagaaagatcaagctgacaaaacactcgaccagtcactcgagcaaccactcgatccgccactcgacagcattactcgaccaaccactcgacctgttatcccagcagcatcaccaactgctccaaaaccagttgctgtcaaaaacaaggaaaaggtctttgtccctcctccctacaaaccgcagcttccatttcccggccgtcacaagaaagcgttggtagacaaatatagagctatgtttgccaagaacattaaggaggttgagttgcggatacctcttcttgacgctctagcgctaatcccagactctcacaagtttctgaaagagttgattgtggagagaattcaagaagtgcaagggatggtggtattgagtcatgaatgcagtgctatcatacagaagaagatcattcctaataagcttagtgatcctggttcattcactctaccatgcactttaggtccattggctttcaacagatgcctatgtgatttaggagcattagtcaatctcatgccgctctctgttgccaacagatgccttgtctaccaacgaatctggggagccgatcatcccaacttcagatgattggtctgaactcaaggcgccgaaggtggatctcaaaccacttcctaaaggtctaaggtacgtatttcttggtccaaactctacttatcctgtgatcattaatgctgagataaatgatgatgaagtgaacctgctattatctgagcttagaaagtataggagagcaattggttattcattatctgacattaagggaatttcacctagtttatgcaaccataggatccatcttggaaacgaatcctattctagcattaaaccaaagaggacgttaaatcgcaacttgaaagaagtagtgaaaaaaaaaattttgaaactgcttgatgctggtgttatctaccctatctctgatagtattcgggtttctccagtgcattgcgtccctaaaaagggcggaatgaccgtcgttaaaaattaaaaggatgaactgatccctactagagctataactagtcatagagtgagatattgattgtaggatgttaaatgctgcatctaggaaagatcattttcctttaccattcattgatcaaatgcttgaacgcttagctaatcacccatactattgctttcttgatggatatagtggtttctttcaaataccagttcaccgtaatgatcaagagaaaaccactttcacatgtccttatggaacttttgcgtataagagaatgccatttggtttatgcaatgctcctgcaacatttcagaggtgtatgacctctattttttggatttaatcgaggagatggtgaaggtcttcatggacaatttttcggtctatggcccctctttctcctcatgtttgttgaatcttggcaaagtactgaccaggtgcgaagagatcaatcttgttctcaattgggaaaagtgtcatttcatggtgaaggaaggcataatgttgggtcacaagatattagagaagggtatagaggttgacaagggaaagattgaagtgatgatgtagttgcaaccaccaaaaacggtcaaaaacatcagaagtttccttggtcatgctgggttctacagaagatttattaaagactctccaagatagccatgccgttaaccagactattgtgcaaggagatcgaatttgatttcgatgaggactgcctcaaatcctttcacaccatcaaggatgctttggtgtcttctcctgttattcgagctcctaattggaatatccattcgagattatgtgtgatgcatcaagttacgcagtaggagctgttttaggccagaaaatagacaagaagcttcatgtcatatattacgccaatcgaacgttagatgaagctcaaggaagatatgcaacaactgagaaggagcttctagctgttgtatacgcatttgagaagttcaaaagctatttggttggatcaaaggtcgctgtctatacagaccatgcagctttaaggcatctgtatgccaagaaggatacttaaccaacactgttgagatggatacttctattgcaagagtttgacatggagatagtagacaagaaaggcattgaaaatggcgcagctggccatctgtcaaggatgagaattgaagaacccattccgatagacgattcaataccagaaggagctacagtgagaaagagttccaccaactgaatgctgttgaaggagggtctccatggtatgcttatcacgtcaattacttggcatgcggagtagagcctcccaacctgaccagttatgaaagaaagaaatttttcagagacatacaccactactactgggatgagccttatctttacactctatgtaaagataagatctataggagatgcgtcttagaagatgaagtagaaagtatcctgctgcattgccatggctcagcatatggtggtcacttcgcgacgttcaagacagtgtcaaagattcgtcaagcaggattttggtggccaacaatgtttaaggacgctcaggagtttgtttcaaaatgtgattcatgccagagaaagggcaacatcagcagaagaaatgagatgcctcagaatccaatcttggaagacgatctttgatgtgtgggaaattgattttatgggtccattcccatcttcatacggtaacaagtatatactagtcgtcgtagactacgtatcaaagtgggttgaagctattgctagtcctaccaacgatgcaaaagttttgctgaagctcttcaagaccataatcttcccgagatttggagttcccatggtagtaatcagtgatggtgggaac

SEQ ID NO: 35875 - DNA, 1925 bp, Arabidopsis thaliana landsberg
  unsure (1)..(1925): unsure at all n locations
ttgttcttcattttcttttgcaataagtcgttgttatgaagtgagtaatccactggttttgactatagaaatcaaattgctacagaatatgccggtggtttctctggctaaggttgttacttctccggcggtggccggagatttagcggttcgtgttccgttcatttattggaaacgactagtgtcgaatcgtgtttctttcgggaaattgaggcgccggagttgtataggtcaatgcgtaagaagcgaattgcaaagtcctcgtgtcttaggttccgtcacaggtttgaaatgtagacgttgattttgcttgttatctgggaaaaattggtgattattgtgctaatggtgatttgcatttgaatagatttagcgttggataattctgtggagaatggtcatcttcccaaaggagattcatgggctgtacacaaatttggaggaacttgtgtgggaaattctgagaggataaaggatgttgctgatgttgttgttaaggatgactctgagaggaagttggtggttgtgtcagcaatgtctaaagtcactgatatgatgtatgatctcattcacagagcatagtctcgtgatgattcatatctgtctgctttgagcggtgttcttgaaaagcaccgagcaactgctgttgacttgcttgatggagatgaactctcaagtttcttggctcggttaaatgatgatataaacaatctcaaagcaatgcttcgtgccatttacataggtactgttttctgttttctctttgtcaatgctaattttatattgttaggaggaggtattaagtagttgacttggattggtatgtgttcttctgaaatcttattcctcctgttataaactcttctatttctgcagctggtcatgcaaccgaatctttctcagacttcgttgtgggtcatggagagttgtggtctgctcagatgttagctgctgttgtgagaaaggtattaaagttatttatgatgtgccgcaagaaaatcctaattccaaagaactagtcgttctgtgttttacctttcttatatgcttgtgtcttttttactaatagagcggattggactgcacttggatggatgcaagggatgtgcttgttgttattccaacgagctctaatcaagtcgaccctgactttgtggaatcagaaaaaagactggaaaaatggtttactcagaactncgcaaagattattatagcaactggtttcatagccagtacaccacagaacattccaacgactcttaaaagggaggggagtgacgggtctgtagctattattagtgctctgtttacatctcaccaactcacaatttggacagatgttgacggtgtgtacagagcacatccaaggaaaggtatgcgcaagcctacattaactgtcatatatgctaggactagttattgagccatgatatgtgtgtgttcctcatcatgtttttctatgttatgctaatgaatttgttgcgatgcagttagtgaagctgttgtgctgaagactctttcttatcaagaggcttgggaaatggtaaatttccaacctcttgcacttgtttaatgcctagtttttcaaaatcgttgtttacacctaacattcatgttcatatgcctgcgcagtcttactttggggcaaacgttttacatcctcggaccattattccagtgatgaaatatgacattccaattgtaataaggaatattttcaacctctctgcccctggaacaatgatatgccggcagattgaagatgaagatggatataaattagatgctcctgtgaaagggtttgcgacgattgacaatctggctcttgtcaatgtagaagggtgagctgatagaggatatcgattacatacttggctgcttattgtattttttaacacactttgcatattctttatagaactgga

SEQ ID NO: 35876 - DNA, 1040 bp, Arabidopsis thaliana landsberg
ctcagacaaaatgctgacttgtatccaagatccggtgttaaaggttggaagaacacccacatacttctctcctttgctgctacaattccaagacccatttcagtgtatggcaacgtaaaatcaacatacatcgatctatcggaagtaattgtaatatctcccacagcagcatcatatttgtctttctaagggatgcaacacaaaaatttcaatggagttcattcagttcccacattctacactgatgaaaattttaaaaatacttgttataatataaaacacttaagtaagacatgcttagtacctggctatgaagtgcatatgcaagattgtcgtagttacttccattgagccaaggtatatactcaacttcatagttgaaaggactaatggatgcctgaaaaacttctatacagaacccttcaacaattaattcatgtgttattggatcagtctccactttcatcagtcttgggaatctattgctagatgtaacaagaaccctaagcttttttctatcgctatctattagactagtccctttcggactttgagcagacccacctggccagattatggtctcaagcttgttatgagtagaagataaatgtcttctattactaaaactaccgttagagttcaagaaccctactcttctctcacttgatcctatcatattgataatctcaaacttgtttgataacaacttcttatcatttagttggaaatcaccactcaaaccgttaaacctagtctttgtgatttcctcaaggagagttgatgtcacatttggcatccttataacttctgctgctctcgccagagcaaaagcgatatcgtgagcccatatgccagagatactcaaccgagttagctccgcttcttcaacaggcaatgattttctccatctcaaagtgaaattttgaagctctatagacattggaatgtaagacttgaaaccaaccacaccttccattgcctgaattgtgaaatcatcaatgttctcatggaagctgttcatagtttagcgagtgagggtc

SEQ ID NO: 35877 - DNA, 5253 bp, Arabidopsis thaliana landsberg
  unsure (1)..(5253): unsure at all n locations
cgaactcaaaacaatagactttcccaaagtccttgaagatttgaatattgggcacgtccagtgtggtttgctgcgcggagaaggaacaatacttgaaaaccatcttcattaaccggtcgttatatccggttatcgcatcaagaccaatctcccaacagtttttgatgttcaagatctcgagaagaggtgtctttgctatcaaagccgataacatctcgagacggatccagcggaagaacatggttttcaccaaacccggtttcgcgagcctcgatggttcaaaccggcaaccgaataacttcaacgtcacgagactggtaatcttgtaaaaactctccggtaatttgatcaaacccggttctaattgtgcagcgtcgttattggtaacccaacgaggttctgagaggtcaagaaaaagatgcttgacattcttggagacagcgaattcgatcagtgtggtgaccccttcttcaaaagcatacgaattagagagacgaagctcgaagctttcaacaactccaccggtaaaattgttaacccaaccaaccatataggcaactaatgcagccctttggtaatagcgagcaacggaatcatcagcgaatgtcacgatctcgtcctctctgaaagagatgtttttcgcttcgcgacatatgtgtcttcagcgggtggaaaggcgactggtgctcaagccctccttgaaggaaaggttcgaaatgatcaggacgagcaggaagtctgaaagcgtcaaaatgatgtccactgcacttcctgagtccattgttaatgattttggagtaaaagtaatggattcaggaagagaataatgtgtgtggcgtgagggaaaacagtgctcttccttgtctttatatatattttttaaaggttgcgactttttgttcgtttggcggttctcgtttctctaaccgctctttttacagaggttagggtttgtccgttactcattgaagaattgcaacgatacgcattttctaattaattcacaaaagccatatttaattaataatcgaacccgactgggccgataataaatttacttataataggctttatttttacgacccaattaattaggcccactaattattgcggttaaggaacgttgactttaagtcaaattagagagagcacagtccagggactaaagtgggtcccttggatttcttcctctcttcaccgatttcttagatcttcgaaacctctctctctctctctctctctctctctcgcattctcactctcgttcgtttggtttttggatcagtgtaagcttctccattattttcggattcgcttccttcgtagtttgttcgtttgctctgatttgtaatcgtagcttagtttccgtagattctcaaatgataacgcgctttacgagttttgggtgtgactaggggtttctctctgtgttttcttattcctcaatgttatttcgaaattgaatgctacagatacagagattcaatgagctgttttggctgttgccgtgaagatgatttgcctggagctaatgattatggaggtcacaatatgaccaaacaatctggaggtaattttcagttactgtctctcatcatgttcttaaattattaatctctgctaatttgttttctttgatggtgggagtgaaggaaatgatggaaggcgcaacggctctgaaactgcacaaaaaggtgctcagagtgtgaaagtgcagcctatagaagtagctgctattctcgctgatgaactgattgaagcaacgaatgattttggaactaattctcttatcggtgaaggctcgtatgcgagagtgtatcacggggtgttaaagaatggtcagcgtgcagccattaaaaagttagattctaacaaacagcctaatgaagagtttctagcacaggtttggttaatatagataggttatttgttgatggattatggacttatggtcccactttacatgttgaatttgggaatgaatcttcaggtttccatggtttcgaggttgaagcatgttaactttgttgagctgcttggttactctgttgatgggaattcgaggatacttgtctttgagtttgcccaaaatggatctcttcatgatattcttcatggtaagttactaatgtaaaacatcgaaggaagatcaataccatttttccaagatcttcagaggagaaactaatgaactgtggtgaattcactggtgcaggtcgaaaaggtgttaaaggggcacagccaggtcctgttctgtcgtggcaccagagagtcaaaattgctgttggtgcggctagaggactcgagtacttgcatgagaaggcaaaccctcatgttatccacagagacatcaaatccagcaatgtacttctgttcgatgatgatgttgccaagattgctgattttgatttgtccaaccaagcccctgacatggctgctcgccttcactcaacccgtgtgctcggaacctttggctatcacgctccagagtaagctcctttagagatatcatttatctggaacagtgatattttgatttgtttacactcaagtcgtgctgagaatcttttgttatcattatctaatgttctgatgcactaagtccttcacttggactaagctttgataatcatattttcatacatttacacttctgtatgtcttgcatttcttcccattgaccaaactagattcttaaacatatttggttctgcaatttaggtatgcaatgacggggacgttgagcacaaagagtgatgtctatagttttggcgttgttctgctggagctcctcacaggtcgtaaaccagttgatcataccttaccacgtggacagcagagtgtcgtgacatgggtaatacatcggtctctgcttcttcttctggttgactcatatttataagaaaatcttagaaaatacatgatttattcagtcaattaggagaatgaccaaaaaaatcctctagcaacttcgcaacacctctttgcatctatagaaatcattgatttggtgtagtcaattcttttctagaaagaaatttcttaaactagaatttattaaataagaaaaaccaagtgccaattgtttttttaagaaagaaattttcctggataaaggtgggtttctgtacgtgaagcctttctgaagcaaactctgcttacttgtgagatattagagactctgaactttccctatagacaaaaaccagtagtcaatgataacgcttttgtttgtctcaggcaacccctaaattgagtgaagacaaggtgaagcagtgtgttgacgcaagactaaacggagaatatcctcccaaagctgttgctaaggtaatttcccccaaaaccttgtcatacttctcactgttgcagtagaaaaggtttaccttaggatttgactacttctccatccgttgcaccccgcaatcaactacaacagctaaaacttgtctgcctggttgaaaaaacaaaaatgaatttgatttgattccctcttgatgtgttgttccctatgatatgcctagatttgcaacccaaaacctcgagtctgattttggttttctcttatgactcattgtgatcagctggctgcggtagctgcactgtgtgtgcaatatgaggcagacttcaggcctaacatgagcatagtggtgaaggctcttcagccgttgctcaatcctccatgctctgctccccagactccacacaggaacccgtattgatatgctccagtctgatatcaccctttatgatcatcactatttcatttgtttttgtttgaatccgatttgtgtaaatttgtgaaataggcgtttattctctcataaaccccctgccacttcactgaaaatcttacttggaaagacctgaatgttactgtatttctatattatttcatgcatgtgaatgtgatgcaagtctctactaatgctacgatatgcgaggtaaagatataccaatactctgtttgtgcgtctgtctgtacaagctcaactcttttcgatcttgaatgcatcttaatcactaaaggaattattgggaaaaaatctttaaggatccaaataaaatttatcttgtaaaatatgtctgtaactgactctgtatgaaggtaataaaatgtgcaacaaatctctccttctccagacaaaagaaacaagtcttgttcttctctgtatctatatatatcacataattaacttatagacacagtaaagaatctaaacaatctccaaagaatctaaaagttttccttgtttttaacccttaagtcataaaggagggtccatgtttctgtttcttgctcaaatctttgcatctgttgttatatcattatctttattcgtgtctgtgctttctctatgcgtctctgcgttctgatttctccttcttcttcgttcctgatcaaaacattcatcaaaccaattatgaacattctagtttccacagaagaaaatcagtttatttctgcattgtttgtcattatnnnnnnnnnnnnnnnnnnnnnnnnnnnnnnnnnnnnnncaagcattcgagccacttgactcatctttggcctcttgtctgcatcaggatcaacgcatcttaaagctgtcaaaagtgctcgtttaagttcgcttgttgttggtttgatctcaagctctttatccaccacttcctcaaactgtttctgttgaaccattagctttaaccactccaccatatgcacctaaaaacacatttcaaatttcaagaatcaagatcaacctctgctttcagagtattctacaatctagagaaagatgaatgttttgtatacctcttctttaggccgcgcataatccactggataccttccagtaatagcttccaagagaacaacaccatagctgtacacatcgctcttttcgtttaggagaccagagnnnnnnnnnnnnnnnnnnncatacctgaacattcatcaatggaacagagaaatatgcttcattaaccaatgcagattatgaaaagtaaagttatagctatagcatacagtttcttactcacccgaatgtacccataactcgagtactgacgtaatttgaatcagctccaagcaatttagcaagaccgaaatcagataactttgcgtcaaaggtgtcatccatcagaatattgcttgattttatgtctctatgcaccacttttggctcaatagcttcgtgaagataagccagtctgtgtaagaaaatgcatccacactttttatgagctacattactgaaaacagtacacgatcat

SEQ ID NO: 35878 - DNA, 2317 bp, Arabidopsis thaliana landsberg
  unsure (1)..(2317): unsure at all n locations
gtacaccaaacgatttgtcgtttaaaaccaaaattatactttccatttaatcagttcagggtattttctttagacggatgcaagtggaaggggtttagtttaaatgttttattgatacttgaacttttttttcgtggaaataaatctcttgtagtattgctgataaaatctgacaatagtttattacatatctaataaacgcatgtttatataaactatataaaaaaagactgtcttattaattattaactcgttacaaacatatttcaataccatttattgaaatttggaacaacatcaactaaaaacaaagaaagcaaataaactgccaacacacgaagatcaatcccaagacacatattagtaacattcataaagtttaatattcatttccacacaataatacttactgccttgagtgagtttggtcttgaatgtagcgatcccacgagtcatgaggaagtcaccagtcccaccttcgatcgttagatctttggccggctgcaaaccaaaaggatttgcatccattatggaaaatgtcccttcgtgctttgtcgatttgaataccaatgtccaagcgacccaagcgttgtcatttgtcttcatgttgtaaaagtagaagctttgggctctagccacgggtttcgagagatagttctggtccattgtcacagggtcgtccataatcacaaacttcccaaaactgaagtctcctagtcctaaagggttcacaattgctgctgacgttgcattagccgcgttatcaccatcgtacgcaatgtcatggaggtggaggacgaaacgcttgcatggtttcgctaggtctagtgatttttggaaagatgaaaccgtatatgattggcaaagtaaaacagacaagcagatcaaggagaataagtagatttggtttgccatcgttagaatgttaagtagaaatgagtaagtagtagtgattttgtgagtgaatatgaggctttggaaacctttatttatagacatgattcacatgctttcctatttttgaattaaaaataaaaagtgattttgtgtggctcacccatctaaacatgttattaaaattagatacttatatataacatattcgattttatatgtttactatgcaaaactttttagacataaattttataagatttaatcttctaaacatcagatttttcggatatgtaagtttctcgaagtaactcattttttattcaaagatcaagctggttcatcgagtaagagttgctggatttttctgccgattttgtttcatcctatttcttgatttctccagctattttcctgcgtgtaggtatcatactctatatagtagtctgtacaatattaaataagtatgccatcacttacatactacaaaatgaatctgccataatgtacactaggatcgaacccacgtaaagaagtctattgtttagattgaagacaatatgggttaaacattctaaaaatgaaatagttctacatagccgaatcctaatataaagcaaagcataccaaaaactgaaatacatttggtttagtttattacccaagacaatcttaatgcaaatatttggatggaataatcatacacatgagagatctttggtggaatgatcagatttcttacttagctgttaagatcgcttacagccttacatataatttttgggaaaaatatactcatctacacaaagtataacagattacatggccacacatgacaaatttagatatgtatagctaacaacacgaacttaatgtattgtatgcccaaatttaccaattacatgacgatatgtggtaaacatcacgagcgggttattctggtatactaatgacttaaatctatcattgataagtgttgaccagcagtgaccacaattttttttttttaatattcgaatgaatcgtttatgatgttgtataattaaaaacaaaacacattttatattcaacataaatatattttgtatgattcttctaattagttatttctttcaaaactcaactaaaagtgaaataaaaataactttttttttattttcatcacaaaaaattgagtatatgacacttaatctaaagtttgcatggtacaaaaaaaaacaaagtttttattgttaaaattaaaatttatattacatagtttaaaaatatagaaatttttacactctttagtcaaaagtnttttatgtataatcttgtattaaaagtattaagaaaattctcgtaatacagcgtaaacaacaacaaaagtggcaattttttctcttaagttataagagatataaattctataatatgatttagc

SEQ ID NO: 35879 - DNA, 865 bp, Arabidopsis thaliana landsberg
aaacatcttcgaggtcaccgctaagtataagcctccgatcatttctattggcaagggtgcttatggcatcgtttggtaatgtttctccgattcttttgatttttggcttttgcttctaattgaaataaaaaatgatttttgttgattgggttttggtaaagttggttacttttgatccgcaatttgtaaaattgattcctttgtatcgtttttgagctctaattatgattgggatttatttttgtttcaatgaaagctttatccttttgtggttttatttgattatgattctgcagttcggctatgaattctgaaactaacgagagcgttgcgattaagataattgctaacgcttttgacaacagagttgatgctaaaagaactctccgagagatcaagctcctttcccacatggatcatgacaatgtaatctcttcttcttcactttgatgaacactcatatagttggcttattacgttcatattgctacacaggttatcaaaattaaagatataattgagctaccagagaaagaaaggttcgaagatgtatatattgtttatgagttgatggatacagatttgcaccagatcattagatccactcaaactctaactgatgaccattgtcaggtgatgatcagtggacacattcctaattagagcttttacataatgtttcctaacatttagcattgtttgatatacttttttgttgtctccagtacttcctttaccaaattttgagaggccttaagtacatacactctgcaaatgtccttcaccgccctctgaaaccgagcaacttggtactgaatacgaaatgtgacctgaaaatctgtgattttgggctagcaagaacgtc

SEQ ID NO: 35880 - DNA, 881 bp, Arabidopsis thaliana landsberg
aaattttaagtctttttgtccctcccttagtacaaaaaaccaccaaatgactttctcaaaacaactcttcctttacctcttcttcctcttccctctcctacacgcttcacacccacaacaatgctcttcctcctcatgcggtcgtgatgatgtccatgtccgtttccctttctggttactctcaaaacagcctgagctctgtggccatgccggatttaatctccaatgcacagctagtcccaagacagctctcaagctttctaattccggaacatttcttgtccgagagatcgactttttaagccagcacattcgtctctatgaccctgaaaattgcttggcaagaaagcttttgaccttcgacatatcaagatctcctttctctgctctctaccctgtcagctacacgttcttgagctgtcctaatgaggttgcaaagccgtccaggtttgactccatcccatgtctaggcaattcaacgacctcgttcttggctacaactagtttggatctcgcgaaatctatgctgccttcttgtcagatcgtcaagacattagatgttccggtttctcggcgagttattgccaagaaatcaagattctcgactgatgtcaacgataaagacctttggctgaaatgggattctccaagttgtagcgattgtgagagggattttttgagatgtggattcagaagcaacacttctctccaagtcaaatgctttcccttttgaaaattccggtacaaattactccaattctttctcttcttagttcttataacttacattaattaatagttaccaaccacgacgaatgagttagtcttcataaaaaaagttaaaattggaggaatctttgattatttggggttttcaaata

SEQ ID NO: 35881 - DNA, 2433 bp, Arabidopsis thaliana landsberg
ctcttacgatttaggcaattttatcaacagaattaaaccttgggtttgtgagaaaagatgtagataatttcataagctttccagattgttaaagagtgcattcatatgaattatgaaactccagttatgtttgttttactgtggctgtttctgttggcctgacagaaatgagcgggtctgttcactggtaggtttcatcaggtaaatggccgaattggctctcccagctatggagacttttgtagagggataaaagttcttacttccagcagaacttcatgatttttggttgagtagtttgtgagatatcgaattttgaatgttaactatgctgctgtctaaaacagattcagtcagttatcttatcagatgttttagaacatatagatggcagaactaaattatccattgaataccgaagttgtagagtattttgtgtagatactgctagagtatttgtttgatatcaccacttttataattttaaagatacaaaattaacaaacagtgctgctgctgtttggcatgtggttaagagtgggaggtttccactaggtcttggttcatgtgtaggacgatttgttgattgtggcaaatgtttggaaatatttgtactaagtttatgcccactagcaggtggtacactccagatcatgtctagtacatttcttcttcttcgatgaaggcaagtgaatgtagcggtggttgcttccgttctgacctgttatttctatcgcctacactctaatattcagaagtatcagattctttcataattggactctatggtgatgctttacttgcttgcattatattgatgctcaatcatatattgatgatgattatgatttgagtatgactcatgagattaattcacacccctgaaggtaaatgaagtattatttgaggttggtattgtatctgaaggtaaatgaagtattatttgaagtttgtgttgtatctgaaggaagtgaagtttattgataaatgtagcatgccatatacattgcatgactcatttgcatatgaagttttgtcgtgacctatggtccgaccgtaccggtacaacttagtatcgtacgttgcccgagaaggggtacgatgcggcttcatacccttagaagttattgaaggcagaggacatatgcattgcattcatatgcattcattgaagtgatatttgcagatgatgtggttttatacccatagaggtatgaagatagagtacctacacattgcattcctatgcatacattgaagtgatatttgcaggtattgttgacgcagggaagtgttatagaacctattgtggttgttcgaggaaatgagatggtattggttatagtgggactactgagttctatatctacaagcatttctgatttttaattgtgactcttttaaaatgttgatgaattcaatttgtggtttaaatatctcgtcagaacaattagcttgctgagatgtttcatctcactcttgcattactcaatgcaggtgcttgttgctcatcaaggggagtgggaagtagcagcacatccaccttcactctcataataatgctgcccagacacagtcatgatttaattataaacttcttgtcaaaggatgtttgtttttaactagtcgtgcacactgattaattcagttcatgttgttatggttgtcttcccattgctagcagattattaatgtcttttatgttttcttatcatgatatctatttatactttgttgcatccccgtttatgcaattttcaaaggagatgatgtcgaaattttatatatgaatgttagatgtgtagtttagtagcattctggggtgtttgtggatcccggggtgttacagtacaagacaccggatcggttttgggccgaggcggtcaacaccgctttacgccatcaaccggttatatctacaccgaatcctcaagaagacatcatatgaactcctaaccggtaaaaagcccaacatttcatattttagagtctttggtagcaaatgctttattcttgttaagagaggtagaaaatctaaatttgctcctaagactgtagaaggctttttactaggatatgattcaaacacaagggcatatagagtctttaacaagtccactggacaagttgaagtttcttgtgacattgtgtttgatgagactaatggctctcaagtagagcaagttgatcttgatgagataggtattgaagaggctccgtgcatcgcgctaaggaacatgtccattggggatgtgtgtcctaaggaatccgaagagtctccaaatgcagaagatcaaccatcctcctccacgcaagtatctccactgactcaaaatgaggatgaagctcaagttgatgaagtagaagatcaagcaaatgagccacctcaagatgacggcaatgatcaagggggagatgcaaatgatcaagata

SEQ ID NO: 35882 - DNA, 470 bp, Arabidopsis thaliana landsberg
ttgggagtaggtattgaggaaaatttctggttatgatccatgtacttagagatatgcagagatctattataaccgggctgatgttcagaaagctcttcacgccaacaccaccaagattccgtataaatggacagcttgcaggttcgtaccaaaattgagatagtgttaaatatctttgttgaacaataagttggttttaaagttagaattgtttaatttttgtgtggcagtgaggtgctaaaccggaattggaacgacacagattcaacggttctccctatataccgggaaatgattgccggcggaattagagtttgggttttcaggtctgcaaatttttgcttctttctgaaaaatatcggtcgtgccaaaatttatgactgactgtcataacccgtgataactttttggttaagggtcagtggagacgtcgattcagttggaccagtgacagctactagatactcact

SEQ ID NO: 35883 - DNA, 5275 bp, Arabidopsis thaliana landsberg
aaactgaggtacatagcaggcaaagttcgagaagacgctttccagacacaaaaaacggcaaagctcaagatgacactttccacttgacataagatttcttctttacgccacttgaatccgagatcggaagctatcttctggtcttctttcctcacttgaaattgaaaagacttcgaaatttatattcttaagcatccttaagttggcaaaacggtgaaacctcagtagaggcttaacaataccgtttatggaagcctgggccggaataatcgagtaaatcgacatagatccggtaagaggagccaagaactgatcagatctcgcccagatctgagaattagttcgagtggaggagacctaaaactaggccgcccaaaaccgattcaccacccactgcaagaaccaaggatggttacgggccgatacggttagagccatggaaacttctgacggaagaagaagagacttgtaaaaacgaaaactctttaatttcagatctaaaactaaaacaaactgaagccggtcggaatgaaaatccaccggaaacaaaagcaagacaaaaagccgactcaggcgctgtgaaagccgcccaaagccagaggtctgaacttatgattttataattcaacacactaaaacaaacttggagattattcaagttataaacatgcatttggtaactctgatgcatttgtaaagataaaaacttgaagaacagagcatttgttggctggaaaaaaacagagaggtttaaattaagaaaagtcgtaaacattgttctcctcccctgccctcaaatctcacagatattatgactgcgggtttatctgccggagtgtaactcatgtaactcccaagatggaattttccggctaagaaactcggaaataacgttggcctccaatatcttcaaggcttcttcattcgtcaccgacctcggtgtcttgtactgactcacagaagagcctctagacagaaagaagttcatgagctcgtcaaaagcgccaggcttaacaaccttaatctcaagtggtccaatgttcttatcattctttcgtccttttctgtatacagcatcgagagactcctcaacagtgaagcagcattcttccataacatcgcggttaggttcaaacttggcgtccttgactttgctcccgagttcccaatagagtacatagtgtcctacaaacgaggacgaatccacacggctagtgaactccattagcatcaggtcatgtggctcgagcaggagctttgcgtttgtcactgccttaaggaggtcttcgtcgtaggtcttgtccatgtcgatgctcagaacaactttctgtcttcccacgaaatgaaactgtggcgcattgttgtagaaaccagtcactcttaaaacgtcccctaaacggtacctatacaaacctgtcaaaccatatggagatcttgagagagacattttgatacacattaagaaaattattaacatgtcatttagttttgaaattgagagagtaaacaagaaaaaacacttaccagcaaacgttgtgacaacaggttcataatcatgaccgattttaacatcgacaagatcgacgaccacaggattctctatgggatcaagaccagcttcttgttggtctttcttgacctctaagaactcgaagtacgccatagatgggatgatggtgtacgacacatcgctaggcttgcacagaggattaacattgacacccatgaaacattcagagctgccataccacgatgaaatcaacggaagaccaccgccatagaattccagcaacggaatgtactgtgccatggagcctgtaacgacggcttcgacgcattttgcttttggccaaagtctcttcactattgcctcccatgaggttttactgcattcttgctcgataaggctcgctaggtccggatttggagcggtgaggaacttactaatccctgagacacattgagggtctgtgatccagtcactgagacggccagtccttatgtttgagcataactcttgccaatgaccttccaagtacttgattactctgatgaagacagaagcaaagggtgcaccgaggcgagctacattatctcgttgtagaagcccacaaagcaattgacagtacatgctctgagtagtgtcttcacaagtagaaatcgcatgcgggcttacgtacaatctatccctgcaagtaatagaacaaacatagtaaagaaccactagtagtaccaaggggcttgtttgttaggcactttggttaaatacttgtggaaagactgaatttatgtaatgtaacgtgcaagtaagggttttattgactaaccaaagaaatgagttggtctgtttaatgcttttcaaaaaactagtaaccatagtcctgaccatcaacccattggcagtcttgctctctcgggtcacaaaataaaatatgagagattttccttcgctaagcccatcgatgtgcctgcaaacagtaacaacaacggactcggggttttactacttactctttatggtatcagcaaagagacaaaactcggagttttaaaactctttacttgtagagtagaggtgcatagagagaagaaaacgaaatcctctgttccaaatcctctgttgtcaaaggaatcaactttggaactcctcctgaagtacccgagctgcaaatacaatggcttccttaaggcttttcagattttataataaattatactttaatttaatctacactatcatgtataaacaaactcatgtgtcaacaagttttgaaccaaatgggtcgaatattaggttatgtaagagcctagatttcaagtttcttctgaacttcaagtcaagatcttacatttaactttaacatgcaacctttgaaattgttttgaaggtacctggtcaagagtacactgatgggttgatcacagatgagatcagacggctctccattagcaatacggtcgatataagacctaatatcttcgtaggtcacaacgggtacgtttttcttgaagttctgcttatctttaagtaaacctctaagatactcagtttgagcattacgtgaaagtattgcttccaatacggaatcttgaatctgctttacgttggtggtcaaatcctcaagacgagacagacaagctttttggtttgttggatcgaactttggtaacatgcttgcttactgctttctattgtctgcagaacctcagttctggatgaccttctggcccctctctctcgaagcttcagaactatggaggagagattggataaaggagacaaaaggtgtggtgtggcgaaatgttagggtaccggcaattttgtatgtatgagttgattttgttcttttctcataaagaggatttaacaaaggatgagaaaacaatttcattcttgagtactacgaggagataaaagcttttattgggtattgagtattgacacgttgttgaaagtctgatacattttagacttttagtgcatatgtccaaatatttagatttttttttcgtttctcaaaaaagtaacttgtttaacaaaaaaaaatcgttattgggcttttcgtttcttttatattggaccttgagcctttttagctttgtattttttattccttttcgtttgttttttaattaataagataccaaaaaacataacaaaaatgtagttttgtatttttaaactagtcttttaaagtcgacaaaaaaaaaaaaaactagtcttttaaatatttaaacttaattagaaaaatcctatttaagagaatataataaaacatgattttgtgattttctcatattttgtgtaactatttttgacaagcttttgaaacaacaaagacaaaatccatgtgataaggtcagtcaaaaatcttgcgtagtagaggagttaaagattttggatggttacaatggtatactcttatttgatatcccatcaatggtatatagctttgaatggtaggacaactgagagtaaaattttgctcatcatatattgctaagttttattttaggttctacattgtttcacccatcttaagtatcctactctcaactagaaaaaaaaattgtgagggcggttttatcggctggagtgcagctcatgtagctcccacgacggagttttctggctaagaaactcggacacaacgttcgcctccaatatattcaaggcttcttcatgcgtcactgaccttggagtcttgtactgactcacagaagagcctcgagacaagaagaaattcatgagctcatcaaaagcgccaggtttaactaccttaatctcaagtggtccaatgatcttatcattttttcgtccttttctgtagatagagtcgagagactcctcaacggttaagcaacattcctccaagacattagatttgggatcgagcttggcgttcctgaatttgttaccaagttcccaatagagcacgtagtgtcctggcaacgaggatagatctacacggctagtgaaatccatgagcatcaggtcatgtggctcgagcaggagactcgcgtttttcactgccttgagaaggtcttcttcgtaggtcttgctcaagtcgatgctcagaactacattctgtctccccacgaagtaaaattgtggcgcattgttgtggaaaccagtcactcgtaaaacatcccctaaacggtacctatacagacctgtaattcacacatgcatcttgtgagaaaaccaacatatagatttttgagatacattaagaaaccaagagagtgaaaatatttaattctatcatttatagttttctcaagcaagcaatataaagactttttaaaacaaaaccctaaaactacatttatttgaaacgtagagtacaagaaacttaccagaaaacgttgtgacaagaagttcataatcatggccaattttaacatcgacgaggtcgaccaccacagggtctgagggaacatggacagcttcttgacggtctttcacgacctcaatgaactcaaagtaccccatacttggaatgatggtgtacgacacatcaccaggcttagacagaggattgagattgataccgatgaaacattcggagctgccataccatgatgaaaccaaaggaagaccaccgccatagaattccagcaatggaatgtactgtgccatggtgccggtaatgacggcttctatacattttgcttttggccaaattctactcaatattgcctcccatgaggttttactgcattcttgttcgatcaggtttgctagatccggatttgaacaaataaaaaagtt

SEQ ID NO: 35884 - DNA, 9978 bp, Arabidopsis thaliana landsberg
  unsure (1)..(9978): unsure at all n locations
ccatttcaacttcttatacccaaacctctctatcaaacgcgtaagaactctcttcttctcatcgttaccgcaatagaaattgtctaaccagaacaatccaccgggtttcaagatccgatcaagatcaaacatcaagaactccagcttctcgggtttactactaaccgctaaatccaatccgttagaagcatgaatgagatcgaaaacattgtcatagaacgggaatctctaatccaaactccctctgaacaacggaaaaatccctcttgtagctatgaattcgctgaaaggagcatctatattcaatgtattactgataatattcagattcttttcagccattctagcagcaaacgtgcctgatccgctgctaatatcgaatccgattcggattttcccattgcctaaacccaaaacatcatctatcaggaaatcagtcttcactttaaccttaacaaacctatctttatcatgaccagagctagatcaaagcaaccaacaaaatcccggctcagttaagacctttcaagcattcaaaacttttgcagccaagaccgctccagttaacactattgttactgaccgttctccacaaagaatcaggaaacagtgcgagacctggcttatgtactgttttagcttcaaattctacaggaagtttgtgcacaaggagcctatgatacaagtaatatctgcatgtcaaaaagatttgtagccacccatgttttcataggatagtgttatctgcatgtcaacttactgtattaacataaatggcattatgaaaactggtgtagtgtgaacttaacaacagctggtgttcagggattttcatcagaaccagggcatccaccagatgtacatcttcccaagattctcaagtgagactgcatcggcaatcaaccggcgagcctgaccttctaccggtagcggaacaccaacaaccacgccctgcagccgggcttcaatgctgcttatggcccgctgtaattgccaaatcatgtggttctctcaagcaattagaaaaaaaaaaaagggtaaatgaactgacatgaaagagaatcattagatgattatgcaaacctgagcatgtgggttctgaacttctaccccgcttgatttgtgtgactttgtccactccacaagaggatcatggatgaatgtctccaggatgctcatcaacgtctccctatgtgtcctcaacactgtgagagtgatttcacataccctcatgaagatgccctcatatccagtgatgcccaaaccatcaatcatgttctgtggtttggaaaataacaattcactattatgacaaacgaaaacaaaataccaacagaacacaaacaaacgattttgcagtttcttgcctgggtcaatctgaatggcaccaactcaggcttctccagttgtaagcctttgtcaaataagcaactgaagtctacatgaacacaatcacctgaagtagaatcaaagagaatattttctccatgacggtcaccaagcccaacaatgtgcccaaccatggaccaaactgctgtggtgtgagcataagctacacgtgacctaaaccaagcagctggttcagaaaacgttgtcaagaaccatttatggaaaaccggagggaacatagggaggattttggtcttcagcatctcatactcctttttaacagcacattgatcatatattcttttaatttgaggatttgttttctgccgatcaaacttcccacaggaaatgtatatatcttgtagaatatggcggagtccacgtgtatgtggaacccactcgaccagaccacagtcctcagtcagaggagctactgcgaaggtgcggatatatagcttccttcgtctgctttcgggatacttggatagtaagcggtttatcatcgcagtaaattccatcatccgagcatctttcctgagatcatccttgggcttgcagaggaatggatactcaataccatcatttcccagcagaatgatctgaatataaaaaatataatctattggacatgcatattgcaggactggttcttgaagataaactgatcttatgccatggtataatgcatattgggagacatataaaaggagatataagcagagagcagagcagaaaatcatatgaaattaggttgacagctttcaatccatgaaaaatggaaaagcataccttctttgggcgctgaagggaagaaagtatctcggcttcatcggctataccagaaatagttggtagatctgaaccagaaaagacactggcagagtgtcgttcattgttattcatatggaatgctggtagactaatggtaagagattgttgaattggcatgatgatatccagcggcatcattcttttcaaggcactgaattcagttgctatattgataaccttggatcttggttgtcctccatggaagcatagtttaatgaaatgatcagttaaactagcaaactgaatgaacaaattgtggcctctgtcactttggttaaaaccttttcgtgcaccttgtatgatttctgcagctgcttcccttctagcaggaacagtagattttgaaacagctgccataatccagagcccttgctgaggaaattgatgtagaacagaagtgatgatatttttaaccattagtactgtatccgcattctggtgacagattcgagaaaccaactgaggcaacacagttaaccattgataggttggcagatcctttaagcagcccctcattaaactcattatctgccaaaagaaaagaaaaaattatatatgaaatacgagaagtattaaatagaaaaacagctatgagaaacagtccataatcaccaccttcatatgagtacttttcaattccttatttcccgctgagccacttgttttatagatagtaccaaagtcaaaccacagtgttaacaacctcggaagtgcttgaaagagattcttgtgtccactgtgaagtgccttagcatagaagtacattcccttaaacaggtaatcccaccctgctttctcagtgcttaagttcgacgagacagatccttttttactgcctgcagagctcaatacagagctctcttgttgacactttcttgcatcaacatatagttcatcataatacttagccaaatggaaatatcccttctcccagggcagcaattccttgacttgggtatacagatttaaaacatctttcttttgtttctgcccactgtgatggatccatttggaatacaaaagaagagtctttgcgacatcttttttttctttgaaagattgtgtgttacgaactgtgggctctggatttgggggagccatcagtaagctattgatcgaagaaattacagtggagtcaacaacaccctcaggcatattcaggagagattgttgtagctctataattgcactgtctgaacgcttagtgatccaaagaagtttcgccttttccatgtgaacattaggtgcaccagaagcctgagcttccaaaattgccctgtgagctgtctcatagtgtccagccaaacggcaaagctttgcatattgaagccaacagttcccaacttgagcaccaagaccagaggcaccaaagacgagtcttcggaaagctaagagaggttcccttgtccacagtgatgattgagtaaatctgagccgattctcccagttatctactgctttcgaaaacacctgatcacttgtactaaatgatttctccaaatatgaatcccctttaagaaccggctggaagtcctctagctctcttagcaagtgaagtttgacaacaaaaggataagctcgtgtgtaggagtccatgcctgctgcagctagaggagcaatgagagcttgtttggaaatagctattccctcagctacagagtattgatccttcttcatcattgcttggagaatctttgctacatctctatcgaatgaggcattgctgtctgagctactgaatagtaaaccttctgcatcagctccatcaagatactcatccatcaagtcccactttccgagtctccatgcagcttgtacaccttgtgtgcaccacgttttcttgtactcaggtactctggaaattagtccgtcaacatgagtgaccattgtctgatggtggcacatgttaagtaaacaattaagaacatctgaatgtcgttgaactgatgttggttccatctgaagggcttgttcacatgcagtaaaaacgtctgcccagttaccagatttcttgtttatcaacaattggtcttgcaaatttaatgatttgcttaaacttgcaaagcccgaaagaccgtcaggctcgtcaaggcagctgtatattcccatcagagaagaaacatcagcattttcaaagatgccggtcttctcagctgcgggatttaaggagcctgactttccacgtacatgggattcaaggtacatcaatgacctggcataagcttgacacctgaaagatgccctagcaagggtcaccttgggaatagctagcaaaagttccaacacatatttacattgtacaagaagatgatcctgttctgttgttgagtttgaaacctggtctttcgatttgggtgctacttgcctaccacctgatgactgcagagacgatgagagtgctactccctgcttcacatcgtcaacccattgcccaaggttatcaagaagcgtgaaaacagcttgaacacaaacttcactctgaccaacaccaaaactgtttattgtcactccactattttctgatgcagcagcatcaagaacagaaaggatctcttcagaaatgctaagccgtgctgcctcagtcccatggcaaacaacatccagaactaaatatggtaagagataagtagctgtctgcatatcgtgacgcactatgcctcggcaagcagcaaatatgcttacacgggatccagtgcaaatgctgtcaatttccttatccagtaggatagccaccttctgaatgacatagaaggccgataaattggtccagctgatccagggtcagacacatttggaagctgaaaccttgaagtcaagcagggagctattagttctttaacatagtttgagaaccgatcccatagtttttgtcccctatccttcacttcattgttacctccacatcttctagaaccagatacattgacttgtacatgctcctggggggtcaacacaacaacattcccagctaatgatggctcacaaccagcaatctttagtagttcctgtatggcaagagcagctgagtcttgtattattgtatcctgtgcagctctaaaagctcttgccaagtgtttgtgaatgagctcaaagataagatcattatctgagcattgaaagtttcttacaagttggacaaggccacatcattatgatcaatcaatagggaagagagttgtaaaatgatactctcacaccttcaatggcctgcagagcctcatggaaatgtgatttgttaaaattggaaaaattttaagttctgaaacttttgcatatactatagtaaaaatcggaaaatgttacattgggtcactatcgattacataaggaagaggtaatgtgaatgggcttgtagttacctaccaagtaccaaacagagcaaagtaaagaaaacaataaatgcaaaaaatctaattccttctatttattgaagaaagagtttttcaaatcttcaaagacattctgggtaactctgtcaccacagttgactgtctcatatccccacgcgctaactcccgaacgtcaaactcaccttcctccatctctaaactctgtgttttagccacgcgtgtaatcgcgtgagtaagaaccaccaacaatgggaccaacttgcttaaaaagatttatgggttttcgcttttattacacactctcccaaatccaaagaagcgtttgtgtttagatacgtggtggtgggcaaagaaaagaaccaaacacgccactaggagctaccatctctgttttattgctgcttctgcttcctcttccattactcgtcttaaaacaaaggagaaagagtcaagagacatgcatgcgaagacagactcggaggcaacaagcatcgacgcagcggctttgtctccgccgcgttcagcgattagacctctttactatgtacagagtccatcaaaccatgacgtggagaagatgtcatttgggtctggttgcagcctaatgggttcacctacacatccacattactaccattgctcaccaatccatcactcccgtgagtcatccacctctcgcttctctgaccgtgctctcctctcttacaagtccatccgtgaacgtcgccgatacatcaacgacggagacgacaaaactgacggcggagatgacgacgacccgtttcggaatgtgcgactctacgtttggttgctcctctccgtaatcttcttgttcacagtcttctctcttatactctggggtgctagcaaatcctaccctcccaaagttactgtaaaggtaataactactttcacttggtggtgactctgctctgagctgagttaactcgtgtagtggacgagtgttctgttttttttttccttaaaagaaacaactttggaaaaaagccaactatgaatataataatataatttgttttctagtgaagaagacaaaaatatatatttgagacaaatgtgtttggaatgtgattaggtgtcagactgaaaatgtgttgttgttgttgcactgtgcaggggatgctggtgagggacttgaacttgcaggcagggaacgatcttagcggagtgcctacggacatgttgtctcttaattcgacggtcaggatatattaccgtaacccatcaactttctttgccgtccacgtcactgcttctcctcttctccttcactactccaacctcctactatcctccggtgagatgaacaagttcacggttggtagaaatggcgaaacgaacgtagtgacggtggtgcaaggccatcaaattcccctaaacggtggtgtttctttccatcttgatacactatccctgccgctaaatctcactatcgtcatccattcaaaagacttacaatttgggaaagactagtcgcctccaagttaaaaacaaggaatcatatgctcattccctcaaacgccaaccatttcccaaagtccatctctcttctccgctcctgtattccttaacactgattacacgtgtgtggatgtgtgttcttgtatcttttgccatcaaatattttaatccatcaagtacaacatcaacatttctacatgccacagtcaaataagtgatcacatatatagatgacaccgctttattagccttcaagagccaaaatattactagaaaaacaaagtcccttaaaccaaatataatctattcagacgctatgcatagagtttcagaaaggccaatccatcaagaaagtctcaggccttactgtaatagtaatttagaactctgtaccagtctattagttacagaaagacataatggcttgtcctaccagtctatagttggagcctttgcagatggaaaaccatactacccaacttagaataggaggtgagttctctgttacacagcaagcaatttgtagtccccattgcattatatacaatttttgaaaccatgaatgactttcttctgttttcattttatgcaattgttgaacgtttcttttaaagtccggtaaagtgaaaagacgatgaaatttctttgatgaacacattcattgttcccttttggtgttaagctggtaaagcgttggaggtgttccctaaaacatgccagattgtacagaccatctcgatgttgttactcattcagtattcaaagatttatctccttgtgttcactggctatcagttttaggagactcagttagtggattgtattagtccaagaccttcaggattttcagattcttgatgagtcataagacgagagcagagcatacgaaacatatgttttcttgtacctggacctaataaacagatttatttttcagatctgactagctagtacctattatacaaagtatggtataaccatagttaaggatgtctaagcagcgcaagtggcacaggtgcagccctcaccacaagtgcaacccttagcagaggtttgagtttgagtcttggggcagttgcaagggttacagccacagtgctccccacatggacacgtgttgtgctcttgatccccaccagatgcttcgctcatcatcttgcaccttcatggaatggaacaacgtttttaagatcacataatatcaattttatggatcatatatataaaaaactaacctgcaagattcgccaccgggacatggagaagggcagccacaacgatcgttgcagctagcgcttgcacttcctttgcctgtgtctgccattttttgttttctcttccttttttttatctcactagctcatcctttttacatttcatatagataagaatactgagcgatgcaagagaattgaatacgtggcctctatgtaggtaacatgtgtcatgtgacaacttctcctctatcccgagtcgtgacgaagcatgttcggttgggacaaagaaatagaatactgaaaattttacaattttattttggtcaaagaaatggtttccaaaaaagaaaaaaaaaaagaattagataaagctgaattgtttttggtatgctctaaaatctcctcttttataagcccttctcaagaccctagttttgttactttacttttggactatgtctatagctgtcaaatggtccgtccagggaccattgggcgtgtccgtatggacagttttttttatgggccaagttggacggtccataatggacaatggtccgaaaaatgtccatgaccaataaaaatcatgtccatatgggcaagcccatgtatagcccattttattattgataaattaaaaatcatgattttaaagaaattttccgcaaaaattgtaaaaatcgaagacttgcatttttccgacaaaacggtaaaattgtgtttttcttaccaatacaataaaatcacgattttggcggaaaaattatggaattgtttttttctgccaaaactgtaaaatcataaaattgttttttcccgccaaaacggagaattgtgttttctcaccaaaactgtaaaattatgtttttttcgccaataaaataaaatcacgattttggcagaaaaattgtgttttcccgtcaaaaccataaaatcggagaattgcgttttctcatcaaaaccgtaaaattgtgttctcgccaattaaaatcgcgatttaagaggaaaatttacgaaattacgtttttcggtcaaattcgtaaaatcggagaattgtatttttcccgtcaaaaccgtaaaattgaaaatttgtgtattctaaaaaattgtggaatactatctttccttcaaaactataaataatttaataagaaacaatttattaaaatttaaaattttcataaagatagaaacttataaatgtaaaatatagaatttgaaaattatttagttgtaattataattaaaattataaaaatatgattaaaatgaagacatgtctattgactcaattcatgcccatgggcagcccattgtccatatggtcaagcccatattatccgcggacaaaactggtcatatgcccaattagatcatttgttttatggtccggaatatagcccgtccatatgcatttggactgggcaagtccatgggcggcctgcccaattgacagctctatctctaagggttataaagtttataattacgcgatgccaatgctttgatacatttttgctaaaaaaaatgccttcgtacatacacacgcaaatagatgagggtaaatttgacttggttttcgatcatttcttttactttcgtgggcatatcttttttaaaaannnngnttngnntaggatagctagtaatcgntttctcacaatcagaactacaactagagcgaactactctcggctgagaatatgatc

SEQ ID NO: 35885 - DNA, 1487 bp, Arabidopsis thaliana landsberg
tgttggttgtagctaacttatggaaattatgtgtgattttcagttattgtcgcgttactatcgttttactctattagtatgaatcagataaggcctaattagttttctacacacagagtccattagtggctgaatgttgatccaattttcacgaatatcatatatgatcagttcttaatattgtagaagatacactatgtgtgatatgtcctctttaaatgagtttccctgataatttataatatttgaatagttaagcttggagaaaaaaacatacacaccatatgctggcggtggagcaattctcatcagattatttattctcatcggcaaaatatatatccccaaaattttatcatatttctcgatagagaaaaatcattaactaaatatccattcccactcaaaaccctaaaagagagagcctcaaaatctttgagtgttttgcgtcgtcggttttaaacaaaaaggttcaataactttttctctcctttgtttcttttttgtttattatctcctctcatcccattttcccaacacgacgtcgttacagattcctccgatggacttcccggacgatcacccttaaccaccttacaaaacgacgacggaggaagaaaaggaaccggtacagccggagcggttagggttaaaccgtggttcacttggagatcaagatccgaatcggacttcaatcgttttcggttaaccagagagtctttcatctccgtcgtggatctggaggtggagaagcgacaatggtgggtttggtttcttgaaacgtcttgatgccaaatctctgaagactcatcacaggagatcatcaacgacggagattcaagaagatctgatatcggtcgtaaagttccgccgcgaagaacagtctcaaccgccgcttggcatacgtgccagttcctggtccacaacataccaaccgctccgttaaccggattcaccgttctcccacacgcttcaaacaacaacgactgaaacaaagctgaacaaaccaaaacataaaaatcaatttaaaatcaaaaacattaaaagttgtatagatccgtagagtttgtaacctaatggttatgttatatattcgaataaaaatagatagtatagtgataaaaagaagttgtaccaggacgttggagttcaggtacggaggagatgaaagacatgagaccagcacgaccaaagaatttagcgacgaagacggtggcgtggccttgtgactcggcggattcgatccattgaaggcaaggacgaaggatgcatgtttcactgcaaccttttcgaagaactctacatccattgcaactcatttcttttccgaaatttgaaaaagaaatatatccaatattttgggaaactctacttgttaaaacaaaaactgaaaagtgtcgatttaattcgggtttgagagcatgcaaataggttttgattgaaaaagggacagagaaaacaagtttcaagaagataagagaagatag

SEQ ID NO: 35886 - DNA, 865 bp, Arabidopsis thaliana landsberg
aaataatatggatattgtaacttcatacctattgaggagattgaacaacactaagagttaaattaaagacaaaaccaacacagattgaatatctagacaccaagcttaaatccttctacaggtgtaaagagaatcataagtcatcaagccttcagtcatacttataacagtcgagatagaatctacaactaaacaagataggcacaacaatagtctgttccaataacatataaagagcagagcattagcttaaccctataaacgattaacccttggtttgcttctccaatagcgaaattgttgaactaatcccatacttcacacgtattatgaaccattctctcatgttcagacaaagtattctattttcacacaaagaatgattagtccaataagaatcatgtagatgggcacaagtctaatcaaaagaccttaagtcttactttctacttctatcaaatatcaattgtatagaaaatctagataggcacatagagattatataggcaggacatagtctcttccaatgacacagacagtaaaacacaaacacagaagattataaaaagctaactccttcatcagcaaatctattttatagcttctgttatcaattagagaagtgtgttagctaatatgaaacttcacagacccaatacgaaatctgggctaatttctctaaaacgcaaagcaattactctctttttgacacaaagtatgatgattagagcagcaagaagtgagaatcattgtaagcttacccttcagtgtagtcgagctggagaagatcaagatactgatcccatttgtttccaatcacctaaaccaatcacaaggtgaaaggttaagtaagctcaatacttta

SEQ ID NO: 35887 - DNA, 3529 bp, Arabidopsis thaliana landsberg
tcgttgattttgatatcttggtgcatctccagcaccaatgttgcctggcaactcacaaataatctcttttttagccatggtgaccagattcgaaaggaataagcaagttgtggtgatgctcgacccttacactcgacctgctagtcgagtatgagtgcctgcaaaacaaaaacaagcaaatgaagaaacaagtgagtaaccggaaagaaagaaatagaacttgatcttaataactcagaaatcctaaatgtaacaagaaaaacacccaaatggcaacggcgccaaattgatacgaaggttttctgtgtcaattccctaaatgcatcttatgtcattgcagcatttaaggtgtcaatccaaatgggtgtaattgctatcaatcaggatatgatcagagaatactaagtcaagccaagtgtgaataagtttggtgtgtttctactaaacctaagcaacaggttaacatgcaaatcaaataacaagaacagaaagtaaaccaagcactaggtgaagcactcggtcgagcaatcgagtaaacaggtcgagtaaaatactaaaaacaccaattttgcacgaaacgaataaagtacgaaaaacacgagttttgcacaaataaatgacacagagctcttaagaatggggtaattggtcttagtggactcctcaatccattagctaactaacaaactcaatcaagctatccctagacaatagattcaaaaccaaatcaagccacttccgtgtgagtgattctcataactttagaacttcctaatctcaatttccattgatgaaacataataaagcaggctttaaacaccaatctattaaagtcaataagcagtctaatcatccaattccttgggctagaatctacaaatctctgaaattagttggttcagacatttcatcaaacatcttttggatggagaaagtctgaaatcaattttcaattgatcagaaagaaaatagcattaagaactcctaaaacagaagggaatcatgcatataaacacttagctagctaaagaagagaggaatccacctaaacctaacccattctcaagaactctgaagaacactactcaagaacactcaagaacatcatagaacaaaacccagaaaattcataaaactcagaaatcattataaacttagcaaaagatagatctcaatgagataaacaagtttgcagaagaaatcaaatccaaattctcaacagaacaaccagaaaatgcaaaagaaaatcaaagaaccctaaaaaccagcggacaaaacgaagatcctctgggcaaaaacataagaggtctatttataggccatcctaggttgccctaattgggaataagacaaaaaagataagtcggcgcaggagccgtcggccctaggcgaactagaaaagccgagtggcttggtcttggtcacacagctcggctctaggccgagtggcttggtcgagtagcttctcttcatccttaagtgcacaactcggcctccagccgagtgccttggtcgagtaggctccttgttcttcacgtgtgctccactcggcctccagccgagtacataggccgagtatacttcaaatccttccttaggtcccccgaactcgagtctgtccatcccttgtgctagaaacctccaagttgagtccaaaagtacctaattcatctgcaaaacactccaaatgcaagtatgctatgcaatgcaatgcaaaatgtgcaaaagaaggaaaagagactaagaatgcataaaaagagacttgaaactaagctaaatgcatgaaaaacaagggcttaaaaaggttaaaatctagtgttatcaacatgacatcaagtcatattcgactataaaacactaaccaaccttcttcttgcttttcaaagctttcatggtgtagccaaagtccatatgagtctttggctttgtgtcttctaacaaggataaactacttaggcttacaagatcgggttgcggtttaagttcttacactcaatcatacacatgacatcaagtcatattcgactataaaacactaaccaagcttcttcttgcttctcaaagctttcatggtgtagccaaagtccgtatgagtctttggctttgtatcttctaacaaggatacaatacttacgcctttaagatccggttgcggtttaagttcttatactcaatcatacacaaatccgctagatgtaacaaagtgttgagaaagcttctcctagagttaagagaaaagaaaagaatgattagaaaaaggaagttgaattcgatcttgcagcttagaacttttaacttggacattgatttcatctggtctatcttgtgttttggctctgagtccccactttcaaacctcacttccagcttattcttgattgtttgcttgagggcaagcaaagactaagtttgggggagttgataagtgtgtattttgcatgttttgagcatccatttctcatcattttagcatcatatcatcactgttttataccatttcacattatttgtcaccactttgcatgtttaggatagttttgcatgcctgttgcatatttgcgttgatttcaggtgatttggagctgttgacgagctatctggaagaagcggacctgatcacgacaaaccactcgaccaagaggtcgagcaggagcttcaagatcccaagagaccactcgacccccaggtcgagcataggacatcaccacttcacttcaccactcgaccacgaggtcgagtgccctcatctccttcaccagaacatcactcgatcacttcactcgaccatgaggtcgagtttcttcatctccatcaccagaacatcactcgagcacttcactcgaccatgaagtcgagtgtcttcacctccatcatcagacaatcactcgacctcatcagtcaacctggaagtcgagtatctcctgaccaacactcgatcacatcactcgaccccgaggtcgattgtcttcaccttcattgccaaaccactactcgacctcgtcactctacctggaagtcgagtatcaccatcaccaccactcgactgcatactcgatgaaaagcttcagagccttcttcattccgcactcaaccagacactcgagcacgaggaagaaaagaagactccagctattcactcgatctctcactcgaccacatgggtcgagtacagttcttaacccgtcccaatacttcgtcgttttgagtattagggtttcgggatatttggctataagtagcatgtacttcacattttcgaaaagaagttttttatctagttttatttccgcagaccttgtgtgctagaccttttgtaatccggatttctctttatctatttagtattcagtattcagcttttgttcttgatttttgtttgttgttgttcattctattatcatcctgctgttacactgttgttatcatgtcttcaacctgttcaacgtttattctttctgttatgatgtctgagtagtgaataaattactgaggatgggttacagtagtgtagaattctcagtatactagg

SEQ ID NO: 35888 - DNA, 2824 bp, Arabidopsis thaliana landsberg
atacaagcgatcgtcttgagtttgcttttcttggagaaagtaatggtacaaaggaaatgaaattagtctcttctgatgctaaagatatgtctcagtcgcaagttgagttttcaggtgagtaaagatatttctttactactaaagtgactcaataagtttgtggtcaagaagcctgaattttacttgttttatttcatgttctaacagaagatattgtgaatctcgtcgttgaagacatgagatagatgaagattgcagtatttggggaaaacctaagagaaaaggtagcagtattttccgaaaacctaagagaaaggaagagactacaacaattatactacaagaaaacctgcaatttgcaactccaatattagtcccaaaatggttgcaaacaaggttgttacgactacttagtgacgatattaaaccgtcgctaaaaaaccgtcgctaaataataaagtcgcaaaatggtcgctgattagcgacgaattgcggacgcgttctgttagtcgtaaatatgcgactgtattgtgacgatcccaagaagttgcagatatgcgactaaactgcaacgaggtacactgaggtacggttcatacacttagttacaatttagtcggaaaatagtctttcctttttgcgacgaagttaaggcgctttaaaattcatcgcaaaattgtaacacttttgctacgcttgtgccacattggtcatatttgtataatttgatttagtcacaaattcgtcacatattttgtaatgtgtcgttcacataattgtcacatagtgggagtaagtttggtgacgaaagggtcactggtttataaagtggtttggtcactagttagtcacattttttgttttggtttagtcacaaattgtcgtatatttggaatgataaacctgattaatattgaattaaaaagccaatgatgctagttaaataccattaagaacagtaatcaagtttacattcacaaaatcatagtgaaacctacatattatcatcttaacaagttcaacaaaagcaacaaaagattagcatcctaacaagttcaacaaaagctacaaaagatcaagtttaattgttagaagcagtgttagacaaagtaactgaagtagagactaagggtgtggtgcctaatatgttgtctcctttggtgcctgcttctgtgatggttggttggttggctgtggcggttggaagtgtggtgtgtggtggttggaagtgtgactggttcaacatctgtagaatctgaagacaaataagcatccaactcgggatctttttctttctccaaactggctatccgagattgagattcgtagtgctccacatcacgttttgcattttgctcctcttgttcagatatcttgagctataactgctcttgaagctgcacaaccgttgatgtagaagagctcgcataactctctttccttcttcttttgtttagtgtctccacaagtgatccaaagccaaaatggttccctttgccatctatgtgagtacattgaaacgagaagacaaatacagtcaccgaagacaatcataattactctaagtatccattgctcataatcaatcataatccaagcaaacaaagacaagcaaattgtaagcaaaataaaaacagaaataaattaccttaagaaaaatctcattcttttcatcaatgttgagcgtacgatgagttgaatgttgcgaggaattatcagaaacttgaggaccatcctcgtccatttcagccatcctctcttccatcatcttcatataagcctcaccaacatgctgatatatctgatctacaaaagatccatcagcccttgtatgtgtttgcataaacaattccccatatgatacatgacgcttcaaacgttcctcctgaccaagaaaatcaaacagaaaaagacaagcttatgtgaaggtaataatagaaagctgttaagtgaactatttggatggaaagacaactcttaccatttcttgatgaacttgcacaaaagatttctgaccggctaagtgtttgtgcaccccaagacctccccgatcttagtttgtacagtttgaagctgtttcacttttcagttgagcatcttcagtgttccaatgcaccaacatctgtttccaaagtgtatcacgaatccacggtggttgttcaccactcttctttgcttgactgacaatccttttcatccttgtcttggctataaccaagaaaccttctttaacgagctcagtaatgccttgatcccaatatacttttgctacataacaagcagctaagtttgcaaagatagttagagtaagtcaaagtaaacaataacagaatgaaaggtatttgtgacattaccgcaaaatttctgaagtatctctcttgagtggctattggagtaacgttccaactgaagtaaggcccatcaaacttcgtcctaaatatggttgaaatcactttagacaggttctcattgtgccggttccccctgtaagaaaatatgattaagtataagccaatgctacttttggttaaaccatcaagacattcaagatataaacaaagatcaacgttagttgatgcaaccaacagagaattagcaaaaatgaaatggttttgaaataataacacgaaactaaagctagcagacccaaaaaaggagaatgcagaacaatacaaagactggagactataacaagaagtattataaagggacgtggagtgagccaacacttagcatggcaagcaccccccccaaagactgcagttgtatcgacaataggagagccaaatcaaaacatttgtagaccgaaacttaacaaatacaa

SEQ ID NO: 35889 - DNA, 956 bp, Arabidopsis thaliana landsberg
cctttgcaaagccgcttttcaaacaacctattacattataacaccaatggagaagatacaaaagatgatctccgagaagtcggtagtaatatttagcaataactcttgttgcatgtcacacacaatcaagactctcttcttagaccttggcgtgaacccgacaatctatgagctagacgagatcaacagaggaaaagagatagagtatgcattggctcagcttggctgcagcccgactgtgccagtggtgttcataggagggcagcttgttggtggagccaatcaagtcatgagtctccatctcaaccgttctctcattccaatgcttaaacgctttggggctttatggctttgataaaatataaaagaatagttacttattgatcgtagcttggtaataatgatgtcatgaaaccaatcaaggatgacaaaaaaaaaaaaatgtatgcatgtaagttttgaaaggatagattgtgaggatacctattttgtaacgtgtgggtatattttatagtaaaacaaacctagtgttgtatttctacttgtccatgcttttggttttttatatatatatatacatgctatggagaaatgggacacatattgtagagaaaaagaaagactttaatttgacttcttttctctctttatcaaaaagcgaaaaagcttacttttgtttctgtttttttttttcttattcggggcgtctctcacgatgatcaaagctgcaagagagaatataaaaaaaaaaacatgtataatctcaaagtataactcattgatcaaagtccattctcgttttaaacaaagtgtaagtctaatcagtatattgattggtaaaagacttctctaacccatatctttattttttttcacttaaaaatagaagaactctattttagaggtaaatttgtgtgcattttattccaaccctattctatttcaaactttaaaat

SEQ ID NO: 35890 - DNA, 1803 bp, Arabidopsis thaliana landsberg
tgtctgtcatataatttatatctttctcataattaataatgatttagttaccttttattgcttcatggtattttaaaagggtttattgtggtgtttatatataggcaatttattcaaagccgacaagttattgacaaatcctatgtcaggacaaaagacatgaataccaccatgcataccacaaggaaatcattctgtctgcacagacgatcaagacatgaaaatgaaaactatccaatactgacggaaatggcgctaacatttaacccaacacctctttttcaaagaattaagtaatctgaagggcgtttctataccaaatttttttcttgtactataaatagtaaatattcatgtgacttcactaaatgttattgtgcctacctttaattttgcttaataactttaaatgtctatgtaataatacacaatactaaatattagtatatctctattgtatttgactagatgagtacccgcactacgtgcgggtttatgtattactatttacaaattgttttatataatatatgttcatataaagtaaagttgaatgcatctgttttgaaacataaatatgatttgtaattgttttcaaaaagtccaactatattagttcatctgaaaaccaaagtgcttgaattgttttttattgttgttctagattctcagttttttttttaatttatatatccttgttcttttggttatatatttagtttgtgagacggtgaaactttagaaaatttatttcttacattaaaaatataacatgtctttattaaccatgtctctgcatatccaatataatcatattcaacttgatgttcttggaaagtttagttaagttcttgtcataatcttatatcttacgtattagttataaggatagctcctcaaacatcttttaaattacttgttttcttagcataaatctcaaaaagcttagatatatttaatctgcatattcatttagtttctttcataataatcgtctaatttttaggattttataataatcgtctaatttttaggcaaggaatatgtgtaacatgtttggattttatgatcattttagccacttaagtggatctcaaaatgaaagaggatatattaaattaaaaaatataaaaagagaaatggttcaagttctgattaattatatcctcctatttaaattgtatgttgaattaattactatttatatattacttattttatgaaatctaggtggcaagctctcatgtgctgatgtgtcaagttgtggaagagagttagccttctttcatatatatgatttgtgtcatttacgggggcttttatatatatgggcatatttcagcccaaatattagagaaagaggacatttcatttgggcttatgaaaatgggcatattttcgtctgtaaaattataattttacccttattcttcctttcttcttcctcctttgacgtcgatttcgttgttgttttttctgtttcttccaaaaatttaattgatcttcttccattcttctataccttttgaacccaataaatccaattacatgcatgttgctaaaagaaatctaaaccctaaaaggatgatatatataaggaacccaaatgtttcaattttatacacatattaaatcagttacatatttgagaattcaattgaataaacctcttcaattacatgtttaaccaggaaccccccaccaaggaaaatcaaaggattttattaaaaatttccaccatgtttgatgtggtaaattttaagatggggtaattttaatttgttttcctttgatttgaaattc

SEQ ID NO: 35891 - DNA, 3251 bp, Arabidopsis thaliana landsberg
gcacacaatacaaaaaataagggtttctttatcttttcgtttcttccaaattttgtaatggatttgatgcaaatggataagcgtttggattcaacggagcaagtggttgaagaaatcatgagaattcacagatctctacccgcaagaccaggaattgacgaagttgaagctgccaagggtttgattgacaacgttgagaaagaagatcaagcttgtttagaagccattgctagacagaggaaaagctctgaagttcctggtgagcttttcatggtgttgcaagaaatgaagaagggttatgttcagtttcgtagcaaagaacagataagagaagctttgaagcttctcgatctggaatctgttcactctttgttcgatgatttcattcaaagagcttctaattgcattgcttctccttcctctaacggctctgtttcgtctcgtcctccgctgcctccggcgactacgacggctgctcgttctgattctcagtcaagtttgaatttttctgagagagctcccgttcgccccaaggatatggtttcgcgagacgatagcttcgtcacaaagtctaagccttcttctctctacagtgatggttttgcagctcctcctcgaagaccacagattctcgattcaacacttaccaccggtaagttaacccttctcttctcttagtcccgttgattcaaagctctagtttactcaattggtactcgaacttatgattctctagatatagaaagtttaggacttggaattgtttaaagtttaaaccttgcaatagattaagttagtaactgtagtgtgaatcgtttgttatgtgtaggcaatgatggagagaagctgagtttgataaaacttgctagtttgattgaggtatcagctaagaaagctacacaagagataaatctacagaacaagttaacggaacaactcgagtggcttccagattctcttggcaagttatcgagtttaacttcgcttgatttgtctgagaatcacattgtggtgttgccaaacactataggaggactttcttccttgacaaaactcgatttgcattccaacagaatcggtcagcttcctgagtctataggagaattgttgaacttggtttacctcaatcttggtagcaaccagttatcatctctgccttcagcgtttagtagattggttcgactcgaggagcttgatttgagctgtaacaacctcccgattctccctgaatccataggttcgcttgtgagtctaaagaagctcgacgttgagacaaatgatatcgaagagatcccatattctattggtggatgttcttctctgatagaactccgtgcagattataacaaactaaaggctcttccagaagctattgggaagattactacattagagatcttgtctgtgcgttacaataacatcaggcagttacctacgacgatgtcttctttagctagcctcaaagagctggatgtgagtttcaacgagctcgagtcagtgccagagagtttgtgttttgccactacacttgtgaaactgaatattggaaacaatttcgctgacatggtatcgctcccgagatcaataggcaaccttgagatgcttgaagagcttgatataagcaataatcagatccgtgttctacctgactccttcaaaatgcttacaaagttgcgtgtgtttcgtgctcaggagaatccactacacattcctcctcgtgatatagctgaaaagggccctcaggttctgttctctctctctgtgtctctctatgtcatcatgtgtctagattctaaatggtactcactcacggatgagttcatcatacttacaggccgttgttcaatacatgaatgatcttgtggagacgagaaacgcgaaatctctaatggttaagccaaagaagagctgggtccagatgtgcttcttctcgaaatccaacaagagaaaacagagcagcatggagattgtctaacacagctgataatgtctctgaccctaaatcaggtaacactttcctttaattcccaaactcaaaaatcaagattcactctcagtattatacaaatacaacaaataacacatgttttgtttttccctccttcgttcaggtaattctgttaaagctgttgacagcacaagtgacaaacatatccagctatcttcttcacacgacaatgcattgatttgcattgcaactccaagtactgtagatgtttcactattcattctttgtttgtttctttcttcactattcacatgtatcaatgtgcacaacattgtttcattcatgtctctccacatatcatagagcccatcccaaaacagaatcgaaccatgtcccttgtagattgaggttttcattaagctcttaccatgtttgtctatcgtctctggttttgtttctttggtttgaaacttaagacactcacatctgtgtatatggatagagatgtgatgtaaatgtgatggctttgaagtttagaggagagatgtgacatgagttggctttgaacgtggttttgtctagagagtaacttggttaattaatactcccttgtaataatgcaacttccttttggttttgttttgtctatgtgtataatcgtcacgagacatggtctttctttcatgtgtgttatcatattatgatacatgtgacttcacatgtgaaccaatgaatgaagcaaaactttgttcaacatcaaaaccccatatctctcttcattctgtggaaaaaaacatccagtccatacagagtctttattgggctggatctggggttgcattatttaggcctaatttactcttaattttcttcatatggctccttcaggtataactatttagcaatggcccagcccatataggccacttgtacaaacaaaacaattttactctcactttagtttttttttttaaagaaaaaaaaaagaaacctcttatgttgaaaacttaacgcatcttatgatcaacatcatctgatttgggttaattttgggttaacttcattgaacaaacttgatgtagctttttcgaatgtagtagatgatgtaatatagtgaaaaggtcatattttgggtataggatttgccaactttccataatgaggctggcaaaaagtggtagtaaattaaaagtcacatatataatgtgaacattagaaataagtaggaaaaaaaggttagggaagattaagagacgaaggagtgaatctttgaaaatgtcactttattgactatgagggaaaa

SEQ ID NO: 35892 - DNA, 2404 bp, Arabidopsis thaliana landsberg
  unsure (1)..(2404): unsure at all n locations
tattaatataaattcaagtaatatatgtaatgtaattatatttcaaccaaaatgaacatatctcatctgcagtttttataaatatcatgaaaaatccttacttttgtcaaaaatttgttagtgttagctagctagatagctaatataatgaactcgtccataacaataaaattagatgtctaaaattgtctgaatgtaacaataaaactgtgagtaagaattaaaaaaaaactcaaaaatcactcactcataaaaaggccacagagtacgagtacgttatgctagatttaggcccatacattagatccagagaataggcccacaattatttgttaacatgaagagaaaggtccccaaactcagataatcacgaagacgacgagtgaagaagaagaagaagcaatggggagaaagaagggattaccggagttcgaagagtcggcgccggatggctttgatccggaaaatccatacaaggatccggtggcgatggttgaaatgagagagcacatcgttcgagagaaatggatccaaatcgagaaggctaagatcttgcgtgagaaggtcaaatggtgttaccgcgtcgaaggagtcaatcactatcagaaatgtcgtcatcttgttcagcagtatctcgattccactcgcggcgtcggttggggaaaggatcatcgtcctatttcgctccacggtgagtttaatggtggatgatttgctgaagcgtattattcgattcctttggttttgtatttggttctcattggttaatgtcttggttaattagtgccttgattagcaaaatcattgaattcatataggactgatattgatagagattagtctgaggctttgagctagtgcatttgtttgattgatgaatgaaactctcatgttgaatttgtgggtatgatattaatttgtctgtgcaggtcccaaaccggaggctgttgaagctgaataatgttgtgtgcctcattgaggtaagaagctggctctgggtttatgtttctcgaatcattgtgttgattgtttaatttgctataatctgaaagaaaacgtatgacacatttggcatttctaggaggttaattttcgatatgactttaggagccaccatgcttgtgtttactagagtatgttgcattgttgctagttaatataaggaaagtcagccatttgaatcattgtctttaaggcctattaagtgttaagtgactagtaattgtagaaattgttaaggaaagaaactggaatcggaagtcttataacattcactcatattgaggtagaggttgttaatagttatcatttttctctccaccacaaagttaatcctagcaacattggtacaataagctgaggtatgaaacatattttgtacccaacttgtggaggaagttatacatgtgttaagtttaggtgaaacctccactgttatgttatgaactgagccaaacgtggaattcaaactgctgtacgctattggttcttgtgcacaaccccctgcttgtttcactttcattacgagcttggtgattcaaaggctcttccttattttttttgatgcagatgtctgaggttttgatatgggacatagaatggaatcatttcacaagctaatggctccctgatatcttccaaactctgtagatttctcttgttcttagaaacttgtcggtctttggaccaacggattcatgtaattgagctttgagtattgttacactccacagtatcagtttctgatgatcaaataagtcccattttcattctcctgtctctctcttcttaccagttaattttacttactacgaaactaagaatcacagggtaaacaaaacaagatccaaaaatggttgagtttcaaagttcaattcaacaaagcaaaatcacagcataatttctcaggaaaacaacattatcttccagtgtcttattcttctgatatgatttaaagctatcgtactaacttagttctcctcactaccaccaaaaagcttcattttagacaatggagtcctcaagtacccttctacttcaaatttctttggagagagctctctgtacttagcaaactgttccttagcttcaacgttcttgtcaagcaagctatagatcatacctcgacagaaatacggtctgaaatccttaggatcctctttcgtcagctgctcgtagctcttcaatgcttcatccacattcttctgcaagaaatgtatctgcgcaatgatcagtctcacatctctcgcttccttcaccaaatactcagcctcagctacagctaaagcatcttctagcctctgcagcactgcatttccttccncggacctgtccatgagcaatgcattctcgaataaagcctcaaacgaaagtgggtttctttggagaaatttctcaacatctg

SEQ ID NO: 35893 - DNA, 2000 bp, Arabidopsis thaliana landsberg
tttaagaatcgggttaataggttttaagtgaatttttggtttttgacattttgtttctttcaaatctattttctcaccacttaaaagttttaaaaatagtttttcaccataatcactttttcaacccaaaaaaatagatttatcactattcggaagaatcaattatggatttgctatttttttatggtatttatagattttgcattttttaatagtttgtggattttgctctttttcaagatacagaaatgtgatttaacatttgttttattcgttatgttcggatttagtcgattgcatctatctatctatatatacatttttgcagccactttgtgaaataaatcctcaagttgggacttatttacagtggctgccactggtatttaataattatttttgataattagaaagtaaatcttcgaattaaatatttgacatttaactatcttcccgaaatctctccacattaactacacaattagttactaaaataaaacttccaaaatatttaatatcatttaaacactacaaaattatcatttttgatattgttttttttatgactataacaattcgattataagcattaaaccgcagaaatatttgatagcagttaattactacaaaattataaaatatttatacaatgatttataaacatatcataaataagatcaacattattataataaataagtttttttagaggacgggtttggcaggacgttacttaataacaattgtaaactataaaataaaattattttatagataaatataatttacaaacttttatatatactaactttaagaaaataaattgtttccgcggtatatcacgggttaaaatctagtaatgtcacataattgcaacaaattccctcatttctttcataaatttctatataaagaaaaaaagtaaaaataaaaaagcaaactgatatagaatttagaaaacaattggattaattgactttgttattcggttttaggaggttactcatttatctttcttctcacatttggtcgaaagatacaactcaaatcacctctctaacaaagataaactactaacaagagtacaaactacaagacataacaaaacaaagtggaatagaaaaaagattttgacccgttgactaaaaataaaaaatcttcaaaacacagagaagaaaaaccaaaaaagaattagcctctaaaacgacgacgctttttcaacgctttccattcttttcctcacgtcgaagaaaacgacccatttgtcggaacaacactctgacgactatctcctactcctcctactactactccgccgttagctcttctagcgccgctgcgtcctgaaatcttgttgttatgcatccacactttgaaaacgcttttatcaactccaatctcccgacaaaactccttaaccaccacgtcatcagctttcggcatcctccacccaactctctccgagaactcgaacatcttctccttctgatactgactaaacttcgtcctaaaacgtttcctagacattggaaccgccgtgttagctcctcctcttcctccagagagtgcgagaagcatgtaagaagacgagatcggcggtggagaagctgaatcatcgtcgtctggactacgaatccccgccagatgaggaggaggcggtggaggaagctggtgacggttgtgaggtcgaaattcgatcgcagggacgatggcagagagagaagatggatcctcctcacggcggtggaagttacggtggcaaccacaagcagcgcacgttagtgaagcggggtcattggagttaaacgacggtgacggcataaactcgccgcatccgtctaaagcgtgaccgccgatacctgctgcgtgattctttagacattctttataagtcgcaaccgcaaccgcttcagatgcaagatgatggtgaaggcaacgtttgccgtttgagaaagaaataggcttcgcgggctggatccggatcggagcttcgatttcgg

SEQ ID NO: 35894 - DNA, 2934 bp, Arabidopsis thaliana landsberg
tgtatcttacccaatcatgcaggtaaaagactgacctgtatcttaagattaagatcccggaccatctgaaaaagctgcctataaccagtccaattatactcctggggggaatgaccctccaactattccccaccaacaatccactttaaccccatcaacatggattgatttcaatattcgtaagtgctttagcagtccatctcgatcagccaattcacacttcatattgataaccccaagctgttgacagaacaggatatgtagttagtaaggatgaatttcaggatattattggtaaatgctaagattaaagtggcttactggtaacatcacataaaccggaacataaggagtgccagagaaatcttgctccgtcagatttggaggaatctcgagaatctaccaaataccaaaagtggaagagagtcatcacaattgaacccagatatgtgtatgcacgtaaatcaaccatgcagtgaaaatctgacaggttcttatgagattttcagattttgaaaatgtttttctcaagttgaggaaactatcaaattcattaatttcaaataagctatgtaaatgcaaaggactgaactgttacaagatttattttctatgtactagtaaagtgtcgttacttgtttagagttgataacatcgactgaacaaccaacaagcccctcagccttatttacactgccaaccagttctggagattggattgggagcatatcatacggtgatggagcgggtgtgaaaacacctttcatacggcaagagctgagttccactgggcttctaagcccagatgataccactctaagagcaggaggtgaggtttgctgtgatgcaatgtgagaagctgatgaacctgccgcaaccgcagaagaaccaccagtaggctttgtcccctaaaaggttgagcagatcaagaagatgatttagctttcactggtaatggatatgtcaggagtttttccccaaccgaggatcaaggttactgctaatgatttctgacaactaagagtagaagaattttgcagcatacaacaaaagacataacacagggacagggtatataagtacctgagatttggatggaaaagtagttccatcaggaagaacaacccatccagcttcccttgccaaagccgcgataacatcgttaatatcagctctaactctcaggttataattcccatgccttcgtaacccgcctagtatccttgcagttatagcccttcgatggcgctctctcaacttagttcgctccttctcttcaagcggtctacttctgcgacttcctcctcccccaggagtgcccacttgatcttgcattgactgctgaaacataaactcgtcattactactactgcctgaagctgcgtgtttgtctctatttcgtcggtctccatcatcttcttccttcacatccatgtccatttcttcgtcatcatcctcttcactagttccaagcagtttatgcatatccgtcgccattacttctcttataacccaaccacccaaacctctgttagtttaagaacgttattgccctcttatgatgaaatgttccatctttacttctctggttttaacactccacgtgtaatccttctggacaatgcagccaaatattctatgatatttccttgcttacagttagttagaaaattggagataattttagtatcaacgaaattaatcttcaatctctcaatgtgcataagctgctctcagtttaacttcatcaaagatcctacaagacaaaaatcaaacatataaacagcattttcaactacaaacatatttgcagacattaaaatggaaaacttttgtgactaacgaaaccaaacagagactatttcaagcacaattgagattaagtacctaaccatatatcattgacctctgtgagtaagagacactaagcacaattctttcaacaatcacaagcctcctctcgaaattggtcagaattctcggccctctgggcgaatcatcgagcaatactaaaaaaccctataaatggagcttccgatcaaaggtttccccctctgtcgccgtcagcgaaaccaagagagaggagaagaagacggtggatctccggcgggtgaaaagaggcggatctggccgtgagatggaggaagcgcgtgaaggagcgtgcagcgtgaattggaagacgagctttcgcgcgtgtgtagcgctcgagcgtgtctgagagaaagaggagtgtgtgaagctgaggcttggcacgaactatgcgtgtgtgcgtaaaccaattgaagagtagagacgggctcattaaacgtgtgaagggaagcacgtgccaccaccaccatcacgagattacgatgcactctgcggcgcacaaggcaaggcagggagatagtcacgtgacttgcctgaccagacacagttcgcatgatgtgatgtctaattatggtcgtttgaaaacagtgttcacaaactgcgtgccgttttactcttgtagacgtggacttcatcccggttttaaaaccaaagtaaagtcttagacattgaccatggcttcattggcttgaaccttcttccttgtctcgagggtttacgttgaatgtcaactaaaagttgaccaaaaacattcgttacaaaacaaactcaaatgtcattaaaagatgttgtaaatccgatttaattttgatgacaattacaaatttgagattattattattaaaacgatctaaaaatatttaatgtctacaaaaaaatattagtaaatgacatttatacgatgtgattctaattgttatgtctacattaataatttgtaactaaaaacatgtgaaccgaaaataataattccaatagtaacattactctctgaaaattgcaataacatggtgtaaatgtcatttagaatttaattagaaatgaatgggacaacctttacttatt

SEQ ID NO: 35895 - DNA, 3348 bp, Arabidopsis thaliana landsberg
  unsure (1)..(3348): unsure at all n locations
agcttcaaacactagtaaaaccaaatctaggagaaaagttgagaacctgtgacaaccaaaagcgcaacatcgcagcagcagagcaatgaaggggtcaactgttggactcggtgaaacatccaaggagctccagctgctaaaatagcataacctgcctaatgtaaaaaggcaaaaactatcaaaggcaacattatgcatatgaaccatataatcaaaagaatcaaaagaaacttgccaatagaagcatatagaggtaacttccaacaaggcttctagatttcctgtgaccaaataatggtgcttcatgcaatatatcaaggaacctacaaagaacacaccattggtaaaaatgtaaactttttttggttcataacaagaaactgaataagggaagcatttttaatacagatttgcatggaaaatgaaacccaaatcgaaatttaagcttaaaattgatttaaagaagagagaaatttggttatgagagcgtaagagatatatacatagcgttctcttcgttggtcattggattcgacgaagcacgtctctccgttgacatcttcgagacggaatttgggaaatctctaaagtaattgattcgatttgagatttatgtcaacattttgatcagagaagtcgattgcagacaaattacaccggccggaaacatatttttattttattttgtttgtctgatatattgttaattaattattatgcaaaaactccggtgttcaagaaagcggtagtaaggctgggcaaaaaacacccgaatcgattatccgaatcggaaccgacccgaaagttggacccaaaactgtatccgaaatcgaagattttttctattggatcctaaattcctttacccgaaatcgagtccgaatccgactcgaatccgaactcaaaaatacctgaatattttatttgaaaaatctaaatttcactagaaatctgatattttatccgaaaatccagatatttatccgaaaaatctgggtatttacccgaaaatttgagtatatgttccaaaaaaagtctaaaaatctataccgaaccgatccgaattcgattagatctaaaccaaaaccaaaccgatattttagatttaccttttgatcctaaacttctctgcccaaaagattcgtaccagatcgggttttacccgaactcgaccaacttacccgaatgcccactcctaagcggtaggctttaaactttttttttcttctttctcataaatagtattttttttattcttcagcaacaaaagattttaaacttattataaagttagctaaaacaaatactttttctattttttgcttaacatcaacttttcattaaccaattcaaaaatacaagtcattcgaccacaacatattttaaccaaatacaatgaatcagtctagtatcaccttgaaacagtaaaatggattcaacgctacccaaccgaaattcactgtattttctaaccacaacgagatgaattacaccacgactctaagtgaaatcatctcttaaaccacgtaaattcacccaataacacgaaaacaattactaacacaaagaaaatcaaatcctatcctgagatccaatccaattccaagctattagtccctcatgatccgagtgtagaacatgtcctaatagcatctacgccaaaagcgcaacttcagaagggttttgactcctctgctttcactatttcggtcctaagcctaaaacggacatactaatccgacttatactcaaccggatcaaccgggctgagacaaaaatttcttgaagtcgaggctttattggagagctttccttcttcttctacaatccaaatggttttcttttctcccccatttctcattaattctccatcaggagtcgttgacggcagcatagctaataggccttgaatcatgtaaatctgcccgggatcgataggatcttcacaaccaagctcgaaaaccacgatccgcctacctctgtaccttcttaacactgagccaccactaccaaggaggttcatcggaggagaggtacctccgcgaagagactgacgaagaaatccaccagatttgctgccgtcgtcgagagtcatagttccccattgtagatctaccaacgaacctccatctgagagaactatctccgctcgccgtcgacttaaaactctttgattaagccacaaagaaggaggagccgccgccggctaaaagaaatcgacacaaaggaaaaaaaaaactaaaaagagaagagaggctctctcacggtgccggccgaaaccgaccaccaaagaggcaaaacggcgtttgaagatttggtctggtttgcggcggctaactagagagagagaactgaatgctatatttattaattggtagagtcggttgatttgaccccaattattaacgttagtgattttccacgctcctgttatttccttttttcttttttactaatgctatcaggtgcttctatttatccccaatattacaatttctgcaacaacaattntttacacttgttcgtcgtcttcattctctctaattctcttattctgattgactaaaggatcagcgatctcagtctgagagagccatctctacgatcaggttacttagttatagtcgttctctctctttcaattgtatctatttctgtttcattctgtcatcgatgatttgtaattctatacattagggtcttctagggttcatcgattctcttttcattgttgtgtgactctgtttttctgttttttgcgtgtcacagactcgcatgaagtgattcttctcgggttcaagcaagtaagaacgaatggtaagagatttttgttactttaaattgattttaagattggattttgattcgctgggacttagtatcttctttgttcttcatgtatagagttcttccgactgtttgacaacacgtgaatgctccgatctcgatcagacattggtatagctttcttctgtctgtttgataacacgcgaatgctccgatctaatgtttcgttcactggtatgtcttttcgacgaatgttattgttcatcaatttggaatttagggatttagcctcttgtttggaatttagggatttggaattttagaatttagggttttggaattttggaatttagggatttagcctcttgtctactgatagggatttggaatttgagaatttagggatttaggcgaaagttatttttgttcatcaatttggaaattagggatttagcctcatgatttttggatttttttacctcaaattttttattttcctctttttatgatagcaaaagttttttttattttaattaaacgttttattatagatatattttg

SEQ ID NO: 35896 - DNA, 697 bp, Arabidopsis thaliana landsberg
ggtcttattcaaacttaattcaggtctctaaatacataatgctctcaagatcatcctcccaaatagtccaatgcaaagactctctctatatccaaaaaccagagacgtgagaatttctttattgcgaggcttcttattttgttcttctccaaatcatatatgacagagtgtctagtttcaaacgctctgatatttgtctttaccagcctaatctgactgcatcgactcatgcattgtatctccaacttatcgccatggaaaaacttcatttgtgaaagaggtaagaccagattcttatttgaccactgcatattccctgcatcctccataacccacaggtccacattgtcattagacgaaaggctggagtattctaaaacagctaacttgcctccgtagttaatgaggctcgctcgatatttttgtcaaacaatgcaagcctcaacgggtaattcaatcatattaaactcttcataagcaaagtcaaaactcataaccacacatgtgttcttataagtccaagctccataataagttgtttgctttaataaaccaatataccaatatatccttttgttgtttggttatctatacatataaagaaaaaagacatatgtatgtgatattaaatgggtcagcccaataaacgggaagatttcttttttcagcataaacgaaaaattctttaacattttta

SEQ ID NO: 35897 - DNA, 958 bp, Arabidopsis thaliana landsberg
tttgagttttaaagtatgtagctgttacaagtttcgtggaacttggttctggatctatgaaagtctcgatttttataaatctgtttttgaggtgttttgtgagactcttgagtatgtaaaagctaaaaaatttacattcatatgcgaattttcaaatctgtaacctgatgatcaagatttgtattggagacaggttgagtttcctgatattgctttgatttttatacttaaaagcttcaaattcttcatcaagcttgaaactttggaaatttacatacatatgctaattttcaaatctgtaaccctaatgattcagatatgtgttggagacagattgattatgctgatttttgagacagattgattatgctgatttttctttggttttatagtccaaaagcttcaaattgttttcaagcttcaaactttggcctttgagtattaagggtatgtgactgtcacaaattttgtggaacatggtattgtatctatgaaagtctcaattgttctcaaacaagagtatcgagaagctacaattgtaagctgatgaatcagttttctgtatggaaacagattgcttgctttgatttaaaacttcaaaacttattactgggcatataggttgtgtactgctgccaaataatctggagaagagatgtttaaaccaattaagttctgaaatctttctgaaacagattgcataacttttttggaaagatattgagggtgttctttgaataaatatgttgtacactgaaaatttcccacattaagagtaggggattgatattcatcatcttttcaaacgtaatcttgtaaagttcaacttcaacccaaagtcttggcctttgtacgtttgttcctcacttgggaattgggatgcaaagctgtgttgcaaaatgtttagaaataatatttactgttatatagtttgtctggtatcttagtcacaaagccc

SEQ ID NO: 35898 - DNA, 2707 bp, Arabidopsis thaliana landsberg
  unsure (1)..(2707): unsure at all n locations
tgcgttaacactcttttcgcctccagacaattgtttcattaattgtgtttcccctttaccattgaacgagacctacaaaacaagtacgaactagtatcagcctgaaagctagacaaaggataatgatatacatggtttctttatatgtagtgtccacaagtcttttcttcctaccttcacttttacaccaatgtatttctcaacccttccctctgtaacagcttcacgacctccatcatcatcatcatcatcttcatcatcatgatcaagatcctgaatatgtgaaaccaaaatgttttatgtccacccaactgattaataaagagatcacacaagttttacacagaggcaagaatcatccagaaagacaacagtgcagatattggtggtcttaagtaatccttggtggagtcaaaggaaaggtttatgcgaaagtcaaagagaaaacgaaacgcatcagacaacagtgaaataccaagtaagatgaccaacaaatagttataccaaggatatacttctacactcaaggctcactagaaaacatctactcgtggtttattagaacacaattgatctcattcaatagtactctcaaatttagttaaccatttgataatgaaaaaactcacgatgacttaaagtaaacaaatgttaaaagaggaaaaagtttcattgaggaaaaggatgcagaaacatgcctttttcttcataatgataaggttaccatatccatcttgcacaagctcagagaatacatccctgaagtgatgtgcaacccctttgaaagtacgttctatagattcgtctttccgctgatccagaactgttatcagctctttaattttctgcggaaacgatcatgagtcagtcaagctctactttctacatagaatttggcaaagtgtatgaaacctcctattatttacctcatctcctgcatcaagctctgcttgccgattttgaagttcttctcgctgttctgtgaaattcacatattgatccagcgctttcttgtttacatggctgaattgttgcagctgttcactgcaccggtgtagcatcttctgcagctccttgatattttttcgtttatacctataatgttcaatagcttgtatatattatagaactcctaggataaaaatctcatgatacaacaattgtccaccaatgatgactaagaactaactggacaagataaatgaaaattgggacagtataactataaaagttctaactagactgagtgctgaactttctggatgcataaccaataagaaagagaagaagcaaacatacgtgtcaaaagcgtcagatgacaatggacccaatcccctaatcttcttagtatactcatcttgcttagcaaggagcgtgttgcgaaggctaaacagttcctccaactttttatctaaatcttgtagtgtccctttacaatcatcttccaatgtctgagagaacaagaaacttttgttagatagagaaaaacgcacgtctcttactttatgatatattatactacctttaactctgctttctcatctttaattatcttgatttgctttgtcttctcatcaatgctgtcacagacacctaaaacacacaaaatggccttgagtgtactcgtctggatagtaagtagtaaaagaccaagatcaagcaatgccaagcaaagtagttcagaacgtttgggacccacttttgagctcttttgcagcctcattgaccgactatacagcatcatcaagttcctgttcttttgagccagctgaactaggcaaactatcatcgtcgatggaagctatagtagcctgtaactcagttattctcctctttaagttggtagcaatattagcctccaactctgcttttcttgtctccctctgaggttaatgaaaagcacaaatcagactttaaaaacaaaagaaagcacatgaatcagacataatcaaaaaaaataaaagcacataaatgagacttcttcaatcgaaagaaatgcaaacaaatcagaaattaattcaaacatataaacttttctttttcattactgcgaacctcaatgcgatcggcctggtatgcaaattttttttccttaagatccttgatttctgggtttaatttcgacaattgctccctttcttctggagttaggtgatccacaagttccgttcccatttcagcttctttcatagacatgctggatctaacctggtcaattcgtgttctaatatcacctagtaatttctcctgcaaacagatgaaacaatttagtatttacaacatgggggaacgatataattaattttaaatgtcactccaaaaaaattgaattgtaagaaaaaaggcaccttatattcaatggctttatgtatagcatgtttctgcttattagcgttagctatctcttgcttaagttgctccacctgtaatttgcagagcgtccagtctgcttcaagtctctgctgctcagtaacaagctgtgtaatctgctgatctatcagtgagacatgttaaggaaacgctacaatcaacacacatcaatgaacaatacgatgtagtttatcagaaaaccaaaatgcaataacaagttaacaaaagtcagttatggaaaggatatcttgcagctgccttctaacatcctccagttccttctccttctcatttatagaccttngatnttgcattattatattcatgaatctcaatt

SEQ ID NO: 35899 - DNA, 2783 bp, Arabidopsis thaliana landsberg
ggtggtggaggtgaatatactcgaccagggggtcgagtggtgagttgaagttgtgaagtcccctactcgaccagggggtcgagtggtctgttgaggtcttgaagcttctactcgatctggtggtcgagtggtttgacatgatcaggtccgcttctttctctataatcatctatctattttctattatatttttcctcaagaataatcctacccactaaataaataaatacttgagtgtgtgaattcgacatccacagttatcacgtggtgcatctccagcaccaatgttggaagggccattttgttgattctgtttgtcagccatttcgagtggttgttggggaacaaggttgactgtgtttctcctttctctgagtttgccagctatgcggtcgatgttgtcgttgaaaaggaggttctgattgcctgttgatcgagtttgcatacaacagaggtgtacctggatcaagaagacaacaagaaaaacacacagttagcaaccgaattgaaaattgaaaaagaacttgatataagcaagtctgaaatctcaaatgtaacaaacaaacactcaattggcaacggcaccaaattgataataggtttttaagatcaattcatcctaaagcactatcatatcgttcaatccaaataggtgtgatgctaacaatcaagatgtgatcagaagtcactaagtcaagccaagcaataacaggttttggtgtgttctagcagtcctaagtgaatatgcagaaaacagaaaatcaaacagaaacagcaaaacactcgaccaacacagctctgtgcagagcactggatgaggtcgagtgacaggtcgagtaacaggcagaaagtgaaacagggatactcgactgcatagtctgttgccagacaactgggtggtcgagtatcaggtcgagtaacaggaaagaattgtagaaactaagcaacagataacaagatgcagtaaacaacagtagagtaaacaaagaattcaatcagataaagaattcctaaggatggggtaattgagtagtttcgtttcctcagtttacacgtgattgacatgctcaataaattaatcctagacaacaagttcattaaccaaatctaagtgccaccgcaacagagactctcaagctaacctagtcccagactcaatcaccattgacgagagctaacataacaggcattacaaatcaacaagttaaagccaaaacgctccctacaaccaataccttggtacagggtcacgaatctctggaattagtggttcagacatttcatcgaacaccttttgagcgcggaaatgtctgggctcaaattccagttgatcagaaagcaataggcattaagaacaactaatccagaagggatctatcaatcaatacacaatcacctagaatactgagaattctacactactctaacccatccttagaaacctattcactactcaaacatcataacagaaagcataaacattgaacaagttgaaaacatgctaacaacagtgtaacagcaagatgataacagaatgaacaacagtaaacgaaatcaagaacaaaagctgaatactgaatagataaagagaaatctggattacaaaaagtctagaacacaaggtctgcggaaataaaactaggtaaaaaacttcttgtctgcgaaaatgagaagtacatgctacttatagccaaatatcccgaaaccctaatactcaaaacgacgaagtatttggacgggttaagaactgtactcgacccaggtggtcgagtgagaggtcgagtgaatagctggagtcttcttttcttccttgtgctcgagtgtctggttgagtgcggaatgaagaaggctctgaagcttgtcatcgagtatgcagtcaagtgttgtgatggcgatactcgacctctaggttgagtgacgaggtcgagtagtggtctggcagtgaaggtgaaggcactcgacctgggggtagagtgatgtgatcgagtggtgttagaagatactcgacttccaggttgagtgaagaggtcgagtggtggtctgatgatggaggtgaagacactcgacctcatggtcgagtgaagtgatcgagtgatggtctggtgatggagatgagggcactcgacctcgtggtcgagtggtgaagtgaagtggtgatgtcctctgctcgacctgggggtcgagtggtctcttgagatcttgaagctcctactcgacctcttggtcgagtggtttatcgtgatcaggtccgcttcttccaaatagctcgtcaacagctccaaatcacctgaaatcaacgcaaatatgcaacatgcatgcaaaactatcctaaacatgcaaagtgatgacaaatgatgtgaaatggtataaaacagtgatgatatgatgttaaagtgatgacaaatggatgctcaaaacatgtaaaatacacacttatcaaacatatttagtaggagtatcataaaaaatctctgataataaacaaatattataaataatactaaaaaatacttatgatactatatgagtatcccccatacatgctcttaggctcgggtacccaatccattgtaagtgttttattttttattgaataaagaagattttctttaaaagccttgtttacttctgatattagacttgtatggactaacacaacttacggacatggtatgggttgaaaagccttacgtcgtgttcgtaaggaacgatattcgcggatgagctgactttggtaactgatgtgttttgagaactcggtcggatcgtctacagacgtcgca

SEQ ID NO: 35900 - DNA, 1458 bp, Arabidopsis thaliana landsberg
  unsure (1)..(1458): unsure at all n locations
ggttcagtcgatgctaaatggggaggggaaagaggtcaaggagttaggaggggaggaagagaggaacggaagctcatccgtcaagcggacacctcatatgttctgtaaaaccttaacagcgtctgacacaagcacacatggaggcttctctgtacctagaagagccgctgaagattgttttgctcctcttgtataattctctatatctcatttccttatttttttttaaggagaggttttatcttcttgttataagccttatttgtgaactttccactggtgttaggactacaaacaacagaggccatctcaagagctcattgcaaaggacctccatggagtagagtggaagtttcgccatatctatagaggtggttttgagtttgttattattcgtttcttttttcttcgtcagtgaaaccaaaatgtttagttctgtctctttttaatataggtcaaccaaggaggcatctactcaccactggttggagtatctttgtcagtcaaaagaatctcgtctctggtgatgcggttctctttctgaggtaatcgtaagatttcagtttatcaaatggtgatgtagattcatggtgtttccctctgctttggtggtttgaagcccttgatccaataatgtttacattcattactaatatcggcgtttatagagacgaaggaggagagctgagattaggaatcagaagagcagcacggccaagaaatggacttcctgactcaatcattgagaagaattcatgttcaaacattctgtctcttgtggctaatgctgtatctacaaaaagcatgtttcatgtgttctacagtccacggtgagataaaaatgaaaagctgccattaataatgattcttaactaggttcagtaagaaacaaattactattatgtcgacccgnnggataatatacagagcgacgcatgcagagttcgtgattccttatgagaagtatatcacaagcatcaggagtcctgtttgcataggcacaagatttagaatgcgatttgaaatggacgattctcctgagagaaggtattgtttctttcttgcttctttctgtgtgttgtgtagctaatattgttggacgagaatttatattcgatctttcttgcagatgcgctggtgtagtgactggagtctgtgacttggacccgtataggtggccaaactctaaatggaggtgcttgttggtgcgtcctctcatctttttggagtatctgtctattaacgtgtagaaaacttttcattttcgaagattgatatctaaatctttcacatttgtttggcaggggctatgggatgagtcttttgtgagtgatcatcacgaaagagtttcaccttgggagattgatccctcggtttctctcccacacttgagcattcaaccatatccaacgtctaacacgccgtgcacctgtttactggatactaccccacccggaa

SEQ ID NO: 35901 - DNA, 543 bp, Arabidopsis thaliana landsberg
  unsure (1)..(543): unsure at all n locations
ggttcttttgctatcttggattcaggttggagtttgttcgtccagttcactatatctgtgttgagggaagaggtcaagatatcaaagttttcaggtgattttttcagtcttaatttacgtacccccgtttgaatatgcagacaactgaactcacttcttacagatacactgcaccggttttggaagaaagagcatgattggggatggaaaaagtttatggagttgcctatattacaggatggattccggaaagggggacattttaaaaaggttttttttgaacctccttncttgcatttaaagctcaagttcaagtgattaggtaaatgccaagatttagagtctcttgagtgatatatatatataacacatttttccatgcgaccattaacatacaaccaacttttctcaactcttgtagagagtgtgtgaaccgaccttttcgctgccttgatggtcactataggaaggaacttcgtaagggttttttggaaaaagtggagaaaatgttcatgagctttgtggaagagaaaagaagcaagg

SEQ ID NO: 35902 - DNA, 1036 bp, Arabidopsis thaliana landsberg
aaaatggaagacagataaaaaggcatcaatctttttctcgtgaccactaaagacagtcaacatcaaaagccttattatgaatgttgctacaaagctgggtgtaactaccagattcagtaaaacaaattaaaagatcataggttgttcaatcaaacagcacagtaagaaactttactttggtcttcatgtatgtatcaactacagagtttgatcccaaacaaatctgattttccttgtagaatagaaacatatttcatggaaaatctcagttcatcaaaggcccaaaaaagaacaagtgctaaagctgaaccactacctttaggcgattaagctgctgcaagtggctggagagctttaagagggttcatgataacaccgtcgataagtccatactcttttgcttctttggcactcatgaagaaatcacggtctgtgtcctggtttatcttctccaggctttgaccagtgtggtatgcgaggtaaccgtttaggtttgccttgtgatgcagcatttcatttgcctggtttcagaccatgaacttgtgtggttaggtttcaaaatcatctgatattcaaatcaatctagtcgctccaagaacttaagaagatgactgggattaaaaaccgaaatataaaggcgaggatgaatgacctgaatgtcaatgtcggtttggccaccttgagctccaccaagcggctgatggatcattatccttgagtttggtagactgtatctttttcctacagttttacgaataaagcatgactcacatcagaaaaatgaaattcataagacttcactaaaagatttttactaatgattgaaaggattaagagactacctttggttccagcactaagcagaaaagctcccatactgttcataagaaaaccaacacagaaaaagaggaggatgtcataatctaggaaacattcaaccacacagataaaaaaggattccgagttttcgagaaacactatgtttttaactggtaacttttggtcatgaatccaacaaaagatcaagaacagttac

SEQ ID NO: 35903 - DNA, 2491 bp, Arabidopsis thaliana landsberg
gcgatggccacacgttcaattgcctcgtcgaaaatggattcagtttgtcattatattgctcgatctgtaagcgtagctggtttgtgttttgatttatccattgtttgaattagattttttgcctaattgagaaatatgaatcgagttcttatgtttggtatagcttccagtaataattatgtattggcgttgataattaattgatgttagatctatggtaatcagtgatatgtttggtggatctatcaatgaatatttgcaatttttgttctggatctattgattctttgcttatttgcgtgtagctttcgatatcatgaagtttttggcattagtgtattgtgttctttatgtaactctgttttactaaacctaattgggttttgggtgatgttgatggcggatatggtctctttatgatagtgttaactttcttatcagcgatatattgatgaatctattgctttatctcttaatatagagtttaaaatggaccggttttgttttcgtttgtgcagcctattgtgttgttgcagttgattctgctgggaggcagattcctatggctttcttggaacgagttaaggaggatttcaacaagagatatggtggtggaaaggctgcaactgctcaagcaaacagcttgaataaagaatttgggtatgtgttttttgatctctttgattggtattgaaaagggtctatgatacatgggcatagttattgatggacttctttttggcttctctaaaggtcgaaactgaaagagcatatgcagtattgcatggatcatcctgatgagattagcaagcttgctaaggttaaagctcaagtgtctgaagttaaaggtgttatgatggaaaacattgagaaggtttgattctgacccttttttctttttatcgatatagttttatgttgtaaaccttttcgaacagagttcagcttgtatgactttagtaccaggatcttatgattcgtaaagcattaactgtagagcggaatgttttattctcggttgtgaagacatattctgttgttaactcgtttatgcattcgtttgcaggttcttgaccgtggtgagaagattgagcttttggttgacaaaacagaaaaccttcgctcacaggtttgttttctaaatggttcaaagtcaatagacccacacagagacatgcaagagtttgcagctttctcttactgattgttgtttctttggtttctaactttaaatttgaactcgactttatcacaggcgcaagattttagaacacaaggaactcaaatgagaagaaagatgtggtttcagaacatgaagataaagctcattgtccttgcaattatcattgccttgattctcatcatcatcctctcaatttgtgggggattcaactgcggtaaataagtctggaacatttcttcccggcgttatcgactgcgctctgtgcttcccaagatctctgagaatatcttcattcagttcgttgtgctaccttttttttgtttttgtttttgtgatttctatattctcatactatatgtttcttcttagattgtacttcttgaaatttgttttgtataggctatatatattatacatatatgtatgcatgttcgacaatctgcaatgttgctattgctggtactgacactaattcttgcaaaccaatatttggacgatacttgtacttggcaatttactaatttctttggtctgttgatgagactctagttgcggattgcagtgaggtataagcatagtccacagccggttaatattaaatggagatgaatatgtaattaacacggtttcgtctgaccgattcaccagagtctctggttagttcattaagggtttgctcaaacgctttctcttctgcttccctaatttcggaaacattcgcctgattttctgagattttggaatttcttcgaatcgattgccatgccgagctcaagatttcgactgctgaaatcgaggcgacttgcggagccacctccggctgatgtcgcggttatgtgtatttgcaggaaatgaaagtgatctccttattgcggcaaatcagccacttcctgtcgactaaaactgtggtgctgcatgtaagaacaaatgcaagttcggacaaacgtgttgtcttggtcagtggttttacttggcttagtcttcgattctctacgcgtttcagcgtcaagttttctagatctctaaagctttcgtgctcgccaatataaatctctaatatcggtcccgtaagatcgaattagattcgcgtcgttttttaaggaaccaaaataatggcgcaacaatcgttgttctacagtttcatcgctcgcggcaccgtaatcctcgtcgagttcacagatttcaaaggcaatttcacatctgtcgctgctcagtaccttgagaatcttccttcctcgaacaacaagtttacctacaactgcgatggtcatacgttcaactacctcgtcgaaaatggattcagtgagt

SEQ ID NO: 35904 - DNA, 4075 bp, Arabidopsis thaliana landsberg
tgaaactcttacataatatatatatcaaaattgtataacaaaatttttgtattttacagacattacttaaaattgcataactacaaacgaaaaacaaagccaattttctcagacttttacagtttgtacttcgaatggttaagaaatcagattctattgatgtggttactcgttacccaataaaatagtaattgatcataatttaatgttctattgatgtagaagtcttagaagatacttactaatggacgaaaatatcgagaaaaacaaaaaaaaaggtacaacaacggcatatttccgtgagaataatgcgcgtggaacgattaatgtggctattcattgcttaacggcctttttagtgtcggctctaaggcccatttttgtctttgtgcaaatttaacggtgaatgtgtttgttcaggtgttttacattttttttgttttgagtgttggaacgcttttgttagagtttatgtagctcggattaagacaaccctaattggctaattgctaccgcctaccattgtttgactcagttatacgggcttaagatgagctgattccttatcgaacaaaccaaaaccaaataatgtcaaatttaagaagaagaaacttttcaagttacattttctcagaagcttttggttcctttgttactgactatttccttgttgaccaaaccaaaaccaaacaatgtcaaattcaagaacaagaatatctaacggcaacggatccaagacgatgaatttgacattaaaaaaaaaaaagttaaccagaaagattcatgcaacacttgagaggtacgaataagaacacattctccacgttcgcttttggtcagtgcacttcacttggttggtgattaaaaaaaaaatgtataaaatataaaaatgaaacttaatataaagttgaaagcttggtctaaaaatggaccgtatctgaaaatccaatcgacgtcgaattccaagaaaatagaaaagtaggatcatggtggcgatgatcatggcttcaaggtttaaccgggaagctaagctcgcatctcaaatcttgtctacacttttgggaaaccgaagctgctacacatccatggccgccacatcttcctctgctttacttcttaatccgttgacttcttcttcttcttctactctccgtcgtttcagatgctcgccagagatctcttctctctccttctcctccgcttctgatttctctctagcgatgaagaggcagagtcggagttttgctgatggttcggaacgagatccgtctgttgtgtgtgaggctgttaagcgcgagactggacctgatggactcaacatcgctgacaatgtgtctcaggttagatttgaaattgaaattggtgatcaaatttttgagctttcctctaatgggaatgttggcgaaagtgtgattgtccattaaaatttgaaacttgattagctttttaaatagttcagaatttacttacggatctctcattgttcttggcttgattcagctcattgggaaaactcctatggtgtacttgaacagtatagcaaaaggttgtgtagcaaatattgctgccaaactcgagatcatggagccatgttgcagtgtcaaggataggtctgtagcttaagtcttttgtggcttgtttgtatgtttttagttgagtcccttcaagtcctaacttttatgtttcacggattcaggattgggtacagtatggttactgatgctgagcaaaaaggatttatatcacctggaaaggtatcgattatagattgatcagtcttttgtaaagtttaatggatgagaccagcttttacacacataaagttgtacaatctatagtctgttatttctggtggttaatcatgtccttactgcattgatctagagtgttcttgtggaacctacaagtggaaacacgggtattggcctagcattcatcgctgcttcaaggggctatagacttatcttgacaatgccagcatccatgagtatggaaagaagggttcttttaaaggcatttggagctgagcttgtattaacagatcctgctaaaggcatgactggagcggttcagaaggctgaagagatcttgaaaaacactcctgatgcatacatgctccaacagtttgacaaccctgcaaatccaaaggtttgtggtttatatttttccttatttgtgtcatgatttggtttttgctctagtcatgtaccataagaagagaaatgaaatgttaagttagagttaaccagaaactcatctgtatttagagaatgcccacaagtgtgtaactgaagtggttttcacttaaactgtacaagcaaattgggaagtggctgatcctttgaaatcggcatgatcttctgtgaggttctcttgtcacgtttgtaaactcaagtttgaatatacgcagattcattacgagactactggtcctgagatctgggatgatacaaagggcaaggtggatatctttgttgcaggaattggaactggtggaactatcactggtgttggtcgatttattaaagagaaaaatcccaaaacgcaggtagatgcaaaagttcaatggtttcattcttagctggagtacattttcaggtgttatttagacagtattgtatgttcattcaagcaatataattcgtagttaactattcgatgtttacatgtaccaggttattggtgtagaacccaccgaaagcgatatactttctggtggcaaaccgggtaaggcttgccaatagatatcaatcagtaattttgtttccatgatttcgaaatatgatcttatattcacgtattttgctttctcttgcatttatacaggacctcacaagattcaaggaattggagctggatttatacctaagaatttggatcagaaaattatggatgaagtcatagcggtatgatttattttgttggattctgtatggttatacaatttatctggtttccacaaaacatccacaattcttgtgtcaatttattgcttaaattttccaattcctgagactcaaacttcatcaattactatcttctttttgcgtttaccagatttcaagtgaggaagctatagaaaccgcaaagcaactagctcttaaggaaggcttgatggttagttctttgcagtatttatgatttctgagtgggaaccacacggatgttgtggtgtcatgttgcatgtgaaaggtggaaattacacaagattcttacgtgaatgtaataatcttgtcaggttggtatatcatctggagctgcagctgctgctgcaatcaaggtggctaagagacctgagaatgctggaaaactcatagctgtaagtcttttcggtttcagttatgtgttatgtcttgaaaacaaaaaggtggtgcaaggggtctttgtgcaacatatagatggattgctttagatttcatcttaagatagatttgaggattattaaagtctcccgagtctgtgatccaatactaaaccaaagaatcaacaatatagtcacttggctagttagattgttaaatcttctaagtaggtaactgtaaatgaatctatgaatgcggtttttcaggttgttttcccgagcttcggggagagatatctatcgaccccgctgttccagtctatccgggaagaggtggagaaaatgcagcctgaggtatgaacattagcaacttggtctacttctgcaaagctctttctcccataattacagtctgagtgctaagcaatttatttttatcaataaggcattagtgaatgtggtttgagttctattttggatatccaacactagtctatgttttactcaacattttctgttggaaatcccaatgcttaattatattgaattgaacaagatgattgatcccttgtttgtttttcttgttaacctaaaaaatattaactttcatgagtattttcatatataatgatcaacgatgataggttagtgatataactctactttttcatgtagaccaatagaaaaaattacactcagaatttaactctaaaacatgtcaaaaacttatttttaatacaaattttgtggtcaaaactttggatgtgacactta

SEQ ID NO: 35905 - DNA, 826 bp, Arabidopsis thaliana landsberg
gattaccccgagcatagagataaagatggttgagaacacaccggatgatccaagacagaggaagccagacatcacaaaggctaaagaagttttgggatgggaaccaaaggtgaagcttcgtgaaggcctgccccttatggaagaagacttcaggctaaggctcggagtccacaagaactaaaactccatcaccgatgatcacacgcaaacgtgaatgcactacataacccagttctacttttcatattccttggtgcaagtggtttgtttcataaaatatgtttctactttccacagtcagaaattattcctagagaaaaataaagattatgaacgaatgctttttatatttaaggaagataaaaattactttcttgccatatcttacgcagccacagtaactccatttttctcaaatcctgaatgaagtaaacaactttggcgaagccaatacgactatagacgttacactagcagctcaaaatccaaacatgtctattgtctaatcttgtggcttgtttatatatagggtttgaatggttacggcggttggggtagacaaaaccgttaacggatcagatcgctttttatttaccattcatcaattatagtccgcagtggtccggactaaaaaaaatagaagaaaaccgcagcggaccatctgcagaccaattttacatacaaataaatttggtctgcagcggtttattgtccacccaaaaatgaagtggactaaaccgcagacaaattagaccgtcttgtctgctgcatccattcaaagccagaatgaatagcggatacaaagccgttaacaagacactatgta

SEQ ID NO: 35906 - DNA, 4464 bp, Arabidopsis thaliana landsberg
gaccgaaaggagaagttgaattttttactcctctctctcttgcccctacttgaaacttgttttcaaaaatgttaactacatttgatcaatatacctttttgttatgattggtacatacttcctgagaggtatacatccgagttggtgttcgacttcataatctatgtattgcctgctagttcacactttaaaacctgtgtcttaaatttatgtagtgtgtttagtagctgctctgccattctatctttttcgcataaagttcttcatggtaaattcagaatattatttggatgttgtgactgaaattgaggatgcgggctcctagtacttcccgtctcttatgctttttgggttatcctacaaaaactttgatgtaagctataagtgttaacaggttcatactaatgctattaggtccattggtattgccttctgtacaacttgatggggcacgttccgtttaagattatcattgtaatagaaggtaacatgtttttggttagccttcaggttggtcccgtgctaaattttaaatgaaaaaagatctaaagttttaattattagtttattgttcatcccttgttgactttgcatagttccctgcagggacttctcgtgcttcatgtgtgtacgcctattggagaaagtttatctgttttgaattgttatattattaacatattgcttataccagaagatggccactgatatgttgtctctggcctattcgaaagatgttgcgacatcttgtaaaatatggatgagaaagtttctagtatcaaattaaacaagcttacttgtttgttattatgcagacgccataaagataagaaggaggataaggtagagcctgaggctgatcctgaaagagatcagagaacagtttttgcatatcaggtatgcctgtttttatagctatggttcccttgaaacattataacttgatcagtaattgatttatttttttgtgtacaacagattgctttgagggcaactgaaagggatgtatatgagttcttttccagagctggaaaggtttgtccattcctctgccggtttcatgttgccatataaatgttgggctggctggttcaattgaatatttttaacacattgcctcctaaatattgttttaggtgcgagatgtacggataataatggatcgaatttccaggcgttccagaggaatagggtgagtttcaaacagtttgactctctaagactttctctaagacttatgtggctagagcaagttcttctttatgcttaagaattttaaactgtcggtacagtaataagctttaaatagtttctgagcagataaattgtacaaattctatgtagtatcttgtttgagtactgttttctggattctgagctgttcttgcttgcaggtatgtggagttttatgatacaatgtctgtccctatggctattgctctatctggacaacctcttcttggtcagcctgttatggtaaaaccttctgaagctgagaagaatcttgttcagtcaacaactgctgctgctggagcaggggggatgttgggcccctactccgggggagctaggcgtctttatgttggtaacctccacattaacatgtcagaagatgatttgcgaaaggtaaacaatttcttttcctggcagctgctttatgttttataaagaggaagttttatttgaataaatgtcagaaaatcgtaagagcagagtttttcctgtatactacaaatcatatacttattgagctttggggatcatagatctgttttgcaattgctcattttcggatcatagttcgcgttcaggtgacatattatgctttcttttggcattcctaggtatttgaatcatttgggagtgtggagttggtgcaagtacctcgtgatgaaactggcctctgcaaaggatttggttttgttcaggtaggtagtgtcggtgtcagttttaattttttgtcttgttcttgctactgtattcttttgattaacagaattcttttctttttcaaaaccttcaagtttgcccggctggaggatgctagaaacgcactgaatctaaatgggcagttggaaattgcaggtcgtgcaatcaaggtaggggtcgaacttatttttttataattttcaactgatatcggtagtatagaaggtagtagagagcttaagctgtgttaagtactttctagacggattctttctctctgtggtgaaattatgatataattcccgaacagacatttatgttctttgtgcttagtgatgttacattattactttgtatgaaggcaaattctatgagcagtgaattattttggctgatactttgagcagtcaactatcttaaatctgtctcagtggcttctaaatatgcatgtaacaccacattatatctgttgatgatgtagttttacttttcattaggtgtcagctgtaactgatcaaactgaagtcccagaagctggacagacgcaaaccaccggtgatttggatgatgatgatggaggtggcctggttagtacttgtcttcatctccctagcataacttccaaaagtggatatatttcatggatctatagggagaactcaagtaacctgttttacatgatgtatatagttactgcatgatgtaggatttggtatagataaaatatgaacagaagataaaccaactttaagaaaagggtgttaatagacaattttactatgtgtaagatccacggtggagtaggagaacatggagttatctttccagtttccaacaacactgtcataatcattaaatgcatttgttctcttagccttacctggttgcttattctgcagtctctgaatgcacaatcgcgggcacttctcatgcaaaagctcgatcgcagtggaacagcatcgaggtttccttatttcctgttactaatttatgtttttgcagtttgttttcgttcatttatgttccactaaatcttccaaccttctctgcagcactggccttacgtcagcggcgactttcaacggtggagtttcacaatctcttcgttggcagctcctgctcttgtacaagggtcttttcctgctgttgctggactcgcagggtcggcatttattcccggtgttataccagctggtttcgacccaattggtgtccccagcgaatgtctgctgcttaaaaacatgtttgatccatccacagaggttagtggtctgctaaatagtttcttttggcttaacaattcgtacctcaagctatttcttctatacacttgtatctgtttggcagactgaagatgattttgatgaggatataaaagaagatgttaaagaagaatgctccaaattcggaaaactgaatcatatctttgttgacaagtcagtgagcttcagggtcttgtaactttctcatctcgaaaagagtagactagactggtctctgactgacgactttgaatctctgttgctaaaacaggaacagcgttggttttgtctacctgagatttgagaatgcgcaagcagccataggtgcacaacgtgctctccatggaagatggtttgctggaaagatgattactgcgacttacatggtatccaaaaaaaataacatgacttgtgttgtctcagtttcttcgatttgttttcgatttcaattatattactaacaatcttgcttgatttgtcctttgttttaacagactacagaggcttacgaggccaaattccccgagagtaaggtcgtttaaaggtgccgagacaaagtttttagtatcgttattaaagcataaatgaagattacccgcttcttgtatttgtaagtctcggtaatgtgtgtgacggaaactttgacacctttcactttcagtatttgtattatgcgaacatgttttagatttcataagaatgtttttgacttttgactttttatatgggctattaactgtttgagcattccatttgcctctactccttttactttaccggtcgacatcacacctcttccctaaaatgtttgtcataatggagctatatgaaaccgggaattttgtttatctataaccggttatatcgatttggaaaggatgcagtccagagcttttcaagtattatgtaaccatacattgtgctcaaaccatcgtgagagaagaatgtacttttgtggaacaatcatgaaggggacggtaaagtcttacagccatggcagtcagaggtctgttgggtacaggcccattggatgttgtctaactcgcatgagagaatttcaggtttgattatgatctacttccgaataaaacttttgctttgttgaatccaaacagagactagaggggagcaaaccagcagctgttattgaaatgagtgttgagattctaagattccatcatcttttgctcgagagatcatatagtctaaaagaaggatcaaagacacgtttagattgtcgagttcgctatgaagctgtgttccacttagtcga

SEQ ID NO: 35907 - DNA, 3901 bp, Arabidopsis thaliana landsberg
ctacaagaagacacagattttagccatagtaactgatttgtggtggccaaaataaaataaaattccaggacataccaaaggataaaataattgctttgagtctgggacacaaaaacggtataaatggtcaaaggtttgatctttatataaactagatgatgacgatgattgataacgaagatggctactcgaaggaaaagcaagtagcctcgtcgttggtgtattgaatttgaaggaataaagaatcgagcaaaatattcctcttctgatgctttttggctaaaccattcttcagacttgatcctttagctgtcttagtttacagctttgtaaaactccagacgccacagccaactcaccaatctcaatcttgttcctcctgcctacaagttagcttatatgtacatatgcgtatgaattcggaaacttcacatgataattccttggaagcagcattttcacagtctgttctttttttggggatgattttcgaatattccctatcccaatccttgacggttgtatctaatttacaaaatcaaatctcttggatgcatgttcaagtaaccggtttgaatttggaaaaggtctttttctttataatattatcacctatccaaattccggatgttgaaaccaaaaaaagagtaatacctaaggttaaaacaaaaaattagtcttaaacttaataaattactctttagtattttcaaaataaatggaaacaaaaaaaactcaattggggtttagaatgcaacgttgacctcgtttcgctggctaggcatgagaatcaataaccggagatgaccgtcttggcgtaatttgacaagattcctttgttgtgtgaggatggcattactgttgcctaataaaacatgagctataacgtaactctctcctttctcattggcaaactcccattccttcactgacaaattgaaatagtctttccctgtggatacagttgctttcacctctacgtactctttgttacctcctctgttttcgatgataaggtcgtaaggtaatccggtttcactatgctcattaacccatttaaccagtgccttcttgccatattttgcaacaaagtatctgtaagctatttcttcaccttttttaccggactcttgcgcctgtgcagcccaaagtgcgccggtatgaagctgatttcttatgctgaagtcagttgagacggaattatgagcaagagtcactggcgttgagcaactcttcgtcgggtttggcatattcgctcgggaccttgtgcctgtacaatcattatatccagcaaccaagtttgtatttgtgatttcagtcggtatctgttcttcaagagcctctgttacaagctccttctgattaaaagggaaaaaaaaacgaagttactattctattacgggcatatgcaactttatccttcagcaaaggaaacgaaatgatgaaagattataaaagcgagataaatattcaatgaaagattgaaacagatttcccactaaaacaacgatatttgaagaaagacaatgcaacacttctggaagagtgagctagaagctttttgcagaaggctccaaaccaggtgtaaaaaaatattgagacaaactacatgtcaaattcagatgtaaaaggcaaatacgtgggggaaattttcagaaatgaaaccaggtttcagtttcagacattcctttacagatgtttcaaattcaaaggacagaatctgcaacctgggatattggaaggtttccatcaattaattttagacgaaaacatgtacacgaattcgggactggaggcgacaaggggcgcaactattatcctttttcagcctgcctcagtgacatattgatgtgcacatgccgaatcaaagagcaaagccgaactagggaagtttccacatttgctgagctcaactccaagactttgcaactgggtgctaagtcttagttcaagagcagagatagaaaaacaacaagagcaacaacttaaaacactgtaaaagtatgagtgaaaatcgtctaacttttaaattcagcatttcttcagaatttaaaaggagatatcatagaaaatagtgagcctgtgttacacggtgaaactacaaaaaatcttttcaaactgggaaaagcaacacaaagcaaaataagaggggaaaaaaatgggtaaagaaaaaaaaagtaaaaacggaaaggtgaagcaaaaaatgagtatggatgtaaatatatagcaaacgtaatctcgcatccttcactttgaaaatatatgtgcagttatttttcataaacatttgatggattaaaaaaaaaaagtagtaaccaaacatccatctgttctatccaaattaggagataccagaaaacagctatttcacagagagagaaaaaacaagtgttgcaaagaaaaaaaagacgtcagattaggaggatttgacctccaagtacacttaatgtgaatggcatgaacagaagtaaataggaggcattaacagagatttttgacaaaattcttcaattgaattaatgaaagcaagaaaacaagaaaaatgcaaaaaactttaaacaaaagtagtatgaccactcacagcaacatttagtaatccaacaaacggaaaaaaagacatcgtttagctcttttaatccgagctaatccttcagagcccccaagttataaaaagacaacattttctcggcaaactataaaaataaaagatagtaccacagctcacttaagacaatatattaactctcagattcaagcaaaaaagtttatttgataaatgattcaaactgtcgtacgtacaatctcaacatgaactttaccgttgaattgcatagctctttacatgtgtccttccgattaagttgaaacgaaccttcttatatctcttttggaaactgtgaaatcagactcagaccttgtttgtttttccatccaaataattcatccaaatgcagatgaaaaatgatgtttgttttttataatttaacaagtatttggatggatcatctggatgatacatctgaatgaatttctaaatttagacaaatttatgaaactcatttggatgaatttgattgaagcatttggatgaagatggtttattcaaaaataacaaaagacagatatacccttatttataatcataaattaaatcatgttattttctatagatttcttaattaatatttttaaaattacatattgaaacaaaaaaaaccgcaaaatcatattttcccgccaaaaccacaaaatcattttttcgccaaaaacgtaaaatcatgtttcccgccaaaaccgcaaaataatgttttttccaccaaaaccgcaaaatcatggtttttccgccaaaacagcaaaataatgttttcccgccaaaaccacaaaatcatattttcccgccaaaaccgcaaaatcatggtttttccgccaaaaccgcaaaatcatgtttttcccgccaaagccgcaaaatcatattatcccgccaaaactgttaaaccgtattttcccgccaatatgtttggtattgataatgggtaatgatgttgaatatttgtcatttgtcaaaataaaagcatgggtattttagtcatttttatataaatgagaatgtggatgaactacaaaatatcaaacaaataaagatccatttaaatgcatcatttagattaaattataaataattaaacaaacatcattcaaatgtatcattcaaataaatcatgtaagtggatcatctgaatggaaatgataaatgatgaaacaaacatggcctaagtcatcaagatctcatcccaagatttgggccatagctctcgtgcttaccaccgtccaagccatcgttactatcgtcggagctcaccatcatcgtcgttgctcacaattaccgttgttttcccgatcc

SEQ ID NO: 35908 - DNA, 2033 bp, Arabidopsis thaliana landsberg
ctaatgagtaacatggcgaaagaagctttagatgatgcaatgaaggctcaaggcatttctcctgtttggtatgttgcattgtatctccagtctgctgctctttctgtcctgggaatggagaaggaatctcaaatcgcacttaccgaaggatccattcttgaagccagaaagatttcagcttccacacagaactaaagacttattcttttgggttttggtagaagatgaagaagctttgattaacaatccaaaggtaatgtgctgtctcattaagcatattgtgtaaaaaaaaggtttagatgttaagcatattgtgtactaattaaggcttcatgggtagaagctaatccattgtttcagttgatacatataaaacattgggatgaacggataccaaagtgaataatattatacaaacaccactaacaaagcttagaatgtgttgggcaactcaagctctgcctccacttgcataattgggtgagagcttctgtattcttcctttgacattccagaataaacaggttcagtgcctggccctccagaggttatgaagttccagccaaatgccgaccctccaaccaccttgtcgccatctccatcagagctgtgcttctcagtttcagatgatctcagtacactagtagtagtagtagtagtagtagtagtcgcctttccgttggataaagagtcgctcttagctgttttctcacgtttgggagactctccaatcatctcttcgtacagttgaagcataagcttcatctctgcaaacatcatcatttcaagggacacagaatcaaacaagttgggccttttgttgagctaagtgaaaattgagataacaaaagaagagagtgtaagagcttctcactctcttgaatctcgatagctgccttagagttcctcaagtctggagttcgtaaaacctgtagcacaccacaaaatccaagttgttatgtataaaccctttcccaaacaaagagtttgaatgtttttatcacattatggtccaacctcgagaacgtgagggcgaagatctttgacaaggagacgcatcttgtagtagttggagctctcgatctgaagattcgcttccagcgctcgctttcttcccctggacgacggatctgtggtaactgtcgacggaggcgcagtcatctgagctggctgagcaggcgaaggtaactcagctgatctctgatctgcagatgtaggaagcggaggagctagtgctggaagagatgaagtagcaggaggaggaggttcggtgactcgagtcgccggagaggtcgatttctccattttcaattttcaaaggttttcaaccgccgaaagagatcgccataaatcaacgcagcggggatcttaaaaacgacgccgtgaggacttgatgagatgtttgggcctttctgggcccatatttgaagtgaacgaaaacggcatgaattttcttacacagatcggattgtgtgtcgttttaccaataaaaaaacgtataacatcatcattgtgtcacttgaaaaaaaccaaaatcaccggaattgttctttctgggaacgaaaacatcgatgaatccccaaattgaaaaggtggtgaaggtaaccagtgtggtggcgactgctgttgtatcgtacttcctcttaaccgctgattacggtccagagcccaacgctcttgatcctgtgagttccaatttcttcctctctctctctctctctctctctctctctctcgaaccgtcaagcttctcgatcatcatcgcttcgaatcgcagatatttgctacagcctacaatcacttggtttcaattgatattggctagatctctttattagttgttagttgctagggttgaattttgatcttagaaaactttgaatgagatatgaatgttcctgacttctatgctcagctttgttgcgtttgcctggatcttcaacgaatgagtagttttgctgagtgcttagtcctagagagagtcctgattactcatttactcttgaacaccaaatcaattttttatgggttag

SEQ ID NO: 35909 - DNA, 1041 bp, Arabidopsis thaliana landsberg
atgagagcctataccggtggtttcgacaatatcagcctccacgggatcgacttcactggctctttgctttcacagttgtctgcaattagctttctttcttcagggagcaatgttggatcttctaatggtgaactctctgcctataatttgtaacaagtaacaacacacgtcaaatcgtcaatggtaatgagatatgggatctacaaatagttaagaacagtagaaaaagtctgaccttagttagccacagagtcaaccatacagttccaagagacccgaaagaataaaacacagaaggccatccaaattgatgaatcaagaaaggcgaaaaggctaaaccggtgacagatccaaggtacattccgctgtaaacaagcgcgagtgatctgcttctctcttgcacaggaacccacttcgacaatatattattcatagcaggcattgcaacaccctggagaacacaaatgagaacttacttctccttatcaacacacacaaatccgagactgatatctaacatcactaagagtaatcacaaacctctccaactcccatgaaagcacgaacaacgagcaagtaaggaagaccgagtttagcagctacaggagtgagaattgtagcgattgaccaccaaataacaccgaatccaagaacccttttccctcctacagtgtctgcccaaattccaccagctatctataatatcaacaaaccactgattcaactacacttttgatttaaatgtgaaagctagtgagactcatttaaaaaaacattgatcatctaaaaatagaaaccctaattaaggaatcagggaaaaaagattacctgtgtaagaaggtaaccccagaagaaagaagactgaatcagaccaactgttgctggattccaaccatactcagctgacatcggaagtatagctatactcatattcacctgttaaaacatcatctgtcccaaattgaataactcttcccaatccataaaaatccaatcttttttgctacttactctgtccatattgcagagaagaaaagctga

SEQ ID NO: 35910 - DNA, 1287 bp, Arabidopsis thaliana landsberg
aataatgtataaggaagatgatcaaggtgattttatttaggattttatttttttagcaatacatttaataagtggttatctcatcaacaatataagtcaatttaattcaatcaataaaaaacaaggttaatcaatttatcaaaagttatttataaaaattatcgtaaatttctttaagaaatagacaaaagtcaaaagcatttataatattttggatataacttttggccatatgcatggaccctataaataccatccttgaagaagaagaaaaaaaaaactccgatgacggaagagatgagtaaagagtctcctcctcctcctcagacgtcgttttcttcgttaccggacgacgtcgctctcgattgtcgggctcgtatatcgagattccattatccaactctttctctcgtctccaagggtttcagaactctcatcgcctccccggagctcgaggccacacgatccttaatcggaaaaccagagaatcacctctgcgtctgcttgaggctgtataaaaaccctaatcctctctggttcatattttccccaattccgaaacagaaattgaaacccatcgtcccatggtttcctaaccaacaatatcctcaatacccgaccgttgtctcaaatggttcacagatatacataatcggtggattcgttaggagaaggagaagcaacagagtgtcgatttttgattgtcgaacttatcaatggcgtagactccccaaaatgcgtcaacctcgagtttatcccgccgcgtctgtaatcgacggtaagatctatgtgattggaggcttcagaggctccatgcccacagatattgagaactcaggagaagtttatgatccaaagaccaatacttgggagccttgctcacatcacttgatctcactgttcaaaatgttttcaagaaaaaacattactttacgaccaaggcatgcttagtgattaataaggtgtcgtgcctactatatgtttccgatgggaagctatattggcgtgaagacaaggaaggttttgagtgccgtaaggtttatggacttgcagaacagtcctctaatctgtttcgtgtggtggcaaactccggcggcggaggaagagtgacagtttggtggaagtcgatgacaaaaggttgcgagtttgactgtctgctgactaaggaatgtaaaacagagatttggtgtgcagagatttcgtttgagaaacgcggtgtaggaaaggtttgtggatcttgttgaatggtctaagaatgtctttactaaggatgactacaagactata

SEQ ID NO: 35911 - DNA, 771 bp, Arabidopsis thaliana landsberg
gtctgtctcagatagtgatgtcatcctgtaggatacccataatccttcaagctgtgaatggaaatttggtatcttagatatatggtatagttcctagatgacaaaatgtaccaggaaatagaagaattaggctcagaagcacgtaccgcaacatgagctaatgatgactcttcattaacactattacgtaactcgagaagagcataattgatatcaacagccagtatggtaactgtacgtgacataatcatctgactattcaagttgactttgtcagccagtagacgcattttagctttgggaccagaactgctaccacggaaatctggaggtagctttggctcctcaaacaaattcatggatgtgcaacttacaataatatcatattctttgtcagacatcacagcatgcaagaaatcaatctgcacagcaaatattaagaaaataattagtcctaagaagtgactgctgataccagtagttaggagaaggtaacaagtttatacatagtacttagggatgataaacaaaaatcaaagacactgtaagatgactcccagtttcaagcttgcctaaaaggcaatgataaatataaaatataaaaattgtgattatttcatagcaaggcgatccttttaagacaataacgtttataagtatagtcatccctaacctagcaatatgaagaatcaaagaccaaaaaagaaaaaatgctttgtttaaggtccaggttcttgacaccaaaagcaaatattgaagtacgtcaaatat

SEQ ID NO: 35912 - DNA, 1791 bp, Arabidopsis thaliana landsberg
gagtagtatttgacgatttatctgttgtcattttgtcaacactcaacaatatgcttttagctaatattcacattagttcctccaaatgaacatggttaccatcagtccacaccacactttctagctaaagatttctattttttgtattttcactaagaaacgccaacctctcagttcaactcagctatcttcttcaggatatagagaaattttctgtggtgaaacaattaaaattaccaccactatcaaacttcacaaatcactgcatggtagtttgtcgttcttgccaattttagaatttttgtattggaagggaaaaataacaagtcaagttttcatgccaaaatacattataagaatatgaatacaaaaggttacaaattatgaaattacaaacagtacacattcaaagcaaaatatagataatttccccaatgctttgcaaatgcccacactctgcgcctcatagctcgtcctacacgaaattcagaatcataacaaacttacatttttagaacagttaagatgattcagtactaaaatgcataacccattcttttaaatgtggatcagataaaaggtaccccttacttggtaatctcccatataatcacttgttttcggctgctaaacaaatcaaaccaagccaaaccatttccaacaatattgactcactaggtttccagataaaacagaggttgagaagggtataattcatttggactcaaataagtacttacccgtttgtaacgcctcctcctgtctccataccggtggtccctttctttccgcgtgcgttcaccttcttcccgtgctatccgagcttcctgtaaacgttaatttgtatggccatgctcgttaactaggatatacagagaagacttgaaaagagaacaagaacttttttgtgaactacaaacctcatcttctctagcttttctttctttctctgcttccgcaaataactccttctcagactggtgcatatggccaagtatatagcatatcaaattcactaataagacattttcgtatataatagcatgcagaaaatccatttgcaattactacacacttgcaagatcaaaaaacttctttgattttatccaaaaagaagcaaaaagatatacaaagacttggaaatctacctccctgtgttgggcaaaatagtcatccacgatgcttcttgcatatgccgggtcatcgcagatcaatatattgtcaaagattgagccagccttcacctgcagtgttaagatcatttttttttcattcagatgcactagataagtttgatccctcgtctaaaatgaagactttttatcagatcttttctgtttcttttggttttgttttcaaccctaaaaatttggatgacctatatgtacaagcagcatatatatgttaaaagaactaattggcagtgaatattatataaatattcatccatatctggtgatgatgtagtgattataaaagttaatatttgatggaattcaagaaagctctagaacttacctgccatacttcaatgcctgcatatttgatagacttcagaacgtaaagatctggatcatcttcaaattctgtgcaaaaccgagaagctcaagcttagtatttataacaagaagaaatccagctcaaaatgaacatacacattaaataggtagaaacatgcctggattatctatccatgggttcttccattttcaaatgtagttcgggttcttgattctctgtaggaaaataatgttttgagaaatgtcaaatggagaagaagaaagaacagta

SEQ ID NO: 35913 - DNA, 4351 bp, Arabidopsis thaliana landsberg
  unsure (1)..(4351): unsure at all n locations
ctgtttttacaaacatggtttccttacttaactagacatgttttggggaaaatagtaataccaatggcaggagcattatttctggtaacactagattgtctggtaatcactacatatacaatgcagattatgcttacaggcaagtgcgcaaaaaaatttggtgggttatcacgaggtctatatctaaccacatttcagacaccaatgctacatagagtaacaatgtattcagctgttaagagttatccaaagaagaccagtcctcatggagaataagaaaaccaagaatataaatacagtaaaaaatttggaagtaatgcagatgtttaagataagagtatcaatttacctagagaaataatgctgaaaatcacgttttgctaatgagtccttttttcttccaatccagcttatcagtccctaaacacatagaacacccaataataaaaagttatcagcaaagatacacctgaaattatctagcagttaaaatgacttacctctactacttcacacaagggttgataaatcattggctgcgccacgctcatctgttctagttcattctgtaattctgcataacacttaaaccacattagtaaaggacacgaggtgaacaagaccatgaatatctgcaaggatagtttgaatggtacatactgaaaagagtgtcttcttccaaattaatgctacctgcttcacgagcaatgtcttccatattgctgtggacagtgaaagatttagtagacggccttatcatcaacatcaaaagcatgctaaaaaaactacattcaaccagcaaatgctaagcgtaaatatatcaaaactaagaagggttctgaaacttactgtgcttcatcaaaaatgataatcgctcctttcagatctacttcaactcctgctcgaatgacaggattaactatataggaataagggcaaaacaccaattgtgcgttctcagccattgaccaggaagcaaaatatgggcagcctacaagaaaatcattagagaataagaaacagaaaaacaaaatcaattaaaagtacagctttacaaaccaactctaacctctaacattttttccaacttttacaagatcttcaatatcatgaacctcattgtgacctctgggctgaagtgatggatgagatgtgattttattgacgttcctgcaaagttaaggaacacagttacatggtttgacgagctaacaacaaaagggtgaaaaacaaagaacttatattatcaggaaaaactcacttgaatgcataacattgtttgtttgccttatcttttaagagcaaccgcctataatatgaatacaagttaatttagaggatatggcgtaactgaaaagaatcgtaagatggtaagaatgtggttgaaacataccattcatcatctacattgtctttcccaaaaacatgacgattcgcgcagtaatgtattatagaagccttgcacaatgaagacggaccccagagatatgaaatatgatcttgattaaccattaaactaagcagtgcccacatgagatctaaggctattaatacataccaatacagccatggggactctgcaaccagttttcctatgctcacgaatcacttgagtaatctgagaatgagttcgtcttaaatgaacaaaaacaaacaatcaatcagtaagaagaaaaccatcacttttattcacaacatttccaaattgctcatgttaaagcttacgaagcatagtatatggtaggaattttggttctcttcttagttgcagtttcagctttctccacatttgtagatgcaggagtatctattcacagatttaccactattcagagataaacccaaatcataattgcaatatcgttaagagtcaatgacgaacctgagggttgcgtttccggtatgaatccacctccatgattcaatggatcggtggctgcttcaggggcagctttcgaatgagacaaatttccttttagaagccgggatttatagttctgttgccaagcgagaactgagcagagcaatgacagagatttgcccgtgccagtgggagactcgagcaacgcgtggcagtgaccgtctctctgggcacgatcgagcgtagatatgacccggctcatgaacgcaagctgggttccatacggttgataagggaattcaacttgaaggcctccgatttggtagacatttttagggtttttggagtttagggtttgtttcacttcttcctttgaatccgatttgctggttgaggaaaccatcttccgttatctagatcggtggattcggtgacggaagaaaaaacaatatgtaagtaggggaattgagtttcgagaatttcgtgttgttgaaattaagtgggcgggaaaactttaccttctttcgccgttgtttacagcttgtctggcaagctaagatctcaaaaacgacgtacagtactgatctgctaagaaagaacggcaatactttcgctccattgacgattgtgcagaagtgggcttataaaagcccatttattaatttttgtcttttgaaaaagttaattaggcctataaaggcccatttaccagcaaagcgaaagagaaaaaaaaaacaatcgttaagacgattcgatcttttgctgtgtcagtcatttatacgattttttttttgttaattattcatcatttcatctgttcgaatcgggcaattttcgtctggagaaatctggagataggattttgatcgatttctaagctctaatctcagttttttgggtagctccggtgatccttgagatggcgggtcagaatcctaacatggatcaattcgaggcctacttcaaaagagcagatttagacggagatggtcggatcagtggtgccgaagctgttggattttttcaaggatctggtttgtctaagcaggttctcgcccaggtgaacatttcttcttggatctctctgctttctgattgtttctcgctagaaagatctgatttcgttttctacgcagctgatttgggtttccaaaatgccgtgattttgattgttccatttgaattgcattctatttctgagattttgaattgcctatgaacttaataagaattcacggggtcagatttgagtacatttgtgtggaaataagctttaaatctttggtgtaccagtaattatgtatttgaatctggaaaaaatatctggcatacagtttccttgaaggggttctatttagcggtgtttgctatataaaattgtttactgatcagttgtgttttgcatttgtagatatggtcgctttctgatcggtcacacagtggtttccttgatcggcaaaacttttataattctctgagacttgtaacagttgcacagagcaagagagannnnnnnnnnnnnnnnnnnnnnnnnnnnnnnnnnnnnnnnnnnnnnnnnnnnnnaccacctcccaaaattaatctttcagctatccctgcaccccgacctaatcctgctgctacaacggtcggtccagtttccgggtttggaggaccaggggctccaaatgcgattgtcaatcagaattattttccacctcagcaaaaccagcaaatgagaccaaatcaaggaatatctgggctgacttcacttagaccagcggctggtccagaatatagaccaagtgccttaccaggtcaattccaaccagttcctgttggtagtgttacgcgtcctcctcagcctgttcccactagtgtatctggtcctggtagttcaacgttcaatcttaatagtttgtatgctggagctggaaacaccagcggatattcgtcaggctttggagggggcagcttagcagcaccttctcctggcttaaaacaagagtcacacattgatccaaaggcgcttgttgtatctggaaatggaggtgacatgttttcctctttccagcaaaaacaagaacccactctgagtaattcttcaattagttcagccattgtccctacttctgctggaatccaacctccaacaaagcctaatgctctcgattccctacagagtactttctcaatgctaccttcaggaaatcagcttcagcagccaaggccagcagcaagctcacagcctgcagtgtcctcacaaggtccatcctccggtttgccacctggaagtgcagttggatctggccattctactcctgctggaaataatcagcctccgtggccaaaaatgaaaccatccgatgttcagaaatacacaaaggtatttatggaagttgatagtgacaaggatggaaaaatcactggtgagcaggcgaggaatctatttttaagctggaggttacccaggggtaaggattttcaatctcgcagtctactttacataaa

SEQ ID NO: 35914 - DNA, 3373 bp, Arabidopsis thaliana landsberg
tgactaattattagtagacaaagtgaagttcaatgattaaatacgtcatctagtgtgcaataagatgttttcaaattatatatcattcctcctccctcatataactctgttaggctaaaattccattcatataccgtcaattgctaattaatatttttcttatcagtcacactgcaaattaatgttgtatcatatcatttcagtgtcaatattatctgtaagatttggttttgacttttgacattgatatatgttataacacaattttgaggtcttattttatgcccccaaaagaacaacttgagacctgattttggttggcttgcgtgcgagctaatcggagattgccttttctggtttgtttcgttgacaccttttgaacaattcatcacatattggtaagtagggtccgcaacacatatatattatgaatataatttttgaagtttaacaagaattgtatcaaagaattcattatagttaattggtctagctcccccctcgaccacatctccccactatcccactcatttgtctaactcatagctaccaccaactttcaataatcattaaatagaatggttttgaaataattgttttcatctaattgtttaatttgttcccggatggataaggatatggttaaggctagttggttcgaattgtcattcattaatttacattttacatataaaatatagttttgagaaagtttagcttcttttttatgaccaagaaatcattgatcttactgactgatcggaagtaataacactatataactttgctgactatagttattctgtgagcaagaaatcattattcttcgatcgaaaacaatggtaattaaacaacgtttgcgaagagttttggataaggttttagatattgcattgcatcacttcttatataagctttcaattacctttctaatcttatcagacttcttgtcggatatcatataattaaacttttattataaagaatcataaataagaccaaaaaaggtgtagaaatagaataacacatggatctagctcgtccacaactagtttccatgttcatcttgaacaacatactacgaatcaatcttgtcgctgaccgtttcttgtccaaatagaggcgacgtccctgtgcgtattccatgctcttgaggacataggagagaccaaaaaccaatatgacttgtcaattatattccaatatttaatctaggaaaaatataacgattacgcaaccatataaatacctgtggacatagttggtgatttgttggactgttgcatcgcattttgacgctttctcaaaatactaaccacaaacgctgaccagagaattacgaacacgaaggcgaacgtaacgcctagaatgagtggtacgttgttctttttctttcctcctttgcatgtataattaagttaattatttgtctaaaaatgaaaattgtatccttatctatacacgttgataaaaaaaaaatctatatttagtaattatattttctgatatataataatatccaatcaaatgatataatgttacctatatactgttaaattttctatatatgagttataattaatttaatttgttttgtttttgaaactcaatacaccttttaacgtcagaaaatgaaaacacattcactatcttcaaaatagtacttctttaaatttaacttattaccttttggttgtttactaaaacttgggaaaatcttgtgaatttttgtgtgtgatgtaatttgtttaattgaccaggaaaaaaagttattaataaagcatttacataggttcaataaaaacttacctttattactattgccgctttggcccccgcctccgcttccatggtccttgtagttacttatcgaatagacctccaaaccactgatgatggttggcaaacccgagtcatcggttgacttaaaaactaactgggactccgaactggccattatatctcttaaaacgacttgagtcgctttcccaaaaactggtactatgggatgtgaacccacttgcatgccgtccaagaaaacggtgaacgatcgtttttgggtccgacctagactctgaggctctgaaaagtaaagagctaagtataccggtagaagggtagaggggagattcaggccggacattataaagccgtctcctgacattgccttcgtcataacaatctctggcggtttgttcaacgctccggtgatatctatggatggggctgaggttgtaagatcgatcagtccgggatggtcttgggtccccttttcaggtccaccacctacccaaaggatctatcgggtagctaaaataaattttcaagaacccacaattagaaaaattatgggtttcactttagttaataaatcgacatgagagtgtcatgagactttaaagatactacgactaattgatgcatatatgaataatatatccccaaacattcgaggaccagttttgtgtgtaccttataagctttgtggcaccgtacgcatttcttttatagagaatgaaaccttcttcaggaccaagatcgtcatacatgccggcatcgaagcggtaaacttcaatggaagatataaaagggttatcggacggagacgtacggacgaggcaaacgctgatattctcattcgccggagcaaatatcacctcagagtaatggaatgtttcctcgtcgctgaacaacgagtcaactgtcatagcaatagaatcacggtgtttcccatcgtaaaccacgtcgaaagatggtggcgagtaattctcgtcatagtttttgtagtaaaatttcgtcctcacgagggtggtccggccttttgtcgccggaatgttggtgtagcaatttgtttgacctgttggaaagtaccggagggtattgatcggttttttgacgacgtccgtgatattaatggactcgccggtggtgacgaagcctttatctccgacccatgttacgttgttggagtccacgtaggaacccgttgttccacagtcaatgcttatacctaatgatagtgggaaataaataaccgatcagtaatttgaaaatagtttgatttggtcagattattcagtaatcaaacctcattggtcaaaaaaaaacaatgaaggaaatttagacattcttaatatgttaggtgcatacttgtaaaacaagaagactatcttgtgatacaacttcaatgtaaacttcttttctttgtttttggcaaatatatatttccttcttcacaaattgcacaaccctttttggtgttttagcaatgggtttcaactacgtgatacaatgaatatcttttaacaaaaaaaaaaaaaaaactacgtgatatacaacaaaaacaaactcgtaaatggaattaataaatgtg

SEQ ID NO: 35915 - DNA, 897 bp, Arabidopsis thaliana landsberg
aaactaaacacaaattatatactacagaaaaaagggtttgtggcatcaactaaattatatcgataaataaatgatgttaatttaaattacttcttcggttacttttacttacttgatagcttatccaactcttaactatagcatgtgcttaaggagaaactaagaactcttatactattacttagaaattattattttgcgaaaattccactaatatcttcgggtaataatttatctattaacatgccgatttcaaatgcttggtatttatttataatatatacaaaacaaaacaaaaaaaaatctataaaacccaccctgaaaactcgatcactttatgtccattccgagaactctctccctcattaattaaaatctttctcagagcaatcttctcacaagtttctaagaatctcaaagcatgaatataagtagaacagaattcgcaaactgtaaaacccttataaatcataaagaagaagtcgaagaagtcgagaaaaagatggaaatagaaataaggagaggtccatggactgtggaagaagacatgaagctcgtcagttacatttctcttcacggtgaaggaagatggaactccctctctcgttctgctggtaacttcttaagccttttgcatatatgtatacagaatatgtgatcatgcatgatatataatatgtaatgcgtaaatcgatcgattcagatcaattgaagtcatcataacaaatccttatatgcccatatcatatctctagagtgattgttaaactatcattgatttgaatggttaaagtttggtattgaaggattctttatatgtcaaacaagtaggccgcttttgttttttaaacatttagactgaaacttttttttttcttataaaaaatcgctttggat

SEQ ID NO: 35916 - DNA, 2564 bp, Arabidopsis thaliana landsberg
taaagaaagagtggttgttccgaaagaggttttttgcaggtgcaaaacctctctgggaggattttttggttggtctattccttagtacgaaggccccgcatgtgggaaagattcacatgattgtgaataaaatttggagataatttaaacttaattgatgtgtatgaagtaaacgcaacaacagtcaaatttcgcataaggaatgaggcaatgaggaggagagtgctgaatagaagaatgtggaacattatggacattccgatggtgctctcgaagtggacgccttttcaagaagattctcaaccagctatgaaatccattcagcttttggttactctcacagatgttcccccgtcaatgttcactgataaaggtttggagttcttggctagtgcagtgggtaagccaatacggttacatccaaaaacggaagcttgtgtgagttttgatgaagcacaaatcttaatagaagcagacctaacaaaagatctacctagagagtacgtattcacgggtgaggaagaaggagagctcgatgctgttattacatattcatatccttggctgcctccgagatttaatggatgtggtaaatggggtcatcttaaagaaacatgtttatctattgagaaaaccagcacggggaatagtgattttgtaaccattcccgcagttgcttcagaaccagttcagccatcctctccaattacgggaaaagctaaggaagttgttcatgtaactttggatgaggtgcctaagattcaatctaacgctccgggggaagtagaggtagagagaggagaggatgaaggatggatcactcctaagactacgcttagccccggaaaaagtcatgtaggattgaagtttggagaagtttctattttatcaaactcatactttgtacttcgtggcgcagaggatataggggaggaaatatctaaagagatggaacctcacgagcctgaggagaagtctaaacaggcggatactcaaacacaagaggtggaaaataaggaaaaaaaaactcagtggtaaggtcacgggttttagagctgccacctcgggcatctttaccccgtggatcaaagtctgcacataaagtgctctccaatccttctactccttcaactaggcacactcctagtggtcagagtttagggctccctccaaagcatcgctaaatgacgggtttcttcttgaatgtcagtggtttaaacgaatctgcaaagcatccaatcataaagaaatgggttcaagaacaaaattttcaatttggttgtttacttgaaacacgggtccaggagaataagatgcaggagctgagtgaaaagttgtttccaggatggtcggttttaacaaattatgaatttaataggagaggcaggatttgggttctttggaaaagtaacgtgaggcttacccctttctacaaaagtggtcaactcataacttgttcggttaagttagaagatcaactagaggaattcttctgctcctttgtttatgcttcaaattttgtggaagaacggaaaaacttatgggcagaactacaagaccacaaggactctccaataattagtagtaagccatggttaatttttggagatttcaacgtgaccctcgatatgaaagaacactcgaactgtgatagtaatccggtggtgacgagtggaatgagagattttcaacaaatgattcgctcatgtgatctttcagacatggcttcccatggtccgttatacactcggtgtaataaaaaagaacaagatctcatactaaagaagttggatagagtgatggtgaacgatatttgggctcagtcgttttcgcaggcgtacaatgtattcgaagcaggggggtgttcggatcatctacgctgtaggataatgcttaatgatgcagccgaacgaagtgtaaaaggcccaaaaccttttaagtttgtcaacgcgatcatagaaatggaggattttaagccgatggtgaaagaacattggaacaaaacagaaccactcttcatgtccacttcaactctgtttcgtttttcaaaaaagctaaagatcttaaagccagggatttggaaattggctaaagaaagattgggaaatctggtaacaaagtcaaaggaggcttatgacattctctgtaaaaagcaggaacaacacgcaaacaatccttccccacaaagtatggaagaagaaacagaggtctataacagatgggtaaaggttgcaggtctagaagaaaagttcctgaaacagaaggctaagcttcactggttgtaggttggggaccagaataataaagcttaccatagagcgatcatgacgagagcggctcaaaacacaatccgtgagattaaaaggccagatggtagtatcacgtctgaaaaggaggaaattaaagtagaagctgagagattttttcgagaatttctccaactcataccaaatgattatgcgagctagaaactttgatgacatttcgttgttcagaggaggataaaggtatgcttactactgaggttacaaaggaggaaatcaagagggttgttttctgaatgc

SEQ ID NO: 35917 - DNA, 1536 bp, Arabidopsis thaliana landsberg
gatacaagctcccattggtagcaattgtcttgaaaaaccatgaaatcaaggaaaagagatgacaatagagtaaatgacgtagcctatgtttagagtggactaattctctagattactacttgatacatctttatgttctcggatattaagcatatatatgaccctggtttagtcttgtatcggtgatcccggtttaacatcagtttgattcatctaaattgaaaagacattatggttcaatctcattataaaaatcttattcgacatgtgaaacaatgcctataacttacacaaacagcctataacttaaccacaaacccgagaaacgaaagagaaagctctcctttatgtgaaaattcatcgtctgttcactgatctgaccaaagtgttacataagtttcttcttcttcttcttattcttcactcggtcatcactgttgaaggaacgactttctgtatgatgcttttaagcgcaggtgcgcttattaaacacttgttatcctcaaagcatgacttaccttgttcagctgctttgcaaagttgtggatccataggaactttcccaagaaacggtactcccatttcccgacacattctttctgcaccgcctccgctgctgtcaaacacttcgctacaagccacgatgtcgagaagctctggtgcgcttttatcttaagcaagcgattacgtcttcagtcacgttaatggaggagcctgtctctgtcgccagcttcatgaacttgacatccttcaacggttgagataaaccactcatgttctctactactcctagcaccgggactccaactttcttgcaaaagctcacttcttttctgacatcaatcaaggagacttcctgcggtgtcgtgacaatgatggcaccgtcgatccccgtgggtagaaggtactggacgatggagatgtgttcatctgaggttcctggtggggcatcaacaacaaggtaatcaatctctccccagtagacgtcttttaagaactgcttgatgagaccattcttgcgtggccctctccagatcacagcttcatcagagttagggagcatgaaacctatggacatgacaccaaggttgtcttccacataaaccggagaccatccaaggttactctggtgaatctcttgcccttcaagtcctaacatttttgggatgcttggaccgcatatatcaatgtccatcagacctacttgatgatccatgcccgcaagggcaaacgagagctgagctgagaaagtactcttaccaactccacctttgccagacaaaaccagaatcttgtgcttaacagtgctcatcctctctgctatggcaaccaaatctacataaaacagagaacgtcagcataacttcaactagtaaccaagtgagtctgcgactcaaacacatctggcgcttaaatcagacattagcattaaaaaaaaccaatcttttaattatcacatggtgttactctcaacagaacaatatggagcaaaaaaaaggaagactccagatagagctatttctagagtttcaaata

SEQ ID NO: 35918 - DNA, 1542 bp, Arabidopsis thaliana landsberg
  unsure (1)..(1542): unsure at all n locations
aataataattaacagagacacgtacataatttctaaaatatgtaggtatatctgattcttacatcttcatcgaatcaaagagaacatataacaacattagtaggaattatattacagtaatatacataataattagatggggaatcataattaacaatgaaacccaaatttaaacgtgaccatcccaattatacctgaaacggaatctctcctcaccgttaacattttgatagatgccagattccctggccgaccacctcacccaattgtcgcgatgaggcaaatccctactttcgtaggcaacgatcaccacatgatcctcccagtttttacctttccatagatgacaccaataaagcgtttttccaagtatatgatcagtgaaagcgtaattgtaaaaccgaccgggccgtctcacgtggaaaccaagattggtgtctccagatttgcatttcacttgtaaatagtgtccgtggggcaggttgttatagataaacaccgatcctcctatcacattntcggtgtataaacatacaaccatacttaaatatcgtcacacgtaacttcattctttctttccttttacgtttttttctttctttctaagtaatggatatttttgaaggatttataaatgttttcaacttttgagtaaatgttgtttagaaggctgcccgtaaaaatctgtctttttttttctattttatttgggtattttccattcacctgattggcattttacccattaaaaaaataatggttcttaaggatttcaaggggatattacttgaattatactataacaaatatatagtactattcaaagatttcattagcgagcggttctgccacaaaaaatagaaacttgcaatcagcgtgttcagtgttctatattttttttttcttcatcttaatagttatcaatgcagatgatatcaagattggctttgtgtgatatatcaatatatcatataactcgacgtggtacggttaagattaccgttcggaattgatgacatttctgatattgacagatactgttaagattacctgagagatatggtatcccatatcttggtctgtggatttgcaatggactatatataagatcgtttttgtcactcagtacatttctgttcctaacggatcctgtgttactcatcatggtaaggccaaaggcgaaaacgaaaaggagaatcgatagacgattcatcgatatcatcgatctcaatatgttgaaccaatggtcgatcgattttaatttgaagtgatacaatgtttagaaggtttagtttgttctgtctatatatattgaaaatactagtcatagtcctgataggtttaggaaacacaaattcaacaacaataacaattaggacttgagcgattgcaatttttaatacttcctatattaagtcaatttaaaatacgtggccacaaaaattaaaaaagtaatcaaataaataacaattccaaccctcattttaatggatatctcaaaaaagcccaaaaatattgaaaactgaaaacgaaaccggagaa

SEQ ID NO: 35919 - DNA, 1962 bp, Arabidopsis thaliana landsberg
aacatcgtataccccctaacatgatacaaacccttcaaatctatcagaactaaacgtcaatttcaatggtaacaaaaaaagtacccccaaactttcaatcatattcttgttgaaaatgtcactatgaactctcggattatacctccacgatcaatgaggagaattttgggataaggagacttggtattgaaggttttgttgaaagagttgcatccgtaagcgtcttggcctgcgtagaccacagagcccatcatgaaaccgccgtactttgggagaccaaagtttgctatggccgcgtcgtgcttagctcccatttcccatgagttaaggaccggcaagctgctcttctccacgaagaatctcgatgaaaacccgttgaccaccaccatgtgcaacgctagattcatacccagaccggttctttattgctcggagacattctttcgacaaaagaatctctttttcccgagaaaaactgagctgaaccttaatgtatacggaagagacgacgagttggcagagtcagcggagctaccatgactctgcaactactgtttcgaatgtttctctgatgattattgttctctaaccaattattaacggagaggcaaatttaaaattaaaatttgggaggctttcaaaaatccttaatgggcctcattagcccattaaaagtcccaatttaaaatattgtaattgctattatagaaagaaagaaaaatgaaggtcggtgttaaataaaaaaaatgaaaaaattaacgagtggtagtcaaatacaaccccacacgagccatgtgagtgaatgatgctcaaatatcgatttgcactaacttcaatgcgcaccagccaaaataacacgtttccattttcgtattttatacattgatataaaccgtgtcgtatttgttaaagatatacacgtatatttgtatacatatattcaatttgtatatgtatatacatacaatgctggtctaatatgtccgcgtttgaacatatatatatctaaacgtctgagaaaagaaacaacacaaacatagcttcaagtatggacctcaagctaaggcctagcttcttcatctcttttctgattctcattttacttctcaaaaatcttaattacggatctgcagctagtccgaaatgcatatccaccgagcggcaagctcttctcaccttcagagcagcactaactgatctttcgagtaggctcttttcttggtccggacctgactgctgcaactggcccggtgttctttgcgatgctcggaccagccacgttgtcaagattgatctcagaaacccgagtcaagatgttcgctctgatgagtataaaagaggttccttgcgagggaagatacatccgtctttgactcaactcaagttcttgagctatctggacttgagttcaaatgatttcaatgaactagagattcctgagtttattggccaaattgttagtctaaggtacctgaatctttcttcctcatcgttttccggcgaaatcccaacgagtcttggaaatttgtcgaagctggagtctcttgatctgtatgcagagtcgtttggtgactctggtacattatcattgcgcgcaagcaatctccggtggctttcaagtctgtcttcttccctgaagtatctcaacatggggtatgtaaatctaagtggtgcgggtgaaacctggttacaggatttcagcagaatctcggcgctaaaggagttgcatttgttcaatagtgagctcaagaacttacctcccaccttgtcttcgtctgcggatctgaagctccttgaagttcttgatttgtctgaaaactctctcaattcgccgatacctaactggctatttggtcttaccaacctcagaaagctattcctcagatgggattttctccagggttcgattcctacggggttcaagaacttgaagcttctagagacacttgatctgtcgaataa

SEQ ID NO: 35920 - DNA, 3809 bp, Arabidopsis thaliana landsberg
tttaatatctttgcagggtaaataacacgatttgcgattgatcaaccattcgctggcttacgcgaaacctgaactaataagcatttgggtgtgtatataaaccgaaatcttacaaaagataaataaatccaaagctttataaatgtttttactgcctctatatagatctgtgcggctagagattgaaggtaacttcttagtatacaaaatggtgattacattaatattcaagatagtccgagccatttcttgaatactaaaccagcttctctcttcttgagctgagactcgctctgaacttttggagctttgcctttataagcagtcttgtgatacttcaagaagagcatccgatacttgtacttatcaacaaacatattttttttctccatcatctccacaacttcattagcccgggaaaaaaacccgcctctaacaaatgtataaagcaccgcatcaagcaactcctgatcaaacttcatcgatgaagtagctgcagctatggatttcatttctccccataactcagtgacctctgtgtatttactcccaatggctgcatatcctgtgaccatagaatgaaaagtttgagcatttggcgaatgcccaagacttctcatcctctttaatgccttctctgcatcctgcatcaaacctttcttgctaaaaaaatggatcacattgttccaatcatgaacaccagcatccaaactctgcacttctctgatttctctcaagagttttgacatgagtcccgcctctgcgtttccttcacatccctttaagagcttctcaaatttctgatttccgcctcgtagtatcttcgcctctttcatttccttaaacacattgagagctccatgagtatcgttctgaattacttgagactggattaaagcttcataacagcttgagtctaattgaatccctgccttttgagcatctctaaggagtgatgtcacttctctagtttggtttgtgttgcagtaagctttgaggagcgaagaataaaccgaagaaccagttcttaccccagccatacgcatctcgtcgagtagatcatgcgcctgatccaacatgcctagagaaatacatgcgttgataacattaatcagcatcgagttatcactagaaacaggagagtcttcatgttctgccttcaacagaaactttgctaactccttcatctttccactttccaggaatgcctttgctaatttcacataaatctcttccgtcggctgcagaacaccgcgttccgaggtaatcaattcgacttgtacatgcaacttagccaacaatgcaccaagaacatcctttgcctcagcttcaagtttcaaaaacttcctgtctctagagaactcatcatagggaatcatactgtgaatagaaaccactcgagtttcgggattatcgtgttctttaacctctgatccttttccagatactcttttggtgtataatctaccatcatctgcagtatcaaattcaagaatggcggctccaagtgagttccttgctacctttcctcttcttagcatttccaaaaccattttcgaagcagattcaagatccccgaattttaagtgacacataagcaagcagttatagaattgccaaaactgagactcattcaagttgcaagcttcatctatatgcctttgaagcttccttagttcctctctccgcccatttctttcgtatatatgagccattattactaacaagttagcatcagctttaacaccgatcttcggtatcatatcaagaagctgttcagcttttcgggttgtcccaaacaacaaacaacccgccaaagcaacgttcaacacctgagtattaggcttcatcgcaagcaaaggtgcgttgctcttcttccgtggatcaactctgttattatgaaacaaataaccaatctcaagaaccaactcagcagaaagataacttcctgatcccgcaagagacatatgagccaaaaccgcagaccaagcactcacatgaggatactcttctgtctcaactagcttcctcaagatcgttgatgcaggaacagccatacctgacttggcaagagccaaggagagatatagaagaggttccttctccagcaaattctgtttaccctcctcataggcttgttccactaaactgtaacccttttgtagccagttggaatcaagactctcagcaaaacaaaccacaacattgttaacaacagattttcgcggaaacccttccatttgcatatgttgttcaaacaatctccaagcttcatcacatctatgttcatcaactgcaatttgaatttcttcattgagtttagcaggatctctggcttgaagcagtatagatccagaaatgcttgaaattgcttctcttctatggatagaccatacatcgaatctggtactagtacgaaacctagttaacacactgaggtattttgcattagacagaacagctttacccgccaaaccatgttgtaaagaagcttgagattgagtacctgtaacttcaatggcgtgaataagaactccacgaaacaaagaactcaaacgacactggtggagtgaaacagcctgaagcttagttttcctcaatgaaaacattgaaagatcttatttttcttcgtcaattcgttaagaccaatttgaagctcctcggctggtatgaggatttgatgaaaactgtttcccagtttcatttagacatttcgtcgaacacttggtgcgtgaactgaaccagcaagctttgagcactaacgtgagattaggagaaaaagacaaaagctttcttgagaagacgatgggtctttgaccgttgatgatggcaggtgcgaagaaccactaaaccctaatcactattcactaatcactatagccagaagaaacttgtaaattttgcttaaccgaaaaatatcaagtgttgacaaaaagagaaaagaaaaataagtaaagtaataatattctaaggaatttgtcaaattgagtatcactatatcatatactgtcatagtaaatggtccttatctagcaaaaaagattaagctttttactaatcttgggttggtttcattaaattctatgatagcatttttggtttaacaatacgcataaacataagttaatccaaaatgcaatgcatagtttcagatttatcaatagggttggtttcattaaattctatatagtaacatttttggtaacaaatacgaataaacacacaatttcatccaaaacctaatgcaaaaattcaggtttatccataatccttcttaacaaattagccccctcaaacctttctataagtatatcaccacatgactactaatcatatcccatacaaaatcccaaagcttaaagataaccccaaatgattcttgcaatattagcccttgtaatagccacctttctatacggtggagccaccacggtccaagctggatgcagagacactctgaccagcctttccccttgtctttattacctcaacggtggctcatcgtcaccttcttggagttgttgtcgtcaattttccacggtggttcaatcttcaccggaatgtttgtgctcagtggttaatagcaacgaaagctcattttatgggttcaaatttaaccggactttggctctcaatctccctaccgcttgcaatgttcaaactccatcacctagcctgtgtaacagtaagaaacttaattattctaacaatatacacttcaaaaatatatgtttcttgatccaaattttttgtggtttataatataatggtatagccggtggtaacgtaccaaccacgttgccggcgaa

SEQ ID NO: 35921 - DNA, 1060 bp, Arabidopsis thaliana landsberg
acaaaaggaaactcttgcttattatgcaacacatgagtaatcgctgcagccgttggattactcattgctaaaccaccatcaacagctacacaccgtgtcttaccatcaactgatctcatctccaccggctcaaacactcctggctcagcccaagtagctctacaaacttcccacagcttaaaatcataaccgtccgtttccaacgcatcagcacgtgagaacaagaacggtgcagagctcgtgaggtcgtaacaaggaatcaaaaccggtttaagcgtatccttaagcgtaagctcttcgaaagactccttcatcgctttctcaagcttcgaacctgacccacccgaaccacccgaaccggttttcataaccctgtttagtatccccggtggtgatttgttgtaaaagcttttacctttcatagctaaaaaccgccacgtgtcttccgctttgaagatcggacggttaccatcgctcgacgcaaaaagcatcgccgtgaaaatcccaccgataccggaaccggaagctacgtcgaagtaatcagcgattcgagcattcgggtcacccgatttcgatttcagagcatgttccagataagccaaagcttttccaggtataatccctctcattccaccactatcgatactcaaaacacaaactttacctctctggttcttaactgtacccggaacgacgccgtttaaagcttccaccatcgccggtgatgccgtttcttgctctggactcgggtctctgctccttgattccataagcttcaggtcatcatcatacccgaaaagaaacttgctttcgagaatagagaaaatctcgtagctaagcttatcagtctcaatgctcggttcttgcatatccgtcgccgtcactccaccgtcaccgccgttactctgttttaccaaatgcttaaaacctccgatagaatcaatcggtttgttgtgtactctttgcatcgtagttaacataaaagagtatttaaatcaaatctttaaacactctctaggcattatcggcaagacaagacaaaaaccttaatttttttata

SEQ ID NO: 35922 - DNA, 1646 bp, Arabidopsis thaliana landsberg
  unsure (1)..(1646): unsure at all n locations
aaccacgggatggaaccgtggggggatttgcaaacgcagcatattccactaagctaataatgttaacaatattttaacagaacaaaacaattaaatcttcagaattaatagacaatagttccctatagaaggaacctaaaatcttgaaattctatctaacagcatagaaaaatctccgtttcactatatatactaaatctacatataggctatggaataacaaacatagacaaagactaaagagcttttctacaaactctaagtcactacacccaaactaaagtattgcacgttcaatacggagtactcatcaatcattacagagttaaccgaaagaaccaatttcacaactactacatcgcagaggacagccattacatttgttttgtccttacaaattttcagctacacaagcaggaacaataaagctacaactagatccaaagtcaaatagaaannnnnnnnnnnnnnnnnnnnnncccaaacaaatcacagtgatctacatacaaagagaaagaatcaacaatagaaggaagatcgaaagaggaggagagaaagatgtaaaaaggcatacatggtgggagaatcggaaggagtggcggcgagagcagcttctttctcggaagccatgacggcggaggcaggtgagaaatgagatgatagaatcgaaacacggtggctcattaacacaaattaaaccctaaattcgtagacggcacaaacaacttcacccgccaatctctttcttccaaccaatgatatcttgccacgtcatacccttatttttccgttgtctgaacctctttcttctttatgggcttactactagcccaccaaagaccaaacccatttctttattgcctaatcaaaattattgtcttcatccacaattaacccacaaagtactagataatactagtaaacgtctgttcattcactacaaactcttaactaaataagtaaaagccaacaaaataaggaaaaaggagacaagaagtgaaaaaaagtgatggcgagtaggtttggtatcattggattctacatggaccccgttgcatatgcttaatgctcagagttaattatagtcatggataacacaaacacatcattaagacacaaagtagagttgtattatctaagaattaagtaagaaatgctttacagcttacgaaaattagtttataactaaagtgattggtatctaattaaagtcaaatgcatctctcattatagtacagagtactctcttgttataccacaaacagaaagtaaaagtgcgattatgatgtttgaaccatctattcatgttaacgtgacctgaaatatcacatgctctgcttagccttttttgtcactttagtgagactaggatattaaattcttggaatttaattaagaaaattccttaacattaaagtattataattctagagagacccactctactggtctttaatgataatttgtccaattgttctatttatttgtccaaacatgataaaatgcgtgatgagttattgaattaaacaaccatggaccacgaaaattgataaatatcaacctaactaattgtttaattcattcaatcttaatatgaaaagagatggataaactttagcacaaacattagtgtataagtgattatt

SEQ ID NO: 35923 - DNA, 1900 bp, Arabidopsis thaliana landsberg
tacaaaagagatttgattcgggatgcagagccactgattcaagaggagcctcttaagccatggattacacttaagaggaacatcaagaatattaaatatgtgccttctatggttgatatacgtttcaagagtagatacgtttacgttgatgttggtgctcgaagttatggatccagtattgggagttggttcaagaaagagtaccctaagcagaacagaacttttgatgttttcgccattgaggctgacaaagcctttcacgaagagtataagataaagaagaaggtgaacctgttgccatacgcagcgtgggtgaggaacgagacgttatcgtttgagatcaatcacgatccgggaaaggaagtggaagccaaagcaaagggcagggggatgggcagaatccagccggttaaaaagtctgactcgagtgacttagctggagaggtgaatttgattcaagggtttgatttcgctgactggttgaagaagagtgtgagagagagggactttgttgtgatgaagatggatgttgaaggaaccgaattcgatctgatcccgaggctaatcaagacaggagcgatttgtctaatagatgagttgttccttgaatgccattacaacaggtggcagagatgttgtcctggtcaaaggagccaaaagtacagcaagacttataaccaatgcttagagctcttcaattcgctcagacaaagaggggtgcttgtccatcaatggtggtaatggttaggatgctgcataaaagtctccttcttctatgcatttggtgaaaaatgtactttcttcttctagaatatataaagcgggatattgtaggtttctattaaaaatacgttgtctgtgctgaaattcccttttactgtaagaaaaaagaagtttagctttaaatggaaatttgagtttcttttacgctcgcaactgtctgtcacctcttcttaaaattttcttgcttctggtgttctctgcatccaaatgtatatgtaatgatttctcctttccttgtctatatatatggggtaaggacacaagtttgttttctggaattttgcctcatcttagatattgtactctggaagaatgtttcaaagtgatcttcctataaatggagcaatgcaaatgccttgagtcaggtatgtttgtctcttgtcatttaatcttcattaataactgttctcaggtgcattttatgctagaattatttctcctttcctttaatatgatcgggcagatcggccaatctgttttgtctacttgatatgagaacttaacaaagaaacagccagtggtttattttagttttggtactatggttttttcctgtttcgttagttttggttatcgaaagcgaggctatgatttgttgaaggagaagctggttttttgtgctgtggattgtaataaagagttaaaggaggaaaatcgataaagccagatcgttttttatcgggtatctttagtatccaattatggatgatccccatcaagatttcaatctattgttagacagagagaaaataataaacatatcttttctccatccctcatctttctctctctctctctctcttcagttttttgttcatctgaaaaaaaccttttgacttttccattattattttttcaatttaagcttcaacaagagaaaaatggcatttggtgttattgtaatctgttgtcaatcattcttcttaaaaggtttctttcatgcttgtctgttctagtttcccttctttatcctcatttcctcttcctttgacttcctttcccgataaaggccttacaaggtgatcccatggaaaagttttatctggttgtttcatctctgccctgctctcctctcttcaattacttctttcaaaagactttaccacacgtcgcgttt

SEQ ID NO: 35924 - DNA, 1958 bp, Arabidopsis thaliana landsberg
  unsure (1)..(1958): unsure at all n locations
tcaaatcagttataacaatgacaaaactacaattatttatagattcagatttacatgagtacatgtgaatataaatgccatgagatcattattttgcgatcttgaactcatatatctgagatgtttttctttttgtgatatccttaataagtgctacaagcatttcactctttccacgttgtagggtcaggccagctccttataatatattttttatgtgaaagtcacctaacattttttcatatactgtaatcgtatgtatctctcgctctccgtacgacttcagatttgttttcatagaattgagactgtgtagtataacattgaatcatgaattaaggaaaaatatagccaatgaaatgtttgaaggcttgattatctcggtccgggtataagtccgtgacgttgattttttgttatggtctcgaatgcgttaggttaggtagatacttttcttgatacgaattaacctatatcctaatgataaaactctgattaccaagaaaaaaagacactacaatcgttacacttttgtccaggatccgtgagctcatttaataactattaattagctggtccttggggtatccaattattgtttaaattaaaattttgttttttggtaaattggtcgtatcacatgcatgactcatatgatcgtatcacatgtctacgatgtgttagcaatctgtctctatgttaacacgaatcttgatcactccatattacagcttgtttttataacatnnnnnnnnnnnnnnnnnnnnnnnnncgacataattaatgtgtgagtgaggacaaattcgttatagattggtccaattttatcgaattttatgaacccgatatataatttactctaataattccaactgtagaccataatgcacatacgacaatccatctccagctgttatattcgaagaaactatttttgaagcttgtcgaaatcatgatttatacattttaaacattatatataactgatatacacacagataagagagatgaaaccttcaaatatgttaataatcactttgtgcttttctctagaacacaaaatgtgacaactgtttgagagctttttcttcgcattaccaatgtaaactattcatattaattaattcagaattgcaactagacttgtcaagatatgggaatcatattcaacgtggaactctctacgagaaagagagtctcggttacatatcagctatatatgagtgtgctgatctgtgttatttgtctctttccctgttccttcagcaaaagatcaaatcaaaccaggcgaccgaaatagacatttttccctgcctgacccttggtaatggatccatgatccgtcttcatttttgctatttaaaatcaataatgatttcatcacgtgatattctctctttctcggatttgtaatgcaatttttttgggtgggtcagtagtggttgcgtaagcacctagctaaacctgtttcctatatttccccaaaaaacatgagtcgtaggcccaatttgtgatatataggcgtgctgggcctctaaaagactcaaacgttgggaccaaagtaaggcaagtaaacccaacgcagatacacctaaaacaaactttattcaaactaaaagctctttacacggacacagagaaaggttatcggattgtatgaccgtgacttaaaatgtacaaaagagccactgaaaccagtaacttatgatagtaaacattatatgatcctctttatcaatccaacattctcttccaaattagatttataaatcatgaatatgtaagctcctactcgaacaagagaatatctagacaatttacttgacggtgagtttcccaaccataccagcaccctgatgtggcgcacaatagaaaccggaagagcccggctctgtcaaagtaacctcgtaagtttcccctgcaccatttagaagcgctggctcatccatcgtgatctt

SEQ ID NO: 35925 - DNA, 1163 bp, Arabidopsis thaliana landsberg
tcaaccttcctttcctcaaccttggtcgcctgcagagctttcttcttctcctccaaaaccttctcatactcttccaaagtcatctcctacaaacagcaaattggtattagatataaccaaacattcttcttaagctgttaatataaacagatatgagttcaagaggtaatactgtaccttgtcctcaggcttttcctctgctttctcagcaggtgtttcattctttgcatcagttgcttcaccttcaccatcttgcttctcaacagtcaaattcttgtccacaacagctgtggattcttcagtcaccctagtgattcgaagaacacgagttaatttatcaaacacaaacacaacagaaaacacatatctagaaagaaaagaactagtttttacaagaatacttacggagtaatatcatcctgagtggttccccaattcgcacggccagctccatcacgtttatcctcattcctactcaacaatgagtttacaattaggaaaaccagacagaactcaatcagtacaagactaaacaaacaattaagaaagctagcttacccgtacgctgttctactgtgacggtcatagttcttgcgtggtctttcagagtcacctgaatcaccaccattgctgtagcttccacggcgatcaccacggaatccaccaacaggcccaccacgtttagctccatctccttcttctgagcggctgtagcctccaccatatccgttttcattggcaggaccatcattgttccttgaatccctattgattccaccacgtccaccacgaccataactccctccacgtgcagcaccacgacctccaccaggagcgttccttgcctccctcactactcaaatcaaagaaaatgtaacatctgattaaatcaactacaaaggcaacaaagtaacaacatctctggttattaaagcaatctaagagattcatatcccaaatctacaactaccatactaagtcaaacttaactaaacaagacaataatcactatgtagtcaaaactatgagtcctaacacatccaactaaagattgaatctaccaaactctaatctagaatagaacttaccagacttgagaaggaggaggcggcttagtcggcatcttaccagacttagcagtctgaaccggagccacaaccttc

SEQ ID NO: 35926 - DNA, 2945 bp, Arabidopsis thaliana landsberg
  unsure (1)..(2945): unsure at all n locations
gcttaatctctcatcatctgtttcttatgctctgtttcgtcatataggtggtttggtattttcgttcatttatacataaaccctcgattttgtgattcaaataaatatcacatttcaagaactaaaacaaaaaaaaaaaatcctacatgcaccgaaacgtttacaaattagtatggttggaacccctattcaaaaacgcacgcggccggatgatcactcggcagtactcatccgacgcgatttcactcaaatcggagaaattaatcggtaactggccgattaatgataaaatcggtttgataactgataaaattttaaaagtttgagtctcaattcttagaccacgtatactttactttagctccttaattttaaagttaatggaacatgcattatttataagcgagttttcatgagctccttcctctggtaaccgatgtgggacatttgcaagtgtgctttgtgtttcaatcccttcacaattattgctcaggatacgtgtaattattgaaattttctattgttctttggaccacagtcttgttggcctttatttttatttttgacccaataatattgtttgtactatagttttgtattttatttggtgtctttttattaatacagtaaaattatacacatttttaacatcatatattaactatttttattcattattataaaaatataaaaaactaattctaattaacacctagcgattatttgaacaagggttggaagtaggatattttattagatttttaataatataaattttagtcaataaagtattaattaaaattttagtaatttaaaaagtatgtttttgggacggccaagattgccaagtctcgccatgcatttgggatgcatccggcgagtagtggctggagtaatatgatctgctgtttgagccgtgattcacattagggtagtagctatcgggatattttcttggattcatcctttaagtcctgaaacaaagaaaaaaaaaaacaaaaattaaaagcaaagtgtcctagagttcactctagttcttggacttgtggaactaacaatctctccccggcagcggctctaaaaagcttgatgcgtgttttagttcgccttaggcttttacctgaaagaccacacgactactgcaagtgcacagtatttcgaagtagtattttaggatcgaatccacaaggagagaagtagttcagagaaatccttaagaagagagtgaagctaggtccaaaataaagagagggggttgttgtatgctatgagtaaccaaattaagagacaaataactaaactaancggtaagcaataagagagaaagcgttaggtcatctggggtttctccagatgtcacggttcaataaataaagtatagatctcaatctaggtgataacatggttatctttgtttacttccaaattctcggacatacgaaactctatcaagaccagctaaccctaacgattagtaggtgaaagccggctattatcactaatatcttgcatactcagttgccctatcagttagtaagtgctaacatggtttcaaaataccagatcaaatcatttagttcaaatttgattctagcccattagtccgtctcccccggcgggtgtgcaacagtaatagttctttattcagttgagttagttcaagcattcatacgagattttgccaaagaatgaaatacctaatgtcaagtactaggtggcattccggacatacaagcattaagattaaactcaacttgaaagaatagtgtaatcgatcaaaaaagccataaaaaccgccaacctagactttcgatctattaatccccatgaattcccctttgaaaccctctcaaacccaactagagatctactcgctcatggcaaatgagctaatcaaaagttgggttgagtaaaccataacaaaagatgaataaaacttaaaaaaaagtttagagattacttctttggatgtagaatacaagaggcaaagctctactttaaatagtcttacacgaaaacgagaaagagaaagagagagatggtgttcttcaagcttcaagaggtgcggcggcgagtggacagctctaggcgacggctagggttaacaggtgatgaaggcacatctagggttagggcttagaacaagtatttatacttgaggaaaatacttgagggacaagaattaggtttaggggtaagaacgtcatttcgccagataagtaagtgatcagaccgagtagtgggcttcagggcaggagcctaatgacggcagcgcaaagagggaaggacttgggggtgacctaatggtcggtggtgagctactcggagctgcccaggatcaagtctcctcggccggatgtattttggacttattatttccaaacggccggctcttgacatgtcttcacttttcgggtcatatcttctaaacggcttcatggattgcgtcgattcgacttcgacgtaaatcttgactcttctagctttccatacataccgaaatatctcgttcccgtgatgggaaagatcttggtaggatgccaaacttctgaagtactggaatgatcgtcttttgatacttttagtttcaaaactcttaaaaccttcttggcatctagaatacgtggttttcctcttactgactctagaatggcaccaaattctctctgaaacataagaaaacaatagataaaacgggctagaacgccgtgttatcaatacttcagagctatcccgtcttggactgcatctaaaagtagatttttctcgtcgttatagatttgtattgccaaaagaggacgaaatcctggcagcgtctcttctactatcaactctatcccaatcatgagatctagaggggcttagagcgtatttcttgcctctgttctctgaatagcgacctataggggtgaaagtttctgcgagaatccacaccagaggatgtg

SEQ ID NO: 35927 - DNA, 1919 bp, Arabidopsis thaliana landsberg
  unsure (1)..(1919): unsure at all n locations
caaaacgtgtttaatctcatgcttgatacaaaaaattggagaagaaatcttcattttgggaaaagagacgaatttgggactagttacttatttaataaagagtgttgttgggagcaaaaacagggagataaatagtttctcggcaccgtttctttgtatagcacagaagtgaagagcaagcagacgaaaaaaatggcgactctgtcttcctatctgttatcttctcctcctctatgcaaatcccgattctcggcaacaagtctcgtctcaggaattgatttcatctctttctctcctcgaacaactctctcctcgtcatccactgtcttgccggcgattctttctctttccgttaaacataatcgccggagaaactcgcttcaaggttcgaattctaaagttttcctttttcttaatctgaaacaggattggattagcttagcttctcttgattttgattttgatttctgggtttcagtgaaatcagtagctagcccaacggagacgatttcagaattcgatgagatggtctccggcacgaaacgaaagtattacatgctcggtgggaaaggaggagtgggcaaaactagttgtgctgcttctttagctgtgagattcgccaacaatggacacccaactctggttgtatctacagatccagcacattccttgagcgattcttttgctcaggtaaacgaagaaattctataaaaaggtgaagactttgtttttgtttgatgaagatatacatatgattggtgtttctattgtttttgttgattttgtaggacttgactggaggaatgcttgtccctgtagaaggacccgaagctcctttatttgctttagaagtatgtgtttggaattacctttggtgcattttttggtttctgtggtgatgatcttacactcaaattttgagttttaattgatagctttgcaacagataaaccctgagaaggctagggaagagtttcgtagtgcctcgcagatgaatggaggaactggggtgaaagattttatggatggtatgggacttggaatgcttgtagaacaggtttgttgtagcactgtttgtacattttggtggcaattgcagctaaaatgtgtttgaaatcgtgttaatggctaccaatccaaatatatattccgtggtagccatgtgagcttcaatgtttctgatactcaatctagatgtctcaaatggatgtgattgcctctcactgttctgcttatgatactgactctggttttttggttgatgaagttgggggagcttaaacttggagaattgctcgacacaccgcctcctggattggatgaagccatagccatttctaaggaattctgctattctatgtgatccttgtttcttctgtcttgatatgtactgtctcttactgatttgtcaagggtattcacaggtcattcaattcttggaatcaccagagtataacatgttcaccagaatcgtatttgatactgcaccaacggtgagcaagcttgattaaaatttcccttccctttttatattgcaaaatattaaagacagagtttgttactacttacagggtcatacgctaaggctactctctttacctgatttcttggatnnnnnnnnnnnnnnnnnnnnnnnggtaagaaatgttgataaaccatttcctttaaactcttatgtttagtctgtttaccaaagtttcaatctctttctcagagtttgtcttcttaaatacattttcttcatcttcagcttagacagaaaataacctcggctacttcagcgatcaaatcagtttttgggaaagaagaaaaggggcctgatgctgtaagtctttgtacattggctgatatagtattcctgttntcatttggttaaaatcttctttatggatgtcacaggccgacaaattggaaaaact

SEQ ID NO: 35928 - DNA, 2670 bp, Arabidopsis thaliana landsberg
tcttcacattccagtaactgctcagtggaagcgcttaccaataggcaatgagcctcctcctcctcgagcttaccataccatgacttgtattggagctcgtcatcttttaattggtggttttgatggaaaattgaccttcggtgatctctggtggttagttcccgaaggtatttcattcttaattgtactaatgctttacctcaaaaaacttaccgactaacttatcattgtgtgtacacacatcatcattattatctttggatatattttatatgttaatattctttagtgtctccagataaactaatcatcctgttggtcatatattgtaggcaattagctactcttcaatttctagcacgctcattttctttctctagtttgtattcaaagttatgaaatttacgcatctgattgtatttttgtgaactgtttagccgtctgaaaatttcttatttgtgtaactgtgtttaaagaaataaatttatgtggaactctagatagagacctaactcaaaacgtttccactttcaccacaacctcaccccattcttttttgcttttctcagatgatccgatagccaaaaggtcttctgtgcctcaagttataaaccctcctgaaattaaagagtcagagagagagttggacaaggtgattggagttcctacatatcatcttatgtgtttcttgccaatgcagtcaaaatagcttttgaacttgtttaaacagttgagagtttggtcacggcaggaaaggggacaagatggatacagtattgttgacttgcaacagaaaatgggaatatctgtttcatcagggttgcgccttcaaattcccgaggagtcagaagatcaagagtttgttgaattaggaacaagattaattgagggagatgtagttgatgaacgggcctctatgattcaggtgatctttcccttctctatttcagtatgtatgattgtgctatcctgtactaaaatgcttcccaatggaaagatggccgctcaagcacttcgtcagcattggaaacagtccactccgagaactttacaactaaaagagcttggttccttacttcgagattatcagcgacttgttacacgaattttcacgtgagttctttctttcaaaactatcgaaactgattcttttcttaaggttgtaaaagttttgttttctacgtcttctaaaagctattacatgttatgaagttttacatttgcttcttcctttccttcacacatgtttgttttcatcgttgtggcgagtgtctcagtacacagagcagcttaacatctgctgattttggcctccctggaacgaagacctttacgttttatcatatcaaaagttcttccgaggtaatactgcatgatttcctcctgttattacctctcttgaacatttgtaaccagttaatctatgtgttgcatcatcgtaaggacccttgtacgaattttaccttgaattatgtggctgtctaaataatctatttttaagttgatttgagcacatgcactcagaatacccaatacactggcccaaaagaaatagatgttaccactgtgatgcataacagcattgacgatatgcattactcttatctcttccttatttttccgtctaaaacttttatgcatcttaacacacacatcgtttttatgatttgcacatgcactctgacatgtctaagtccattgatattctcagttgcggattaatgacatctcgaagttgctggaagaatacaaaactcttgtaatctgattgaggagtcgccacaaaactcacgaggaacaaaaatatctttaggtatgaatttcttaaatccctgaggcaaatcgtttttccattacattcttttacaccttttctcacacttcagtagaggaactttaatccataaatgatccagaacctcaaacagttcccatgtaaaaggtagaattgattatcgcaaggacccaatagtcttgttgatctcttccagcttcttcacccttactctttcactttcagctagtagctgccaagaagatcaccgagattgcgatcagcatcacaactatacaaaaagctaaaagtcttagagaatcagagctgggataggctacaattgatttacctccattaagattgaaacaagggtgtgctttctctttgttcttttcgtcgaaagcctcatgtatctctttgtatacccttttctgtcatttatttatcatctggggtgagtgttgatggatataaaagagttgtacaggtaaaaagaagcaggattgttaataaagactgattatatgaaaccttcttctggcagctctgagacaaagatttgatttctcgatttgccatctcgattttctttcttaccatccccacttccttcctcattggatctcccatgatctctagcccctttgagacaatgttggtgttgcttaatacagatatataagttttcataggaagccgagtagctttcatacgcatttttaaagagtatggtttgcattggtgataatagctggttttgaaaagtatgttatgtattggtgttaatagctagatcgacttacttccaatgtcttgtgtcaagcttcttgtggcttccttctgcaacccaagtcgctgttgaatcttgtgcttaaccgccatcttctttctct

SEQ ID NO: 35929 - DNA, 1113 bp, Arabidopsis thaliana landsberg
ttagatcaccatcaccttagctcgagcccatgtcaaagcgctacttcgtgtagaatttctcgtgttggcgagatcgcagactttgatcccatcttcaacgccactctgtctcttgactgcggccatttgttcatctatcgactcattcttggaaaaattgtcgattacctttgatcttacatgtaccaaaaagctagttagcttttggctcaaagctctcaaggttcttttgtgtttttaccttatttatccttctttctatcttatgttggcattgataataggtttttaagatcaattatcccaaaacaccaatcatgtcgttgtagtagtttaggttgtcaatccaaatgggtgtgatgctaacaatcaagatgtgatcagaagtcactaagtcaagccaagcaataacaggttttggtatgttctaccagtcctaagtgaacatgcagaaaacagaagttctaacagaattacacaaaacactctgtatcacgtggctgatgccagtagcaggaagtggtcgagtaagtggtcgagtaacatacataaattatagcaactatactcgactgcatagtctgctgccaaacattgggtgtagtcgagtaagttggtgataacatgtagaaaatgtgaaaactaagcaacacgcaataaaaacggttaaacaatagcaataaaatagagaaatcaaatggatgagaaatttctaaggatgaggtaatcgaatggagtggtctccttagcttgcttagatggttaacatagacaacaggttcaacaatagattaatttactattgtgatagaaacctttaagcaaagctagcccaaactatttcccattaacggaatctaactatgcaggtaatacgattcaacctattacagtcaataaacgctctaaacggccaatcccttgggatagagacaaatacctctagatctagtggatcaagcattcatcgaacaccttcagggtgcgggaatgctttggatcaaatttcagtttatcagacagaaataagcagtaaaaacaacttgttcacaagggattcaatcaacaccagaaaaactctaaaagtctctcctatgctgacacatcagcggt

SEQ ID NO: 35930 - DNA, 1886 bp, Arabidopsis thaliana landsberg
tttcctagtaaacatattgaactcatgacttataacaagttaactttgatccaataactatgtatgctttgtacaagaatattttaattcttaaataacaattgaactcaccacgctttcgtaatttcataggatttaaggttggaggtaagagttgttgcacagtaaacccgggggaagaactttgtgtcccaaaccagccggtttgtgcaaacaggactgaatatgtcttttgggatgatcttcacagcacggaagccactaatatggtagtggcgaagggctcgttcgacggaatcataagtaaaccgtatagtatcgcccagcttgcgaaggaatagaggctagccccaacatatagacatgaaaaatgatgacattttgagtttagtagatctttaacagggaaaataaatttgcatgtatattcaatgaaccaaaattttgcgagattaattaatctctcttttagtggaaaatggaaagtaaataaattaatcataattgtaaataaattagtaaattactatagttgctaatcattgcctaaaaaaacggaaaaactaaaataaaacttttaactccgagcaagccgctaactaagcaagtccacggtcctaagcaggtgacaggaccattgatagatcgtctgtactcaataaaaataatctatttatagatatttaagaaaaacgttatgattaattaaggagtatttttagattaatgcaatcatgactatctatatttggaaaacaatacaaaaaatattaaagagaaacctattatcataactatgaacgccaaagttatgggaagagatcaagcttttttttaagcattaaatgtttagatacgttgttatttacatttggactgaaatttgtaactaatttagctaaatattaaggtaacgtcaattgggtcaatcggaaaacaaaaattttatatagggcacgagggatttttttatggggggcaatgaaatcaattcctgacaactcttagaagatttcagaaaattaagggtggcaactctccccccatcttaactaaggtagatccgcccctgcttctaacctctaattgtctatataaaggaaccaatttttcttcatttttactacaaacaaaaacaaaaagaagaagtactatcaacaatatctctataaataaagaaatatgaaggcatgggtgatatgtttgctagtgattttcgccgcggtgattgctgaaccagtggagagtcgtcggaagtatctagaatatggtgcgattaccaagtgcgctggtcctaatcctcctccgggatgctatcctcccggggcccaacaaaagaaccctactcccgttaacgagtatagccgtggctgcagcaaaattcatcggtgcaggcgcgattgaaccgtagtaacgttcatcatataaaattcttcatttcaatgagccccgtacgtatttgcttttcatgcatatacatacacttgtatatgcgtatatgcaaggtgtttatgtgtttcaaattaattaggtattaatgtattaatcctcagtttgtattaaagatatgaaatatatattttgttattgatttaaattattataataattaattagtgtttatcactctcataaatttatattcaaaacttatatctgctttgattcgatttataacactatcaagttataagctagaaaatctgtaagaaaaaataactagacgcaaaaggacaaaatataccaaaacattatttggtcgctaacctataagatgattaatgaaatatttgaaaagtggcaagaatatggaccaacgaaaacaaaggtctatgctatttatgcaatagcataaaacactataaacattgttctggtaggccact

SEQ ID NO: 35931 - DNA, 2193 bp, Arabidopsis thaliana landsberg
tactctcccacaaatccacagcgcctctctcttattttctctctctctctctctgtgagcactagaaacggtcactgtagctccaaatgaggaacgaacggacttctcttttttaattttaacaagtatttttttttaactcgtaatcccatattaattttttgtttcttttggtaattaatcccaccaactatattatttggcaaaaaacctttgtacaactcatattttttttatctttttttagagaggcttgaacaactaataattacttggttccaacttccaaggaaaaataaataaagagaaaattaatgagaaataaagcaagagagattcttgcaataagaattgactttgatgagatagatttgtaaaatcagaaaactatatactataaaagacaacaaattagattgttgtggatgtccaatttaattaaatgcttatgagtatatatgaaaatttagttttctttacctttatgtattaacaaatgtgcactgcaaaagcttttaaaaactagtagaaagtagaatcgatgtcgtattttgggaactacgcacgcacacaagacacaacactccgttttcattaaccccgccgaatgtataaacggcaagacgttttcactagaaggaaactgcaaagacaagtcagcatggacccgatcgagtccatgcatgtacctagcccaagagccacgtctctcaaatcaacgttccaacttctactccgtatttataaaacgtctccactgaaaccctaaatttatagagatcttttaattctaaagccaacaaacaaaagtagttctctttcgatttcaatctttttatttgaagtatgactgtatgagcatgtaagtagatatgattcttggtgatgcgtctgctgcaacggaggcgaatcgcagttatgcggcgtttcagttgagtcttgagtgtgcaaagaatgaatacctgaccgatagggaccagagagcgacctattactgccggaagtaactgatgctctgcaacaagctgttcgtgcaatgggtcgtacggtgcgaacgataagtttcccgtcagctgccgcaagaaacggtttaatcgtcccacaaaaggtggtagaaccaaaaaagtcagtggccctcttcggttacttagtgatcatgctttacaagaatgacactgaagtcagctctgatcaacatatgagaatactttttgatgcagctggttatatatgttccgatcaaaggagaagatgtgtcagtgttcaatgatgaggatcactcgacctacttacggtccacctatggtatagaaccctgagatcggaaaagctgtcctgaaaggttttctcaatcataccaaggatggagattcttttggtgatatttgttcatatgtggccaatattctttcttggacagacatggaagaatatactatttttcccccaagaaaggtttgtttaggtttaagaaatcttagaattcataaacaatacgtgtagtgaagaaattctttgggctaactgttacttcgtctcaactatgttttacatgttcggagcaattgtgctctgttttgaactgtcatgctttgtatttctgtttttgaatctcttccttgaattcttttttaatgaagtttaagacagcaaataaaaatcaaagcaacatactaaaatatctgattaaacacatgtggtgcacaagaaaaaaaaaaaaaaaaaaacaggatgccatgtagaatcagaccctaactacagaaaagcttcgctaatgactcagaattttcctcaaagtagtcgacaatacgctcggtggcttcgcacactcggccagaagcgtactacttgacatgcatatcaaaatagtagtctactttgtcagatatctctgcattcactaccttgttgctgccaccaagcactctattcttcaacttctctgcgacagcaatgagcgtcggaaagtttgctcttctaagtatagagcagctcgcaggatcctcatgcaagatcctgtaatactcaggcgagtcagtttccttgattgcttgatctgcttttttccaattgctaactcaggagctttgagaacaggggaatcaggataaacaagattttcttcgacaacataatatcctgccatgtctgtctaagaaaggaatttagcacattaagactaacactagagaa

SEQ ID NO: 35932 - DNA, 3250 bp, Arabidopsis thaliana landsberg
tctctcccatcacttagagaacttgatctcttctgtgttgtgtacaaagacgaagcttctcatgttaagcttctatcaagttgtcccgttctcaagcatctaaaggtgactctaaatagacgtgtgcaagataatgtgagaacgtttagggttgaagtgccttctttattgagattagactacaaagcaggtatgatgtttcgagaagacagtggtatgtctgatccgtttttggttacagacactccgaatttattgtctcttcacatctttgatactgtgggatactctctctcagtttggtacatgccccatcttgtcacagtagttactgatgagctgttccctagtgaaaaatttatgaggcctctctcttcggtcaagtatcttgcgctatctccgttcgatacaatggttccgtggtgtgacgcagttaataactactctcgacttgttgaatgtatgatacatctatctgagtatgacttgttggaatcacttttggttttgctctctaagtgttctaagcttaaagtttttctggtcgactccgacattccgagatggaatcatgacccagctttatggaatcaaccgagttctattccaagatgtttgtcgtcgcatctcgagatctttgagtgggacggatatgttggaagagaagatgagaaaaaaatcataaggtacattctagaaaactccaaatatttaaaaacagcgggaatctcaccgaattcaaccttcagtggtgaagagaaacagaagatggaggagttagaatcaatgcataggactccaacgtctgtgcttctgtcctctgctcgaatgtcatttagatattagtatatctgtctatttgttagtaggtgatgtttctaatcctagaatttggaagtttctcgaactttgtttagtcgaattttgatatgtattttctccaatacattgtcgtgaaaaaccgagtacaactcagataccgcataagcatcataacaaacaaactagattagatactcgtaaggacaacaataatccaatttcctgataaatccaaaagtatttgaaaacaatctgcaagtgaataaagcatagagactcaatctctcttaactcttaagtagtgagttccattattgcacttacaatgtctccatcgtgactcttgagtgctttgaccgctttgctacgcgaaactccagcctgagtcatgaccaagtcaatgtcacgagcctccacaccggtctcatcgatttcctcttcatcttcttccacctgtgcttctacagtggctgtcgatgcctctgctctctgagatgtggctccaatttcaggcatcctaaactgttgagcagcttgcgtttgaagctgagagctcaaatcctcgatcttggcctcaccgaatataacataggtttctgaatgcgggctcttaaagacatcaggcttagagataaagaagagaacctgataacattaatgtagtgtatcattagaatcacacacgcagaaaaaaatctaaacttattgagaaaacagagaaaggtttacgtttttcgttctcttgatggttactcgactaacaccagtgacaggtttcataccgagcttcaacatcgccttcctactcttcttttcacttctactctgctttgaacttccacttacacctacaacaacaaaactttattcaattttaagaacaattcactatgctataaacatattgggatctctattctccgaaacttagtcaagtaaatccataaatcttggcctcaatctatcagcaaaatgattcatctcccacatctctatatgttaacagaaacatttaaatcaaccatttctacataactatgcagtaattctttgaaatgtgacactctttgcatacacgaaactacaaatgtgagaacgaacaaggccaatgattaatatgattaatattcaatgacatttctaaagaacactatctggaaaattaagtaatgattgatgacgaacaaaactctaaaagccgggctacactggtgagaaaagagggaggaatcaacaagcaccttgagcatcgtcgccttcctcttcttcgtcatcatcatcatcgtcttcatcatctttaacatcttctacaatcggttcatcagtctgcaaaaacaaatcctcgagcgtgagactaagaagtaaaaaccgtgacaaatctacgtaaaatcgtcttaacctgaagctttttctccagctcttcagcaatggcggtaaccggtggttgctcaggttgtccatcggcagattcagtgactacagcaggaggaggagacatggctttcggagagattttagggttccgattcgattttgcgtcagccaaatggataaggaacggtgaggtggtgagtgacgactgtgtgtgtggtaacgactcgggttctgctttgtcgttgtccaattgggccttttattgggcttctgaggcttaataagaacaattttagttatctatataggccatgaaattccagtcctacattttctctgggccgcacatgatattcacgtgcccatttcgaaacattaataatcctctagaaaccctaataactctatcgaaataaatagtgacctcgtacgttaacccctaatcttctgtttggttacaggttcgattcagagactctaaacgttttgtttttatgtttcacttgaagttcagattatgaatcgatgagctctattgatggttttgtagatctttcgtgggacgcgagctagcctacaatggccaccggtgagctagcttgcacttacgcagctctcctcctccttgacaccttatgtactttctaggctcaatattgacatcaatcctactggagccttaatgaacttgtagcttgtttgttttaattaacatgtactcaaactattttgtttacttgtaaactaggctgagaaagatgtcaacattggtgaaaacagccaatttgaacattgaatcatactggcctagtcttccgccagaacaaaaacatggatgatctcatcatgaatgctggtgccggtggatctgctgcttctcccatggccgttttttcttctgcactttcatctggaagtgccactcaagctgccccagtagctgaagagaaaaataaggtatcgtattcttctctccttgaacccttttactaattaatatactatactcataaattcataattgtaattactgttgatattcaatataaatatc

SEQ ID NO: 35933 - DNA, 1457 bp, Arabidopsis thaliana landsberg
tgcggattctttaaattttgggtgttgttgtgtaagtggtgatttctctatttttcctcaaaacacttgtgcttggcgagttttggagtaatttatgtggattactctttaatagccttttttcttttttttttgagcaacatagccttttttttttcttttaaagacttgattttcaatagaaacaacaatacataggcccaaaagtccaaagacaacacggcccactagaggaacacatctccagcgccaaaaagaacaacattctgcaaaacccaaggcacaccacctgttacaaaagtcaactttgaaagaattcaatctgaaccacagcagaacactaagtaactctttagtttgtaaatgtgacattatcggatttacatacatatcactaagcataatgctaatgaagagctatgaacacctttttaagtcaagtcgcatacctttgtggcatttgataacttgggatgttgaggttataatgaacaaactttctgagtttttaagaaagaaaatagaataacctgactccaaacattaacaaggcatgttccaataaaaatggcaatatttactcagaatcagtgttccaaatcttgattctatctcatactttcacctgtacagactattcttaaaaaattgggtctgtcacaggcataatggttttacataaataacctctttagctcgcctcgcaatcgatgacgttttcagaatcaattccatacaaaagaatggctcgagagaatatgtttgcatataccaaaacccttctttttggtgcttctcgtcattgcgcttcaacgcaaacatgaaacacctttctgctttgcttatgtagctcagctttctcaacgcataatcagactccgctcggtccatttaatggtttatttttccttgagggcagagttttctattgatgcagcacgagccgcctgaaactgtatagtgtactttctttgaagctctcttagtttctccataatttcttggaacgatggtctgtcctgcggttcactgcaaaaattatcttactaacattagctgctgcttcatttactaaacgaaagtagagaaagtttacgagactaagtcacttactacttaagtaaactgtgaaggcaaatcagtatatatcaatacagtggtgtcggttgaaagaaaagtatacaagatctgacaccaaacttacaataattgtatcaaacatgagcctttttatgggccctgaatctgtggaaaattttcaactcaacaaagcatagaccttgaaagtctttacactagtaattgaagccttcaatagtatgtgtttgggacccatggaaattaaaggattggagtgcaaagtaaatgttttctcgaacttttgctcctcaaggtttcctaaacagtaatcttacaaataacaaattctagggtttgccccatttctacatttatgg

SEQ ID NO: 35934 - DNA, 3175 bp, Arabidopsis thaliana landsberg
cctttgttcttgaatggtcagaagcttaatggatcgatctcggtattggggaacatgacttcgctcgttgaggtttctcttcaaggaaatcagttctcaggtccaattcctgatctctctggtttggtatctctacgtgtgtttaatgttagagagaatcagctcactggtgttgttccacagtctttgactagcttgagttcgcttactactgtgaatttaactaataatttccttcaaggaccgactccgttgtttggcaaatccgttggtgttgatatagtcagcaacatgaatagcttttgtactaatgtagctggtgaggcttgtgatcctcgtgtggatactttggtatctgtagctgaatcatttggatatcctgtgaagcttgcggaaagttggaaaggaaacaatccttgtgttaactgggttgggattacttgttctggaggtaacattacagttgttaatatgaggaaacaggatctctcgggtactatttctccaagtttagctaagcttacttcattggagactatcaatcttgctgataataaactctccggggatataccggatgagcttaccacattgtctaagcttaggttacttgatgtgtctaacaacgatatatatggagacttgccaaactttcgggatactgtgactttggtgactgaagggaacgctaacattgggaagaaaggacctagcaaaacgagtgattctcctggagcttcaccaggaagtaaaccttcaggaggaagtgatggcagtgaaacttctaagaaatcaagcaatgtcaagattattgttcctgtggttggtggggttgttggtgcattgtgtttggttgggcttggtgtgtgtctttatgcgaagaaaaggaagcgacctggtagagttcaaagtccaagcagcagcatggttattcatccgcatcattcgggtgacaacgatgacattaaactcactgttgcagcttctagtcttaacagtggtggaggaagtgatagctacagtcacagcggaagtgcagcgagtgatattcacgttgttgaagctgggaacttggttatatcgatacaggtcttgaggaatgtgacgaataacttcagcgaagagaatattctcgggagaggtggtttcgggacagtttacaaaggcgaactccacgatggaacaaaaatagctgtgaagagaatggagtcttcggttgtgagtgataaaggacttactgagtttaaatctgagatcactgttctgactaaaatgcgtcatcgtcatctcgttgcgcttctcggttactgccttgacgggaacgagaggcttcttgtctacgagtacatgccacaggggacactaagtcagcatttgtccactggaaagaggaagggcgaaaaccgttagactggactagacggctggcgattgcattggatgtagctcgaggtgtcgagtatctgcacacacttgcgcatcagagctttatccatagggatctaaagccatcaaacatccttcttggtgatgatatgcgcgctaaagtctctgactttggattagtacgtttagcccctgatggcaaatactccattgagactcgagttgctgggacttccggataccatgccccagaatacgcaggtttgtacttacccaaattttaaagtatctgcctttcaattgatttgcacttgcccaatgtcaaagtttcgtactttggtcgttttgcacttataacccaaatgttaaattttcatgctttgatcttattgcatttacccaaatgttaaagtttcatccttttgatcgtttggcaattgctctatactctgattttggcagtgacgggaagagtgacgaccaaggtagacattttcagccttggggtcatacttatggagctaatcactggtcgtagagccctagacgagacgcaacccgaagacagcgtccatctagtcacatggttccgtcgggtagcagccagcaaagatgaaaatgccttcaaaaacgcaatcgactcaaacatcagcctcgatgacgatactgtagccagtattgaaaaagtctgggagcttgctggtcattgctgtgcccgtgagccttaccagagaccagacatggctcacatcgttaacgtcctttcttcactcaccgttcagtggaaaccaactgagaccgaccctgatgacgtctatgggatagattacgatatgccgcttccgcaggtgcttaagaaatggcaagctttcgagggacttagccagaccgcggatgactcgggatcttcgtcttcggcttatggaagcaaagacaatacgcagacaagtatcccaactcgcccatctggatttgctgactcgttcacttctgtggatggacgttgaagaaatcaagattgcgtaaaacgttttagtagaagaagaagatgaagcattgtgtgataaatctctctcctttttttcttttctctgaagcatatttacttatgacttggtttttatctactgcaagcttttggttagtgtatttatctatctactttgtgtagtttttatgcaaagataacaatctttgagttcttaaaattttaatatttcgtcagtaaaatccaactcataaaccgtaaaagctgaaccaaatagtattttgaattcactgcggtttaagttattaacatgtgtttaggggtttaagcaagtagattactataagtacactttctatgagaaatcattttgtattccaagcccacaagtccaataaagccttgtgtttatgggtttggactttggaccatacacccactggaatatcaaagcagtctccgtattcattcaatttgctatgagccagttggtccttcccttctaatgaaataaatgattttggtgtccctcattttataaagcacactgtccaatccaatcttcataatattaagcatctactatttaggttcactgatcatatgatatacaatctaaacatcaaaggtgacaccgataattggaactaagttaggcaaacttaaccatttacatgtaaggatccaattatcacccataccaccattcacagcttttgatgtagttaaaagagattagatatgagctccacagataatgcagattcaccaacaaaatctttagagctcatggcaggagca

SEQ ID NO: 35935 - DNA, 1647 bp, Arabidopsis thaliana landsberg
  unsure (1)..(1647): unsure at all n locations
ttgttttttacttttcatactttgaatcttcaaagtccagtgtatttttcttgttagatgcattggggcatatgtttagatgtcgtaagtgttgatcgttactcatggctttatttacttttgatctggcagggacattcctcaaatgtacattctgtttgttggagcccaaacggagagttggtggcgtctgttagtgaagacgctgtaaaattatggtcactgagttcaggagattgcatccacgagcttagcaacagtggaaacaagttccactctgttgtttttcaccctagctatcccgatctcttggtcatcggtggctatcaggtataacctatatccccatttctcaaacaaataatgtgtcaaacaatatctagtcttatgttcaaatgtgtgatgaggtgaatgtgtctctcagttgttttaactttggtaaacgaatctgtgacaggctatagagctgtggaacacaatggagaacaaatgtatgacggtagcaggccacgagtgtgtgatctctgccttggctcagtcgccttcgacgggagtggttgcgtctgcaagtcatgacaaatccgtaaagatttggaagtagaaatatttctatgttcgtctgaaaagaaaaggaaaaaagaagaaatagcagagagctcaggactttttttgggtctaattttttttttttttttaatgttacattaataagttggtttttttttaaattgggtttgtttctgtcaaaagcaaagagacttgtgatatttccaatctttgtctaatgatcctacttctttacttcgttgttttgatctctagtgtttagagtgaaagagagatgtaagtaatttctctagaccaactacattgttgaataataatttcttataatcagccggacgcttgtttttaaggtctctttacgaatatcttataatgacactgcatacattaagttggtttaagatgaatacaaaactctaagcatgcacattgaaagtactcgtacgttaaaacttaggattaaggatgagtttattatctgcttaggcttaaattgtctttgttctgggttacttattgaacttttaatataaccgcatctttcttgaatgactctgcccctctttcaaaattatttgtttcagcatcactgtaacatttattgtaaaaatagtttttttgggtttgaataaattatataacattcaactcaaaaaaaaaaaattattatcctcccaaaactatgtaaaaatgaccaagttatctatcatcccccaaaaataaattaaaattttcgacaaccaccttttcaaaaaattatgcgattttattgtcttcttggacctcatatatccctttttaagagatacgaatcaagatagacgtgacatcaatctcaaagactgaaactcttctatccatgatgccgaactttgnaaaatttgtgtttgctaattaatggcatgattagagatttagagatatagtaatgggttaccctttatcaactcccatttttgatacattaaaaaatcaaaaggtcatcgacattagagttattgaaaggtttggttggcatacggtttaaattggcaaaaacatcatcaattttttttttttttttcaatactatggttttga

SEQ ID NO: 35936 - DNA, 688 bp, Arabidopsis thaliana landsberg
  unsure (1)..(688): unsure at all n locations
cccttgtgaagtttaagaacgagccagtgtcgtgacttttatctacgtggcgtccgggggctatcttgcttacccgtggctctcccttattagtatgacagtttcgccttagtgtgagggaggatacacctgattatttttacccgccgggtcaatttgaaacttatattgatggtacagaaggtaggagagaaatgcagaatttgtgggtctctgtttaaacctatagtctataattattaaatcgagaactttgtttttacccctcaagatttttttgttgcctgacccttaataacattgttgagtaactaaaacatatattttcgtttcatttatacgtttcctaaatgatttgataatatggggagtgttgatcaaaacagattatacgaacgaggtaaattgaaagagtaggtaactttttattggctttatggcataagattctccaaggagggttgattcataagacaagacaacacgtacatacatatctatatttaattggtatgaacatggattatgttattgatttatttaaaacgcgtcaaacaattgaatataataattaaannnnnnnnnnnnnnnnnnnnnnnnnaagcaaaatacagttcccccagaattcgatgttggcatgttacaaaaacaaagatacattgttatcatcaatgcctcagattatttt

SEQ ID NO: 35937 - DNA, 1595 bp, Arabidopsis thaliana landsberg
ttgagttggttaaaaaccctagcatcagtattttcatgtagaaggtcggctgatccatcaccacaacgccggacgacaatggtacttctctcctcctctgtcgtgtcaatcttcatttctctctgtctttcttctacaagtattttctgttgttagtttgatatcaaaggttcagaaatcttgttgttaagagattgtgggtgtttcctgtcattttaaatgttgtatagtgtattaggtttgtttttctgtcatttgagtctcgggttagagtgtgaacgatctatctctcttagtttttttgagattggatcttgctttcatgcttgtttgtgagattgattggttgtgttattgcagggtattgatctgatcgccggaggtaagagtaagaagaccaaaaggacagctccaaagtctgatgatgtctacctcaagcttactgtcaaggtcagaattttaaacatcaatctttgtcctttgccttatattatccaattgaagaggttttttaattttattttagtgaattgttctgaattttgattgcgaaattttgtagctttaccggtttttggtgaggagatctaacagcaacttcaatgctgtgattctgaagaggcttttcatgagcaaagtcaacaaagctcctctttcactctctaggcttgtagagttcatgactggcaaggttcgatctttttgagacccatctctctttatatacatcttgagtctgtccttggtcttaatttagaaccccatttattttattttcattctgtgaagttatgagttttgacgttgtcctgttatgttagtatttgagaacaaatgtacaaacttgattttgtatcttactattcagtgatggttagagtactcaaatgttgtggtttgtctatttattaggatgacaagattgctgtgttggttggaactatcactgatgatttgagagttcatgagattcctgccatgaaggttactgccttgaggtttactgagagggctagggctagaattgagaaagctggtggagagtgcttaacctttgaccagcttgctctcagagctccattgggacagaacacagtaagtaaaattttacactatctgaatgtttaggataattcaagtttatatatgaaactgagctgtgtttgatatgttgtgacaggttcttcttagaggaccaaagaactcgcgtgaagcagtgaagcatttcggacctgctcctggtgtgccacacagtaacactaagccatatgttaggcataagggaaggaagtttgagaaagctagaggaaagcgaaagagtcgtggattcaaggtctaagaagatgttgtctggtttcgttttgcttggtttaagtatcgaagttttggtagggaacgctggttcctctttaccctgttccagactttgttttaagttctgtttttctattctcaagacaattggatattttgctttgtcttttaatcttactactattagctgcaatgagattttatctagaatttggatttgatcagtatttggaggtcatagtatcattatgggctatttcgtttgatttctcttcctggaa

SEQ ID NO: 35938 - DNA, 1066 bp, Arabidopsis thaliana landsberg
ctatcaccaaaagtgaatccgtgaactctcgctaggcctgtgagaaccaaccataccacacttgggtcagtaatagctaggagctataatccatcattggcaataacaaatatcgaatcgcttccattatccaaacaacaaaagctttgcaaggcagaatataagatacttggattactgagttatgccatggttcaatatatgtgttctagagtacttaaatcacttaaaatgattataacaaggataaaggataatgttgagattttgaagggaatgtagagattttgaagggcacactcactttctctgatctgtgtaaccaacccttcaactgttgttaccattccaccaagtgtaccaccagctagctccagatcaagttctgggattatcactcctgcagtgtccgactaatacacacgatcaaaatttaccattaatgacatagtagaagggtgttgctataaaaatctaaaggatcataagggttttctactatgatatcgccatcagatgtctttacatatataccaaaagctaacaaagatcaaacaagcctattctacatctgatctcgaagtttcgacacttatctgccactacctagatatattattttctgccaggacatgagaataccatatataatttggcagcgagcaagattcttgtcaaacctttacccaacttaaactacatacattctgtaaacttaaactgtgacaatcttagctgcttttaaggtacatagaataatatgaggaaatatctattgatccgccactgagagaactggtgcaaaacaaaatgaagcgaaaactgaccttgataacatctcggctaaggtctgtaatgttcctcacagagagagtaatcttctttcccttttcaggaattgcaccaccaggcttcaactgctcacgataacccaaaaaaagttagtaacctaaacaccaggcatatatcagaaattctctaacaagatcaaaccaacgaaacccaacctcagaattacgatagccacaactgtcacatgtagatgccatgacaataacttcctgaa

SEQ ID NO: 35939 - DNA, 757 bp, Arabidopsis thaliana landsberg
taatttgcaaatctaaatgggctaattgttctcggatagcacccgccccagtagaaatttctcgatttcgaaatatatcgaaaccttgagtagtaaaaaaaagtgggatgctgtattttcaggattgaatttcatatttgaatggacctcgtaatcgtaagaaagtaggtttgtttagttatatgcctagtatacataaaataaaatgtgaaaaaattacgaaacagagaaatgataacaattttggtttcatgacacttgctagtctatattatttttgtttcatgacacttgctagtctatattatttaacaattttggtttcatgacaaatacgtttcataataatcgccataatatcaattatatgattactattaccaccacctctttgtattatatcatgattctttatcaacgaagccaccgactcactcgtaaccacttcaaaattcttcgtcatgtgaacattcccaacgagttgactcaacacaaccgattccgtaaccgagtttttcttcttatgctgcagctaaatcgtcgctctcacaatctcagtgtgcatcgagctcgataatctcctgattcctttagctccatcgatcaaaatcgccggaataacatcagagcttttcttgccactgtgtttagagaagaagaggactgattcggggatccgattacgaatcgggttaacgggtcactgaggaacaaggaggttttagggtccacgagcataatgtgtttgaaattgggt

SEQ ID NO: 35940 - DNA, 1911 bp, Arabidopsis thaliana landsberg
aacccacctgtaagaacaatggaccaaacagaacaaaagagcaatgtgcgttaggacatagaggtgttcaatctgaaatggctactgacttttaacttgttaatacaaaactgagatgagatgagattcaaaactcgacctcgacaaaagctcggcaaagtgaaaggaatagattggattcactgagtcgaagcatccgagttgtattgtatcttagtaaggagtcagacacggcctggagtcctttgatcagttcatgagcaacaacattctttagacttagcggggcacaaggacgtaattcgttcaaagcagaagatacccctgttgacatagccgggattatcaatcacaatcagactgtgaaaaaaacatccataagagagataacaactttcattttgcaacatttgacatagttgggagttaggacactcattttggttatatcatccataatgttaaaaattgatagtatataattatctcaccatttatgaaaactgcaagtggcgggtgctccatcaagtatgatggaggtgtgacgtcatccttgctatcttcattaataccacttgaaggaaagccaacagatggtaatggaacccatcgatgtgaatccaaaactaactggaagtaaaacattctgaagaattcaagagtgtgacatgtggataattggataccaaacactgtttgagttgagttccatgccagaacaaaagttcaaatattgcacctgaaaattctcaactgctgtactcatgttcttggagaataagtttagaaccgccctgtagtaagtatgcgagttagatactgaacttttacagaaataagcgaaggttatgacagcagttaaaattagattgaaagaattgttactcttcaaaaagtggaggaagcagaccccggaagtctagcccaaccccaccaagccccatcgcacagtactgggtggacatgagaagaaggtaaaatgtcaatcatcggagttaaacagtgaattcaaaaaggaatacacaagatgcagaagaactcaaccatgcactgatccaaaatatttgatagagatcctccttcagtaatctttggaagcatgatttttagagtcttcaggtgtgatgttatttgatgcatggcccagctaaacaaaagtccaccatcataattttcttcgctcccagatgtatcatcagaaaatatagctcgatattggttaaccacgtcaaataggtgcattctgtgacagtttatcatgccttttaaatactcataggcatttttctgatctaaatcctcaagaattccagtgagccatgcctctcggcatcttaagaactgcatagacaagaagatccattaacaagtgaagacagagcttacagaatgaacaattccatagacaaaggaatacaatgtaatggaaggataacctcaaatgttatatgtcaaaatatttcacctgtaatcgcatttcatactcgccaaagacacctattcggcgtaagtatccaataatgcggagacattctggtaactgaaacagagagcatcaaccagatattgagccttcttgattgctaagcttaaccattccatagttactgaataccaaaaataaaaactgtattcacatgaaacctgtatatttgagcgtagtttctggagaagctgtgagagaagtgactgagttgtttgtctaacctccgctgcaagtgcttggataactggcaatcttgacatagagagaagatataatgtttagagctaaagcttgatggttgaggccttaagtaaaagtatcgtgagaaagattacaaaaaactcacttgggatgcagggtagcaagtttcgatacaaatgcttccaggtcaagagcctcatcaaaatttccattcctcacgcaga

SEQ ID NO: 35941 - DNA, 599 bp, Arabidopsis thaliana landsberg
  unsure (1)..(599): unsure at all n locations
attttccttctttgggttgtgttagttcagaaactgttaattttgcatgcttgaaattgggaaaatggttggatacttgtgtaatcggaacattacgaatggttttttttgtatctgattgatttgattttcctccttatgagttttttgtttttagtctctcacatgttattgttctctaattttggcttgttgttgggttgttttgtttcacctgtaggctggaattaacctgtctaagaaactaaactttctctagtttctagatttttgtatatgattaggacagtaaaagttgaagannnnnnnnnnnnnnnnnnnnnnnnagtttggttggaagagttgggagtttgatttctcaaggggtttactctgtagcgacaccatttcatccctttggtggtgctattgatgtcatcgttgttcaacaacaagatggttctttccgtagcacgccttggtatgttaggtttggtaagttccaaggtgttctcaaaggcgctgagaagtttgtcaggatttctgttaatggaaccgaagctgattttcacatgtatcttgataattctggtgaagcatatttcatcagggaagttgat

SEQ ID NO: 35942 - DNA, 1199 bp, Arabidopsis thaliana landsberg
  unsure (1)..(1199): unsure at all n locations
ctgcagtatgaaatgactaatgagaaaactatagtataattctaagctcacttctataattctaagtttatgagttaatgagttatataattcttacatcaatttttcacccaaaaccttatatacttcctacatagcttagatgaaaaatgtttttttcttcttctaaaacttcgttgatttcacaaatgaaagttgtatatatacaagtctaaaactttgtttatattcaaagttattcatttaagttcctcaaaaggttagagagattaccatagttacaaatatttcataattattattttttctgtataaaactcacaaaattacaattttaaaattaagttaagtttttcataatttcgttttcaatttcatattttatctactcactattttttttcttgcaatagttattgtttgatactttgatcagttatgcaaaagagttcttgatagttaatttatggtaatttactgtgttcaatatacactgccgaatataacaaggcccaaagggccaataacaccatttgggcccaaacccaccatcactctctctctctctctctttctttttctctctcgaaaagcgctcaacggtctccttgtgaaccacaaaaccatcacttcccggagaaatctgagggaattgagtctcgaggagttcaaatttgtgaaattgatcgacatgaatcaaagaggaagatccaccaatcgtagatcaaggagcttctctagatccagactcgccgttgaaggccattgaaatctcccatcacatttctctatcgtcttcttccttttgagttttccgacgacctctccaaaaatggcgacaccatacagtaatattctccttataatatatattcatcctcgtctgaatcgcacagaaatcgaatctttnttgcttttggtctttgtctttttctcctccattactttatcaaaatcatgatcatgaaaaattctaaattttaaacttttttgctggccctctttcagaaatcaatttattaatgatgtagactaatcacgctttgaatgctagaaaaatatcaattctcgaataaattatattgtggtgtagaataagtaggtgtctgttcaatgtttcctaagagtatgagagtgtctcattcatgctctgattatatacaaatggaaccctgtaagagagtgctattcctataagt

SEQ ID NO: 35943 - DNA, 1071 bp, Arabidopsis thaliana landsberg
catgtcacgaaagatgttcaatgcttcatgtagttcccattgtgtcccatgtctttagttaccttcaatcattgcattgaataaaaccacatcagcagcagcgaagatatcaaaaacttttctggcatcggtcaaacagtcacatttcgcatacatgtcaatcaagctgttagtcacatagctatcattgccaagattggctttgatagtgtaagcatgaacttgtgttccaaatcccaaagcatgaagtgaggcacaagatgtgagtatgctagagcaagcatacatatccggctttaaaccaaactttgacatactggtaaacaattccatggcttctttatgaagagcgttctggttataaccagagagcacagtggtccacgaaatgatgtttttattcggcattccattgaatagcttatgagccgctataactctgccacacttcacataagaatctataagcacattcatcagtgaggcatccatctcaagtccatatcttaagatgtgcgcatgaatctgcttcccaccttcaagaaacggaagtattgaacatgcacttagaaccgtcgaaaggatgtagccatctggaacaacattgtcttccattagttggtagaacagctgtaatgaaacgtagcttcttcccatttttacacacccactgatcatggtcgtccaagtcacagtagatttctctggtaaagcatcaaacacaagcctcgcataatcgatattaccatccttcaaataaaaatcaatcaacaaggtaccaacataaacatccctatcaaacccactcttgacaagaaaactttgtagttgaaacaccatccaacgcccacgaccatctaagcctgagcaagcttgaataaaactcgacaaaatatattcattcggactgacttttctagttctccagaactctaagaaaaccaccaaagattcctcataaatcccatgatggttgcaagctgaaaccatggtagaccaagaaactaagtttctctcaggcattttctcgaacaccttacgtgcataaaccataccaccagctctcgaata

SEQ ID NO: 35944 - DNA, 5074 bp, Arabidopsis thaliana landsberg
gtcactagagcatgtgatatctgcttcaaaatgatagcattgacaatcgacttagcttgaatttccatgagaactctaaacgttggtaactagcaaaatatgcaaagcaaacaactaaaacaaagaaaccacatggtgatatgatttgagatttgcgcagttcacttataccttttccatcctcaacatcaatgacgctgttatcattctgtgaaagcacttgctgttgttctgcagcaacacctcctttatctacaggtttccttttccgtctgttgttgtgacgctctagctttctccgacagctgcgttttccttcatcaaagtccgggagcaaatgaaacctgccagatagtactactcactataatgatggataacagcatagattgaaagaattaatacaaacaataatactgctaaacagaagttaagctcagcttatgctcaacaaagagactaagtaaattccgtgggatcattcaaactgatcaacagtctctcccaaagttatccaatttcttaacaatagattcaaagtctctatcccaatcaaacagacaacagaaacccatcccgatcttcgatcattttgtgctgcaaatcaaatctgaacaacacctaagtcaaacacacacaaaaatcccaggaggatgcataggaggctaactaagacagttcccgctggattcacctatcaaatccaattcttatcctcaaagccaagaaaagtgacatactttccacactgtcgacagcatctcttatactctccatcaagcacaacaaagctggcgttagcacaacggagacaaaccctatgcctcttatggtaccctttgagctcactaatatccgcttcacaatccggaacctgacatcgagccacacccgacccgccacgaacccgtttcttcttcggaagctcggcgtcctccaatttctgatcaagctcaggacacgaacaaggaagcataccttcaatgaaattggaacaaatcaacctcgggtctcgcttcctaacccgatccgaaccagaacccgattcttccggagaaggatctaattcagattccgccggagtttgcgtcggaatcagaggcggtagaggaggagagagaacgggagggaaatgaatttgatcgacgagaaggcgttcgtctgcggcgaagtcaaggagatctccccaatcccacaaagcggaggaataagtggaaggatcatcgttaaccaatgccggcggttggatatccatctccggcggtggtggcgattgcgacagagaagacatctgagagtcttcaatttctgataaaattcagagaaatattgaaaggtccatcggttgttgaggaagttggtgattttggttgaaggttttaggtaattttgcacaaagtcatcaacatctccgaataatgcatttttacattactttttttttttttgacatctcaaaactttttatttcttgagttattttatggaactaaataaaataaattatctaaaatagtctacattttttttttatctatggaatgactcgatcaacagagaactcgttgaactaataaacacaatcatgattatttaatcgtgctttaatagtttattcacatattctttttttttcttgcctaacttatataattcaaaaattctttgcggcaaaagacaaaaatccgaaaattcatcatttcacaaatagcactaatactattttttttttttaaaagattgttttaattcaaaattaattgataaaaatcctgaaagatccattatctttgcataatgaaaatgttaaaatcattttttgatttacgatgtgaaatattctgacagatgacaacttaacacaactaaaagtagtttgataattgatagcccaatcgactcgttttggaatggttattgcatatggttcaacttattacatcttgttatataatatccaaaaaggtgtatttatgttttacattaaccagaagtagattgcttgaaaaaaattgtaatatagaaacgttcttttgttgcataataaacagaattcaaaagaaaattcttagaattaaaaaccctaactacagaaaaaaaatttgggaaacaatatttgggacacttggttatataattagcctataggtttatatttgggagtccctactttataattagcaaaagaaaaaagaaacaaaaagtggccaaggaggaggtgttgagctatggaggaggaagtgtcgggacgtgagagacacgcgctaaatgatggcagcacatgattggttgaagggaggttcgcgtgtaagctacgtgagtttgaggaaatcaacggttcatcaatcattatcgaatacgacgtcggttcagtgttacttgggacgtgagcgaccccaagtgctctctctctctcgcttttttttttttctccaataataacggtggtggaattttggtcttctcattccaagccattcaccaccagaaaatagacacgtgtctcatccaccatgtgcttactaagttactatatacccttttgtgctttattttgttttgttttcgcagacagaaatatgacatggttaatgattggtattaagaatatgtgctatgaaaattggagattagcccacttttcggatgggccagtccgggcccaagaataaatgatgacaccatgaacaatttaaacattaacccacatatgaaaccgaggaaaaacacaagggtctggtaagattaagaacccgagttcgatctctgtaattcaattggagataaaaactactgattgtcgattgagagcttattcttaatgtattgaattactccaaatacgtctcgacataaccacataggctacaaaagtttaataagatgaaattgcataataattgagacttgatgacgctttctaagcacaaaactgacaaaagaaaataatataaaagatgtccgtatacacattataacaactagggcttacagcgtaagaatcttgcattacaaggcattttcttgctttctccgaaatttgaggctaactactagcttagctaacacaataagcaacaatgattccaacaatcttttttttctttcactctgcacataccattgcatcacagattctaatgattagttaaaacacaacaagattaaacaccactttgtgagcaaaggtttagattctgacaaaatctgcagtagagagtttggtttttgtgcttctttgttacctttggtggtggttggttatgatgtgggtatgccaggaacttgaggaacagcaggtttaggttgcttgatcttctccacgagtactgcttgagttgtgagaataatgccggcaacggaaactgcgttttgaagggcgaatcttgaaacccgacaaggatctgcgattccagcgtttagaagatcctcatactttccagacattgcgttgtaaccacttctccattcgagttctctggttttctgcaccacaactgatccatcaacaccagcattggttgctatggccattgcaggtgcagtgagtgcctgcaaacaaaaaaattaaagtgatttttcactcttaaaaggttactttacgaatccagtatggttaagaaaacatgttttgttttggcattaagttttcataccattgctacaatatctgcacctatttgttcgtatgaatcttccattagattcttcttgattctcggtatctcatctaaaagatggatataagcagcaccaccacctggaactatgccttcctcgatagcagcaaatgttgcgttctttgcatcctcgatacgaagcttacggtcctcaagctcagtttcagttgctgctccgactttaatgacagcaacacctccagatagcttcgcaattctctcagcgagcttctcggagtcatacacagaatcagtctcgaatagttctttcttcagctgagcaatccgagcttgtaattcgtccttggaagctgcatctgcaatgagggtagtcgaatctttgctaatcgtgacttttcgggcaatacccaattgatctatggttgcgttttcaaccagtaagctcatgtccatggctaggtactcagctcctgaaaaacatacaaaatgataaaaagtttagaccataacagagagaaagtaaaagtactaaacgcacgcgaaatctgcatatacctgtcaagattgcaatatcttgaagcatggcttttcttctttctccaaatcctggcgctttaacggcaacaacattgaggacaccacgaagcttgttcacgacaagggtagctaaggcttcaccagtaacatcctctgcaataatcaacaacggagcacgaagctgagtggtcttctccaaaatagggatgatgtctttgatcgcagtgatcttctgatcagtgatcaacaccctagcattctcaaactcagctagtagtttctcagggtttgtaacaaactgaggcgagatgtaacctctgtcaatctgtaaataatcaagttagtcattggcaatgaatggtgaataaaattacagttgaagagaagcaagacaaaaaaactcatacctccatcccttcttcaacttcgaccgtggtctcaaaagaagatgaagattcaatggacaaaacaccatcaggtccaactttgtcgatggcatcagcaatcattgaccctataaggtcatcatttccagcagagatagaagccacagctggaaaaaaaaaaatagaacagattgatcagtaaaagaaatcaaacataactgcatcacaaggaaggtcactgcaaagttagtacctctgatgtcatcacgacctttcacgggcctagctttcttctgaagctcttcgatcagaccttgaacagtcttatcaattcccctcttgagtgaaacgggattcgcaccagaagtgacgctcaacaatccatgtttgattatctcccgagcaaggatagacgcagtggttgtcccatcaccagcagagtcattagtcttactcgcaacctaccacatacccacaccagattaccgccccgtataaatagcataaaca

SEQ ID NO: 35945 - DNA, 570 bp, Arabidopsis thaliana landsberg
  unsure (1)..(570): unsure at all n locations
gatggcttgaggcattctatcgctgggccagccttgctgggttgattggctatgagatgtgagtgacaaagtgaatgccacgaagaagtcactacttgtaataatcggaatggtgcttattggcgccagcctgagaggttcttttacgggagtagccccttnnnnnnnnnnnnnnnnnnnnnatttcgggcttgatggcttccaagcagggctaattaccgccatacctgttcttgcctttggtgtgatatcgccctttaccagcggaatcagcagaaaatacggcctggagctggtgttgttcctggctatcacgttgatggttttgggaatagccatccgttcagcaggcttgttgtggtccttctacacagggaccgtggttgttggcgccggaatcgcaattgcccaggtacttctgccgagtttggggaagcgcgattaccccgataacataccatcagtgacagccctttgtgtgctcgccgccggcgccggtggggcgctagctttcgtgagcgtggttcccttgagccagcaatttggcttgagaatggctgcttttttgtg

SEQ ID NO: 35946 - DNA, 1244 bp, Arabidopsis thaliana landsberg
  unsure (1)..(1244): unsure at all n locations
cccttcttcatgtctcatgcttcaaaaactggaaaatgtaataagtagaatgaatttctaatgaattcccttttacaatttaataaatttataaaatgttcatgaccatcaaattaaagacagcttataatttgtaaatattagtcaaacaaataacatggcactttaaaaacttatatgagtatatttaaatgatttactttactttatcacaaaaatttgacagtaaacaacattattcaactttaacaccaaatttggatatactcgattctttttattttgtcactacaaagtgttctatgtttcttttgatgcacactattcataactcataagtaaactcttaaccctaacaaatatgatatgaaaaagtaattcgaaagttaatttgtacaaaactagaagaaacaccaatacaccataaaaattaaataactacaactatgccgaaattgaagaaaactgaaaccttgatattatgccactagaaaactctttttatacatagtagagtaaataccgggttacgccccgtttattttaaatagttttttttatgttttactattgtttttagttcatatttttttaaaatttgctatatatacaaatataaaattagtttgaattacttatatttttatatactatctatttgtgatatttaaaatgaaactgaagtacttttatctgttttttatttttttanagatgnttctcctataaatagtatttcttaacccaaaataaacattgggtttgttttcactagaacttttttatttattcactttctttgaggttttgtttttgactaatttttggatttgtttttggagtaacattttatcaagcatatgaaaaacaattagagaatttggatgaaactccaacagcacatcctccaatgatttctctggcagaagttctctcaccacagaacaaacgagcaccacatcacgctaggtgatccacagaagccatcaaactacatgcgaacctccttaaaaaagagttacatatacgcaatgtcaggctgccctgtacaactaattaaactcttcggaactgaacatggcaacacccgtgagcagtttggtagatataaaagaatcaatactatgactgaaacatgtaaactaagaaacttactcattgtcaaaaaatacaacatacttagaagcttatatctccacagagacttgtgactcaccacctcttgacttgcctctcgattcttc

SEQ ID NO: 35947 - DNA, 783 bp, Arabidopsis thaliana landsberg
  unsure (1)..(783): unsure at all n locations
gagaatcttcgaaggtatgatcaatgccttcgtcgataaaaaaacatgctatatggagaaataactctttgtcttcgtcgtccaaagcatcgtaactaaattttaaaatgctcccaatttctccgtcaagacgaatccttaaccttggtagttcccctctccaatcttccttggacattccccgaaaatgagaacccataaccctaagtcccaaagggagattaccagcaagtcttgtaactttcgtagcaagcttcttgaaaccatcatcaggggcatcatgaccaaaagcatggatgcagaagatttgaagagcctcatgatctggtggaaaatccacattgtaaatatgtttgatctgaaacgccttcaaaagttgttgatcttgtgttgtgatgataatacgagatccaggaccgaggcataccgcctttggcatggcaagtaattgtactaatcgatccaccccatcaagaacaataagcactttctttcccatcacaaagttttgcgcagttcctaactgatgaatcttgatatcctcttggttaataagttgagctagaaactgctgctctaattgcaacttcacatcgtgatcatcacaacaaattggtcttgtataacttggtttgaatttcatgaaaacactcatttgaaaaccatcagagatttgattatgtagaactctagcaatagtgctcttaccaattccagaaggacctctaatcccaaccgtnctcctttcatctgatgagcccaggcaaaagcactgttcatctt

SEQ ID NO: 35948 - DNA, 718 bp, Arabidopsis thaliana landsberg
gcgagtccaatgtactaacccgttacacattagagcagagagcattcctagaaagtgaaagcttcttcattgtaccaaggtacacatcctcaagagataccttcaagggatgaacaacatcctcaccacgcctctgcctcctttgccggctggaattacctattcaaaaacagaaacattttcaaacgaaaattctcaattgcgatatcataaagtgtacagtgtccaaggagactcacctccaaaggggcctccaccaaagaaggatgagaaaatatcaaatggatcatgtccacctcctccaccacccattccttccttgagtgcatcctctccatactggtcataaatctcacgcttctccgggtcactaagcacttcataagcttgtgctaactccttaaactgcaatcaacacataacacaacaaatcaaactcataacctaacaaagaacccaactttaaccactcaattatcaaagcatgacacatctaaatcatcaaaaccctaatttttgattaatcgccaaaaactcaaactttttctcagatcggatcaaaattcaacattgagagactaacatgacaacaaatcaatcggatagaagaacacaatcgaacaatcgaattcgagagaatctaagcggatctaacaaattattcaccttctcgggatctccacccttatcaagatgattcttgatagcggcttttttg

SEQ ID NO: 35949 - DNA, 1450 bp, Arabidopsis thaliana landsberg
  unsure (1)..(1450): unsure at all n locations
ttttatctccggggtcgtgttttggatctatttttttagccctaattgacaggtctttctaagggtgggtttactataaaacgtgattgcatgcctacggttcaaacatgaagtctcctctccctcaaataatgtcaactaggaagacaacacgattgtctccctgtgtgacatggctacctttaatagatgtacaatgtaatttcatggattatgtttaacccgataataaattggtgtgggatgtaatgatttattttctttaatttaagaaattataagagttgacacaataaaaattagagaaaaaaaaaacatggcttttctttttactttatttatttaccctgcttcaaaacacaagagaataagagaaaagtgtatttttgaaacgtttttgaatgttagtttggttttgtttgatttatagtactgtttaacatcagaaaagacaaatgagtttaaaaaaataataccaaaaaaagaatttactagatacaattttaaagtggaaatatttttaataacttggatcctcgtctaatttattcataacatttatgtgatatattatatatataggaaatgatttattagatagttgactaaaactatatattagatgctattatttgcataattcacatagttatttattatgaaaaaagagaagaataatcagttatgtaaaagtagaatttttttttttttttttaaatgttatcggaaaaactgtatacagtaataaaaaagagaaaaaaaaaaaaaaccatatctttgtcgatggattaaaaacaacattttcattacgcagcgcttcttcgccctcagattcttcttcaccttgaaagaccattaacatcattccttgcccagatccaaacaatgccatctccactctctctatttagggttctctccaacttttcaaatccctaattcttgctccctcccttcaatcaattccgatcatcatcgaggtctctctactccccgaatttaaagatcagagccgcgacttcctctgccttcttttcctcggaatttttcagctacgttttccaggtggtgtgtattgtcaatcagttgacctttgcttttgtagccagatcgttcgtgctttgagtttagggctcttttacaaggtttcgtgttggtggaatttctctacctaggtttgggggaagagttcagtaatttcgttgtagatcgtgatttgggcttttagggtttcggtttactggttgctggaatttatggtagcgttattgaattcggactctctgcatgtgtaagcgttgaagtttgaagtttcaccgggttttgtttcttctgctgaagagtcgagattattttacgcattaagaatcgattcagaaggtttttaggaattagtttctgtggattgtaactatataactactgggaggngaatgttggttctacattg

SEQ ID NO: 35950 - DNA, 3082 bp, Arabidopsis thaliana landsberg
acagaacaaaaacaaagggaacagagagatatgtaacttttttttttattgaagtaaaatattataacaacccgttgaagaaatacagaacaaaaacaaagggaacagagagatttaaagtttactttttattttatgtcgacaaaacaaaatacttcaagttcaatgtttaggtaccaaaaaacccattgattggatggtggtggtaaatgacaaagacacgtcacaaagttgaagacgttcgtcccttgcccgccagtcaagttatgacttatgagagtcacataaccaatattaatatatctcctattttgtctacttttttttacagaagtccaaatttggttcttgcgccttcgtggcacgcaaaatatcgattacttcaaaagaattatatcaacacaaacactataaagtatataagacatcatcggtgatgtcatcaccacatccatatcttttccacaagttttcaaccttttattccccgaaaatttttagcaaattctctacctctatctctctcttctctgggaggaaaaatggagatatcagttgcatcggtaacagtttctgtagctgtagttgttgtgtcatggtgggtatggagaactttacagtgggtttggcttaaaccaaagatgcttgagagttacctgagaagacaaggtcttgccggaactccttacacgcctcttgtcggtgatttgaagagaaattttagcatgctggctgaggcaagatccaaacccatcaacctaacagatgatatcacaccacgtatcgtgccttatccgttgcaaatgctcaagactcatggtatgcttcccggttggcatcttgattcctctttgtttagaactattttgtagagtatctagaaaaagtttcaactttcgtatctctatgtggttgaaacagggaggactttctttacatggtttggacccataccaacaatcaccataatggatcctgagcaaatcaaagaagtgttcaacaaagtttatgatttccagaaggcacatacgtttcctctgggcagattaatagcggctggactcgttagttatgatggtgataaatggacaaaacaccgaagaatcatcaacccggctttccaccttgagaagatcaaagtttaaaagctttcttttccgtagtcccagtttagctttatgtatgtatgcccatttggttctgaaccaatttgtgtcctctggttttatgtacagaatatggtacctgcgttccaccagagctgcagcgagattgttggcgaatgggacaagttagtgacggataaacagtcatcctgtgaggtggatatttggccttggcttgtgagtatgactgcagatgtgatctcccgtactgcatttggcagcagctacaaagaagggcagaggatatttgagctccaagcggaattagcacagctcatcattcaagcttttcggaaagctattatccctggatatcggtaataaaatcccaaacttgtctgcttttagaacaaggcctttcagagcttcagtagtgctgcaatctactagagactttgaaccatgttttgtaataaaaaccctaacttgtctctctgtcgtctgttcgtgtagttatctccctacaaagggtaatagaaggatgaaagcagcagctagagaaatcaaatttatactgagagggatcgttaacaaaaggcttagggcaagagaagctggtgaagcaccaagcgacgatttgctgggtatacttcttgaatcgaatttgggacaaacaaaaggaaacggaatgagtaccgaggatctgatggaggagtgcaagttgttctatttcgccgggcaagagacaacatcagtacttctggtttggacaatggtgttgttaagccaacaccaagattggcaggctcgtgcaagagaagaagtgaagcaagtttttggcgataaagaacctgatgcagaaggactcaaccagctcaaagttgtaagtaaaaccaaatcataaagctcttgctgacttttgctgtgttttgatggctgattcgatcccacgcagatgacgatgatattatatgaggtccttaggctatatcctccagtaacccagctgactcgagccattcacaaagagctgaagctaggcgatctgaccctaccaggcggtgttcagatcagtctacctattctgctagtccaacacgacatcgagctgtggggaaacgacgcagcagagttcaatcctgacagatttaaagatggtctttcaaaggcaacaaagagccaagtctccttctttccctttgcgtggggaccgaggatatgcataggccagaactttgccctgttagaggcaaaaatggcaatggcattgattctgcggaggttctcgtttgagatttctccttcctatgttcacgcaccatacacagtcatcaccattcacccacagttcggtgctcagcttatcatgcacaagctctaatcagacaacacatttgtgttgttgtcaaatatacaataaacttgttatacaggggtgtttcgcgacggatcagaatgtgagcctttctttgatctaattttcgagaaaatttgggctaaaagaacttgaacatatatttgtccagaactaaagtttgcctaaatctcttctaagtgagattcaaactagggttcttacttcttagctattgacccaaaaaaaaaaaaaaaactattgacatcaaatactccattctaatatgtatgttatcagaaaaagactctacgcgaccgaaagctagacaaaaaccgataagattacaaatatcagtaatcaaatttgttatttttgtttgtgagtatgcttagttccgtgtaatttacttgcgtatttgggttgaaaatagatgtaagtttttctacaatcattgttttgtttcttagtttttgaaggagttgaatttgtaaatataatacatatcagctggtcggtatgcacatattatttattcattgatgcacacttaaggtatgtattgaaatggttaggtagccattttttcttttttttttaataaaaatttcattcatatttt

SEQ ID NO: 35951 - DNA, 1637 bp, Arabidopsis thaliana landsberg
atattcttcttcatatcacagtcttgatgctattaccctaactgaatctttattagaggttacacaatggtctctgcaatcccccaagtccatgtgtatgtaccgtttcaacaacaatggaatgttcttttcaaacttcactcttactcttcatcactgtatcatactttgtagtaacagaatccattaaacctaaccgaatggcgatgaagctgatacaccgtgaatcagtggcccgtctcaacccaaatgctcgagttccgatcactgcagaagaccatatcaaacacctgacagatatttcatcagcccggtttaagtatctacagaattcgattgacaaagagctaggcagcagctatttccaagttgatgtgcaacaagcaatcaagaacatcattgtttcttgtgaatttctccgtaggacagcctccggtgccgcagttaactatcatggatactggaagctcacttttatggatccaatgtcaaccctgcaaacactgctcatcagatcatatgatccatcctgtcttcaatccagcattgtcttcaacatttgtagagtgttcctgcgatgatcgtttttgcaggtatgcaccaaacggacattgcggctcatcaaacaagtgtgtttacgaacaagtgtatataagcggcactgggtcaaaaggcgttctagctaaagaacggttaaccttcacaacacctaacggtaacactgttgtgacccaacctattgcttttgggtgtggctacgagaatggagagcagttggaaagtcatttcactggtattttggggttaggagccaaacccacatcacttgccgtacagcttgggtctaaattctcttactgcattggtgatttagctaacaaaaactacggttacaatcagctggttctgggagacgacgcggatattctcggcgatccaacacccattgaatttgagacagagaatagtatctactatatgaatctagaagggattagtgttggggatacacaactcaatattgaaccagtggtattcaaaagaagaggaccaagaacaggggtcatactagactcgggcacactctacacttggctagcagatatagcctacagagaactctacaatgaaataaaatccattctggatccaaaattagagagattctggtttagagacttcttgtgctaccatgggagagtgagcgaagagctcataggcttccctgtggtgacatttcattttgcaggcggagctgagctggctatggaggccacaagcatgttttatccattatcagaaccgaatacgtttaacgtcttttgtatgtcagtgaagccaaccaaagaacatggaggggaatataaggaattcacagctatagggctaatggctcaacaatactataatattggttacgacctcaaagaaaaaaacatctatctccagagaatcgactgtgttcaactcgatgactattccccatcaaagtaaatattgtacacgcagacatgtccatgtaaaagagactcagaaagcttagagagtttaccttttgaacacataagtatattttgaagaacatactcatccccaaattcatgttgtattctataacaacacattcatcttgttct

SEQ ID NO: 35952 - DNA, 1800 bp, Arabidopsis thaliana landsberg
gcataataagattttggttatgtcaggttcacatgacttgctgatttggatttttttcatctgcggttttctcttccaagcaacaatggtgtcggcgaacagagaaatggctgtttactgtttcgacactttggtctctcactacaacaatgaagagactccaccacctgcctttgaagaggccaatcagtaagtttttttccttgcttgtgttatgacatgcaagtttgaatctttctcaaagtatgcatttttttgtaattctctttgtctggaatttggatagagtactattgaacggacgatctgttcttaaatacaaaatcaaattctttttatggtcccaagttgttcttgatactgttatgagtagtcactttgagtatgtgaaactgtctgtgatgaggatattctttcacaatctaatattcagagactgtgatcagcagatccttgcaaacattgcatgccttgtcgttgtgatgctagaaactaaccattttttgttttctgggtattttgtgttgaatgtttatggatgggtgatataatctgaagcgcatactttttgtgtccattcttactgatggtccagtctttttgctttttgtgtagtccattgtttgttacctggaagaaaatagtgaatggtggagagcctcggttgcgtggatgtattggtacactggaagcacgccgcttgatcagtggcttcaaggattatgccttgacaaggtacgtactcgtcctcattcagttttttttttctgattctcatattattttcttggccatattcatgatgtgcttttcgtctgctttgcttttttttcatggttgaaattgttctgcctcaactttgcttatcatatatctgtgttcttaagtcttagatagtatctcttaacaactttgttgaatttttcttttgtctgtctgctttacttctcttctttctcattttctcttggtggaatgtacttgtattgcttgatactaagagcggtttaagatagactacaaattgataaccattaggtgacacacaacaaactaatggataagtacacatgtacagatatacttttacatatgtaaataggcagttctttgtctaatttatcaaacagacataaatggcattcccctattgttttgagctaacagatttcatatcaagtatcaaaattttcagctgtttttgtactgtgtttggtgtgtaatttatatttttgttgcaacccatctgctgcagttgattaaaattttttgctgtatctttttcgaaactttgtgtatatcgatagcatgaatagcaatagtattacagtgaaagctaatcaggcttcaacctctgtaaaggaactgagtaattcagttctagagattttaggcttgacacccacaaatgaagcacatatatgttggtgtttattgtgcagagagagcctctattcattagcatttcccatagcttatctgccttttatgtcatgtggttgtgttgtaattgcttgtgatatctttcttttgttgtcagttttaaacgacattagttttcttatataatattgcagtgccttgagggatcgcaggttcccacctatacaggccaaagaattgccatctctgcagtgtacggtgtctgtcttgactgattatgaagatgcagaagattaccttgattgggaggtatattctcttcactcttttcttacaatatgtcaatctcacgaattaagaatatagttgccaagaaggaatgcatactattcaatgtacacagtcaataaacttttc

SEQ ID NO: 35953 - DNA, 1311 bp, Arabidopsis thaliana landsberg
ccttggaatgggttatggtccaaccttttcctctgattgtctttttttaaatttatctgccttctttctagccatgtttatttgttatctgttatagatatgtgaaccgggcgttgtttcttcttcacttcacttgtgggctatctcacccaaatactgctgccacatatatcaatgtggctatgatggaaaaagaagtagggaatgatcatctagctctaaggtacctgcatgaagctctaaagagcaataaaagattgctaggagctgaccatattcaggttcctcccttatctatcttgcctcaatttgcgcgcattcttaaactaatcatgctttctgtgttttactttgccagactgcggcaagctatcatgcaatagcagtggctctctctttcatggaagcacattcattgagtgtgcaacatgaacaaactacacttcagatacttactgcaaaacttggagcagatgaccttcgtacacaggtgattgatttgcttctggttcattcgcatacaaatctcagacgaatattaatttcttactagcaaagcaacaaagtgaacgttttgaactctgagacatacatgtttgttttctccatttgtctctcacaggatgctgctgcatggctcgaatattttgaatcaagagccatagagcagcaggaagcaggccgaaatggaatcccaaagcctgatgcttccatcgcgagcaaaggccacgttaggtactaagatggaaactcctagaacacataaaggatatggtaattatttcattggcaccaaagtccgaccttctcgggcaggggatcacatctcctgtactatatcagttctcatccatacactaacggaaacgttactcacacgaaacatccgcgtgccagggtaatccctaaactataatatcctcgctttcctcaggtcactcattatggattaagctgatcaaatcataacctgaataaaaaacctgtcaatcgagaagaacatcttcttgaaaagctataactatgctgattggtattctagatgtatgtctaaattggaatattgatctaaattttaaaggcattccatgcactagaagtccaaagaaaaaacatctgagatgtcgaaaccaacagaatgagatggatatatcactccacgatttactgtcaaacgtgagtgacattacttctgattcgacagacattacaggtcaatgataaggctgcatcagctgatgatgacacccatatagttgcttcaaagattgacattgctacatcgaacaatgtggcacaagccgctgtcac

SEQ ID NO: 35954 - DNA, 1482 bp, Arabidopsis thaliana landsberg
tgatctgtgtataattaaaacataactattataatgaaatagatagttacactgtatttcaaaattgaatgtgtaagataaaaaattgtattacatttagatagttacgcttgaagcgcgtgattaaaacaaaccttttatataactatataggtgtcaaattaatttgttttagttagaaaacaattatttatttatttgttcatattttatatcatcgaaatgtttactagactatagaattcataaaaacataaaaggtttagtaaatctgtttgaagcccaaataggacccatatttttttaattcaaaacataaattagattacaatatactttataaagaaaatatttgtttataaataatttgttaaaaattaaaatagttaacagatttagtaattattttaatatttatctaattatttctctaataattattttaatatttatataattaatatgacccatattcatactaattaaatgttttgcctagggtgtttttaataataatttatttctgaacatttgtaattatatttatttcatttgtattttaatggaaaaggaatatttcaatcaattatgacggaaagtgtaagattaaattggttcgaaacataaatattaagttaaatatggattactatttagagttcaaagattatcaaaataaaattatgtttacttacatttatttcttacacccgcctctataggcgggcctacgctagtataatagaatacttggtttattcgaacttcgaagagatgtgaaatggtcgttgcagttttcttaacatgctggtggtaataatgatcaagaggtttaaggattcctaagattgttaatacttaatctttgcgccgtacgcagaaaattgctgcaacaaaaacatggattcaaccattctagcaaatgaactcgagaaaacaaaagaaaatatataaaagtaaaatattgatgatattgagattgagatggatcatacttccaagggatgtctccggccaccatccaatgtccatctttgtctaaatacttcaacgtttgatgattcctagaaacagagctattttcgtcgccatctattagatcgaatcaaagaagtttttagtgaaatatttatgtggcttattgtactggttaataaattgtaattgatttgcaaatttaagtttgtagagctgattagtgatcgcaacagccaaaatataagacaatcatgaagtgttattgagtagatgatttagatttttgatttttctaaacctgttgagctattactccaatggtcttggaaccctaacctttcattaaaaccctccctgaattcatctctagtgttgcagatgtcatctaagtgtagatgatgactttgaaaataaaagaaaaaatagaaacgatctttgtaattttcatcaataaaaagaatatttaagttattacatctaactgttgattaaacatatcagaca

SEQ ID NO: 35955 - DNA, 2263 bp, Arabidopsis thaliana landsberg
  unsure (1)..(2263): unsure at all n locations
acctgtaatatgtgtattattacaaagctttttaaaatgaaaccaaaaaaaacctgcaaaaataacatgcagtgatcagaatttgtatgcatcttcaacctcaattaacgacagttaaaattttcgatcacataattcagtttgatagttattattccctacaatactattttgaaggaaagaaaaaattaaaatcatggcaatgctttttacctggattcaacgaaatattgtcgactaagatgaaaatcctccttgtggattattgctcattctttcgtctgtctcaccaaatttaaagcataaacaaatttccctcttctctcctaaggaatcaaatgagtacgaacaaagtgggcaaagctttgaagcaacaaaacatatgagaatgatcaaagaaatgtgtacttgtacaaaccttaacgcgttgtatccacttttattatattattttgattttgtttcagtcttccacttaagtcttgttttcacaacttttggttaattggctcttagtgggaggtgcgtgtgtgtttcgtggatcttacaacacactcatctgatctcactatctattaattaacttctttttattttaattttgaccgcagtttctgcatcttataaagatgcggtcaacattttcacaacaatatacatgaatttaattatatgattggtggatataatgtaatatcttgttaaacatctttaactacttaaaattaaatcaaataatttaattatcattctaattcgtcactcaatatttatatcgtaataactatgatgttacaatcctcatagtgttttcttatactggaaatgtgaaagatcagttgaatggatgattgtgaatcttgtgggttttaatatgcatgtttatttccaatcggcggtaacctttgttaatatgtatgtttttttaactcgcaagtactagtcgtataaaactaacaagtaggtaccgagtattaatcgacgcaatattaaattctcaaagaaaaacaaaacttagactgtaacgtagaaactaaagggctactcgtttatacatcatctaaattgttgcatgtactcatatttatggtatgcatacatattctgtttgtgaactagtaataaggtgatatgttgtttaattattatcatcaacatcatttttctgttacgagtttattgtcaatacttntttgctgttagacataaataataataaaacagaaaaattggaacgtctaatatggcgtacctttagggatgggtcatggtcaactacatacactcttttataaaacctcttgaaactataaattacacccttcaatttataattcgtttctaaataatcacaattatgtagatgtgtgttatttcaactatattcctataatatatatacaagtgctcaatccagatataaaagtgtgaaacgtaattaatttttttttataaagattttcaaagaaaatccgaaagaagaaccaaaaacaacttataatttgtcacaaaaatccaataatagttctaataatattaaattctaaaacgtctgacgacgaggaatcaataaaccaaccaacataaaatgacaaaagtatgattgtccttggacctttggcgtgagattggatcgagacactattgcttgccttttttttgttgcttcttgctaagtattttctatgcaatttaaaatttgaaatgccaagcacgctggaaataaacattacgtaaataatattcaattatttcactaaacttcaaattaatatctagaaggtgtattagtaagttaatataatacactattatttatttcaaattttgaaccacgtatactaaaaattagtgacaaacttgaacacaactgcttatttataatgttcaaatgattattatttatacaacacccatcaaatacattaatagacatcatacttatcataccatataatatacatctacaaaattttgtaatgttctatgtaacataaacaacccctctcactcactacaattttattcatgattacctgcctacacccattattcatctctctcttttcttatgttctacttattcgacaaactatgagtcatggccaaaaaatgtactaataaatatacaaattacagacctctataacaatactatttttgttttatttttgtaaatcataagaccaagtaagtaatccaactcaaatccaagactggatgggataattgcatttgaaagaagtcacaccacttatgtgtg

SEQ ID NO: 35956 - DNA, 3801 bp, Arabidopsis thaliana landsberg
  unsure (1)..(3801): unsure at all n locations
acaacagttttaaattaaagataagccaagaaaaagagctgtccaggttttgccaaaagtgataagtttctgtaatgttgttcttcttccattctcccaggtcgaagatgttcatcccataagcccatccgcagaacttgggatcaaagtgttctgaaatgtgtttatcactgaagtttaagtaagtatcaaggcgatggaaggtaacaccacaggtttctactgcaccattcactttccctttaagatcaatggaccataggggagttaaatccttctgaacaaccacatcatcgtcaacaaacaagattttctccaactttgggaagatcctagggatgtagaacctcaagtggttaagcattgacatgtatttcgggtaccggtacttgaggttttctgagcctgattcaactgattcagacctcgctgtcttgaagtagaacttcttcatagctgctgactcgagctgactcaaaactggagagtaagatgagttgagccaagtaaaatcttcaaacctttggacatggatggtcgcttctccaggagggttcaacagaaaccacatactcattgctccaaagttgagcttatcagtcacaaggtggaaaacatgccttgaaggatcctgccaaataaacccagtaggccttgtaagtttaaagcacttattcttgcaacaattactagggattgatcattacctgtgcattcatgactgtggagttgacaacaactgatgcagccagtacattatcagagaagagagcgtagtggtaaagttttggattctccaaattctccctccttggaaaatttctcatcggtaaaggcaggagatgatactctagattcaagcgcatggtcaagcagtggatagcatctggtagtgccttggaagctagctgagtcaagaacgttatataagtctgctcgttttcgagttcatcttcaactgtttgtagcattgctctcaacttatttgtcaccaacttgcattcatatagctgctcgtgtgctctagccagtatttgtcccatgtctcttatactgtcaagtactctgccacaacaacaaaaagattaaactttttaagagtttatcttaagaacaatatgtactgccgatgatacctctgctcctgatcaatatcagtagattcttcctcccaagctagtttcattagttgtgtttctatctcttggtgcaaggcgagattgtttgtaaactttgcaagtccactgtaaactcgtgccatgatgatttgatcttgcatcagacgtaacatatcttcaaaactcttgcccctccggtattcatttttccaaatggtgtagtttcctagtggtgcagaatcgacagatctggaacgtgccatggctgccgtctcaagcttttgcagactatcatcattcatcagctcattagccctttccaatcttttttcctgtctcagactctgagaaaaacacaacagaacatatcaaatcagataaaagccatcatgtaaccaatgtgaagagagtaaagaaagattaaaagttaccctttcannnnnnnnnnnnnnnnnnnnnttaaatgcttttcctatccaggttccatgaccaaaacgaggaaccattttgtcctcgtttcccttcaaacaacaagcatcagtcatttcgtacaggtcaagaaagtagagaagaaccataagtatctatctacctcagaagaagtttgaactgagttagccactgaatgattcttcctgagtgaatcaaggctcaaaggattgtcactggaggtggtggaattgagaacatcaaggacctgtttcaaacgctagtaagttacttgtaccaacaaaggatcggaagaacgtaagcagcaaaacaaagaacaccaaggacctcttttgtgaaaagagatggaattgattccagagcttcacgttctctccagttaagatcctgaataaacaaccattcaacaacacgtttcaaaatttctttcaaatctttcagtacaatgtgatgatcgtaagttgattaccttgttgatgaagttattcctgatgttgtatttctctgaaatgatttacagaaataagtaatcttccaagaactaaagaaaaagaatccattaatggttggtaaagaacgaaccaaacagtgaacgcttgtgaagtctgtagccgatcatgagggtggagtaaacgagagataagagaaaccccaaaaccactgatgtcacacattgtcgatagaggtctctgcacctagatcttctttggattctcctcgccatcagaaacttcaaaccctaatcgaatctaagagacgatcgccaaattcagtagctctctctctctctctctccaagacgctttttctttgctcttctatgatccccaccgctaaagtagctaacgaataacagactattatttcaaatcggttttatatatgcagcggaaaacattaacgtcgtcgttttggatccaattatttaaaggccctaacggcgtcgtttatcccgatggcttagagggtgatccaacgcgtcgtttaaataattgccagttgtcaactaacgccgtcagattatatgtcttattgggcttcttaacataaagcccagagctgtttacacaaaaatatctggcattaaatagttaaatcgagtttaccgaaagattcagatccttattcttctccaccggatctcgaaatcggagaattagccaaacgatggccgccgacggaatattccgcagcatcttcgagggttgtatctccggccttgattccgccatcgaacggcgtccttaccacaaaaactgcggatgtgctcttcacgataaatcaagtggcgctgggaaaaatcaaaatcagcgacggccgccgtcttgtcgccgccacggaagctcagagagcatctcgttcccgatccgaaggtcttggagcgaaggcaacatcatggctatgaatctcttctcctcatcgtcgtcttcttctaatctccaatcgctttcttcgtcttcttcgctctcaaatctggcatcagatttaccggtggataatgctgcgacggaggaaccgagcagatctaataaacagctacgatggacgattgatgaaggtgaagatgattgatgatgatgatgatcaattccaggttgttaacttttgctaatctctgtttaattaaacttctcaatcattgtatttgagaaccaaataatgtcagtcattgtatttttatttttttgtaaaagaaacgaaaatgtttgtttacgattgaaactttgaatgattagcatataaacttgtggagattaatttagcaactttagcaaaagtaattaaggaattaatctgtggcaattaagcatctctcgtccctgtaattatcataacaaattcatcgtgggcatgaaactatgaatctgtttgattaaagtgaataatatcattaatctctaatcaataacataaatcatcactccagaaaaagcatttatctaaaacgttcaatagcatttccttcacgcacatgagttccgacaaagaggacatgaaccatgaatcttgagccacacatcaatacattccacatggtagcaatggtcacattccggtatgaaacgtacggtctctttgctcgcatactctgataaacaaatgggacacacaataccattagtacccgaaagccttctgctttctcccaactccattttcttgaacgtttctattgtagattggtcaagacccctcctggccataacctctctcggctgctgcattacggttg

SEQ ID NO: 35957 - DNA, 1322 bp, Arabidopsis thaliana landsberg
gggaacaaaagctctcacctttacaataaaataatagagaatcactctcaagataacaattataatgaagaaaaaggaccagagcattaacagcgaagggaaaaacacagaatctaatccattccaaagatcctgtacaagaagagaacaaggtcccaaacttttcagacttggcaaaaccgaaggatacatctcatcgtgaggcttccagtctcggacaggttaagcagacagagagcacctgaaagaatgttcaaaagaaatcggatgtttatataagagcttagcctgaagattcaatttctttcccatggtcttctgaaagattcctcttcaatcttctcaaccaaatatcgtaatctaatggataaggtgtcccacatagactgtcaacatagtcagagaatgctttcaaaacggttgagatatcgccgagcttctgctgaatcaatcttttggaccaagaggtctctctccattgaagagctccttcaactgaatccaattcagggaagtctccagaacagaaataaagcatgtatatcaagctctctgcatctgaggcagcacagagtttcccttcctggagtgcgtaagtcgaggagaagtgaagattcattgcgggtcgatctctatcctcaagcaccgcgtgaccccaaccaattagtacaaagtaaggatgtcttacaccagaagtgacataaactacattttctgggcggatatcaccgtgtcgaattccagctgaagaggatgaagaaagtgcagataagcaatcgtggcaacatcgaatagcttcttctggaccaaaccgaccctcgttcaccaaatcagctactgtctcgccaacaggagtagtcacaagaatgggagttccacaccaaggatgatcacatcgtccacctgaacttggtttttgacattggcctggatgaatgatccgaccagacccatggagctgcggcaggtatttgctagagagtcctctctgtttcattatacttaatatcttagtctgtctctgaacctgataccataagttcatgtcttcccaagctggctcaagctgtgaaggaggagaaccaacatacagaaacacagacttccctgcatcatccactggcgatgcaatatgataaggaagtgtaccattagtcaatatttcgttaatgtgataacctttttgatagtttgactccttcaaccgtagaaccgatccaacttccagttttatcgaatgtttaggctcgattgtggttgagatcttcttggacttcgcgattataggagacctggttccctgctggcacctaatcgtacca

SEQ ID NO: 35958 - DNA, 1340 bp, Arabidopsis thaliana landsberg
aagggggggccatgcattgctcaaattcattgatactttttttatgcaattttacactacctcatttctgggtagttcaatttgtcaagatattataacatgcatttataacttttttgtcgacgataaatcaaccaaacgaatccggtctgtatgtttgataacatgcattcatacaaaacgattatctgtttttttaatctatttaatttggtttctactttttacttttgtgaaactaataataatagatcaaacaattaactgatataatttattaatttaattcttagaccaagtaaatgattcatgaaatataaaatgcacgactaactttagaaaaatgtttctttgtatacataaagatagaatagaagaaaagtaggattagaagaaaaaaacgaaaatttcagagtagtttactaaagaaattctgagaaattttgtgtgaaaatgaaatgaaaatcttcaattttagtgggcccctgctacatcagtcccctatttatatctcttctcaactctaaacccaaaccaaaaaaaaacagaaagagcaatctctctatactacaaacaccaaagtttaaaattaaacaaaatcttcaagaaacactttacgaatttctccaatggcttcacttcaattttcttctcagtttctgggctcaaacactaaaacacacagctctatcatttccatctctcgtagttactctccaactccattcactagattctcccgcaaggtcttttttctgttttgttttgtttttttcaattctgttcttttttttggaggaattcataatgattaacttaattttattggataattttcagaagtatgagtcatgttcgatgtctatgaatggttgtgatggagatttcaagttgccacttggtacagtggagacaaggactatgactgctgttttatctacggcagccgccactgaaaggctaatctccgccgcctctgaactcaaatctcaacctccgtcgttttcctccggcgtcggtcggttacaggtacatcactacatcatcatcctcctctgtttttttcttctaagacacaatccgatttgctgctgtatgtgaaagaatgagatcacgccacgtggtgtttttacattggtctgtggtgatttcgttctctagcttgctgtcttgctgcatcgtttatgcctaatcatttaagatcctaatcgttatgatcattaaaatcatactataaagcagagctcacaacaacgatcaatatatccaactctaacagttaatcataaactattagaagatgactaatgattatcaaaaagatatggttattatatttc

SEQ ID NO: 35959 - DNA, 2711 bp, Arabidopsis thaliana landsberg
agaaagtacgaggaattgcttttgggagtatctgtagaggaagcaatctcttgtttaattatatgtttactgttttgcttatgtttgactctgggattagaaaattattgtattggtagtgattcttaaaattggttcctaatttagtaggttgtaaatggactgcttgaaagagaagactggaagactgccataaaattgccgatcggaatggtccctgcaggttcgttctgcctcatacttctcttgtcttgtgtgtccatgtgaaagtttagatgtaaaggttatccttaagtaagattgaaacagttttctgtttatcataccaaattgatatcttgtgtatgagaaactttagctaaacatttttactttgcggttctttgtgtgcactaacattcctaatggcaggaagtggtaatggcatgattaaatcattgttggaaccggtagggcttccttgtagtgcaacaagtgctactatttcgataatccgaggtcctgctccatgccatacgatattcaatctttcaaaaacatttcgactttcctaatgaatcaactcactgtcacactatttctgtattggcaggtcgtacacgttctctagatgtagcaactatctcacaagggactaccaaattcttcagtgtcttgatgcttgcttggggtatgcaaggacttctacttctttgtagtatagtactctagaatgtagaacttgatttgcaaatgcaagtagtggctgagcttactgaattattctgttggttgtactgagagaaattcattttatttcaggtttagtggctgatatagacatcgagtcagagaaattcagatggatgggtagtgctcgctttgatatctatgtatgtttagttgaacatttgaaaattttctgcaatgcatgttttaatatgcgttactcaactaagttaaaggtggaggttgaacaaaaaaaaaaaacaaaagagattgtgtgtttctaactggatgctgttttcattcaactaaacaccttgcgttcactcttctacgacttgcatttgcagggtcttcagaggataatatgcttaagacaataccatggacgaattctatttgtgccagctcctgggttcgaaagctatgggcaacgagccagttgcagtatagataaagagccatctggtagtgataagacactcgtataccaaggacctgatagtaaacttgaaaatctggattggagagaaatgaaaggcccatttgtttcagtatggcttcataatgttccctggggtgctgagaacactttggctgctcctgacgctaaggtcagttaaacattttgaaaccacgaaaacacgatttttttggaatccttttgcgtttacttgctataaaatcttgaaagcttcatatggtctgattaacagttttctgatggcttcctggatttgattgtcatgaaagactgtcctaaactagccttgctatcacttatgacaaagttgagtgatggaacccatgtccaatcaccatatgcatcatatctgaaggtttgccatgcgaacccaattttatagttgtaatatttcatttgatgactttgatgtctcttttcgaaatgaatcggaattttatgattgattaaaaagcttacacgttggtttttactgttgaaaaggtgaaggcattcgtactggagccaggtgcacgcatagacgaaccagacaaggaaggaatcatagattcagatggagaagttttggcaagaggaagaaaatcgtacaaatgtgatcaaaaggctttgatgtcttacgacaagcttcaaataagtgttgatcaaggtttagccactctcttctctcctgaataattctgactgatacatgagatgtgatgagatgagatgaagttgtcccttgtggctataatttgattgatggacattacaatacaaaaaatgagaagatgattcgagttatatagtaaatccctaaagattaccattgagtgtattgtttattgttgtattgctgatgtattgcagttttgagttttttgttagaaagttgtgtgaactaagatattgagaagaccataaatactaaatgtgagatttttttgaactcttggtgtaaagtgtaaacatatttatgttgggggatggtagtcctaaagcttaaagctttgtggcaaatataaaatgaagattaatattgtcaactagcattagtgtgacaaaaagttgggagagattctatgaggcaagcaactaaaaaattgatgcgacatatcatattactaaaatgataaaatattgtccctggaatttaatttggacctaccatactaatgatgacttggcgttatacattgaatattttaattaaaaaaggaataaatatcatagaaaaagcggaaataaataagtaaagtaaatgttgtgagagagctttctttttcagagagtattttgtttagctgatgaggcaaaaacaaatagaagaaattaattacccgaaacaacaacacttcactatttctcctttctcagctgctttcaccattttctctttttctcctccatcaatctttctcacggttttctagggttttatatatgctttcctcttcatccatgtcatcgtcttcgttatctgctagattttgcttcaaccacgaatgttttgagtttaaactcgaccattgccgtcctggtt

SEQ ID NO: 35960 - DNA, 1590 bp, Arabidopsis thaliana landsberg
atgtttgcaatcacctgttcatgaacatgaatatagtagaagtgttaagagcagatagaacaggagagagagagaaaacgagagctatttctacagaaaagcatacatcttgagatacacttcttgtgttgtagctgtcatcccagtacaatgtacatatcctataaagttgctggacactaaggatctgcaaaattgaacacaacattcagattctgatacaaattcttatgcagaatatccgtctattgtcgaatgaaaagagtcaggccgatggagggactcacagggcataaatcatgggcgatgtcatcgtacgagattctgtactttttatggatgacctgttggtaaatgccaaatcaagagacaatcataagaacgcacaaacctcttaccaccagatataagaaataaggaaaatagaatagtggattttttcttataatcagacaagagtaaaagaacataccatgaatccaactgcttgcctgatgtgtttcagttcatcccaggaagagccagcatactgcaattaaagaggacaggtataatgagccaaattgtgctgcgcataaattaatcaattcaaaaatgtagaaagggagattcactaagggaatacttcttctgttgtttcgttgcaccattcctctaacaatgctaaaccagattttacaaattctccgttgctaaatgtgcaacattctcgtcgcaaaagaaggctacataaaaaatgaaccccgttatattaatgccttacatagacatgcctagctgatgatagaccataaatcaactctcacctgttaaataattggacattgatgaaccagaatgtctgaataaatatattttggataagtaccggaggaacctgaaaaaggaaagaactataagaattccagacattaacgagaaagaaaatgtgaatggagaatttcccatacaaaattctcctgtagtgtgcttagaattgcgtttaagccgtcataaatcccattccagtggtctagaggagaattatttctcattgtctttgaagatcgaaacgatcgcaacgatcgtccagttgatgtccgcggtgcctagagaggaccgttcatgtcagaccccacaacataccgagaaagaaaagaagactgatagtattcaaggtaagacgagaacaatgaatttttttcttagctgacctggatgcaaagggaaagcaacgtttgcaactcgtttttcaggttatctcgaatcattccaaatatcttttctacgtatgctgtaagctgctgtttaaaaagtaaagctggatccttggccacaacagggcgaatcactgcagccgctgcagcttctgctgctgcagaagtctcggcagaggaaggcgctgaacggaaaccctggtatagtattttaaaggataatgcttcagaaaattttattaattttggaacaaatcattatcatagactaacaaaggcatatttaccatggtcattcttccatacaaggaagttgaaacatgtgtgtttttgctgtggtgtggcaccgggtttcacactttgttggatcatgaacaacatggctgatgttttg

SEQ ID NO: 35961 - DNA, 2058 bp, Arabidopsis thaliana landsberg
taactacgtacatgtgaatttcttcaaacttttatttatcagtcatgaaaaaatcattgtgggtaggggaaaaagttgaagaaactcccaaaaatctcatgtgaatcttcaaggtacactaagacttgtacggaaaccaaaaaaaaaaaaacacaatgggggctttgattagggtttgataggtgttgacttaaaccctcaaatgagatgttgatgacctcttttcgcagcccgtgaagaatcatgggaccaaaccatgcatgtctggtatctacctaaaaaatgatgtgattatttacattagttatgaggtatcattcatacaatatcttttaatttggattatgtgatatgattgtatgattaatcacatgtttttttgtttgcataatgtttttctaagaggcatgatttttgacatgagttatttgattgtacttagttaaggacacactcttgaaatgttttttccccatcacattgcacaaaacggcacgttgttaaagtgttatatatgtagaatggtttattttatgtgaagattgttaaaaaacggcatgttgttcaagactgtgtgcatatgtagaatggcgtgaagtgtggaaaatatatcttcttttcctatgaaatcgattatagccattttcgttacggagagatcgaaagcagaaatggcaagagaagcaacgacgaaattgaaacataactcaaacaagacaagatttctgagtataaatggctgtggctaagaatgggtcggagcatcttcgatgtcgtctctcttagaggtaaaaaaaaacttttttgagtttcgtttcactctgttattcaatctctttacattacagcgatttctgtggagtttttgttttcgttcagtctgtgattagttctagtgtatgtgctggttaaagatttgaatttttacttgtttctcagtgtaagctcatgaaagtttcttgtcgattgtgctgtttctcgtctctttgacaataatgaagatatcattagcattacttagttgctgatttatttgtacagaaaagtctgaggttttcattgatctttgttacttttgatggtttccatcacccgagggagcaaatcgtttgtgtttactttgttttgtgcttcattgccaattgatttctctggatggaatgttcatgttgtgcattgtaagaactcatggtaaatctttttgttgagcaaatcggttctgtatattcagttatcttatgagtcttgaatcagaacagcttttgtagaaaacagatttgtatactcaatgaattgatttattatctgtagaaaaccttacaatcactcaaaaacaaaattgaaacaatgtacacactgtttttgtatcgcaggtaaagtcttcaagtatgtggggaaagcttggaacaatgcttatctgttttcgtgccatcaagttttcttgctgaagaacaatacatcagagagtgatccagaggagttgatgggagaacgaagcggtgaaactatgtgactatgcattgttgaagctattggagaacgtatttgtgaagccatcaggtaatgcagcggagaaccaatgggagtatgaattggtgaagtgagaggtgatcgtagaggtgaattttgcgtttggtataacgcatgacgcaaacccacaatttcagaaggctccgttgtgctgtagatgtgatcatgttgttcaaaggttagacttaacttctcattctctttctgcaaatgttctaattgttcttccactatctcctcttcagtgtcactatctagttctgccattttacttggaaattcatggccttctgaaaatacgtctgaatctttttcagcatcaccttgtttaaaggtctgccttagactttcttgcttatcttgagacatctttaaatgaaacgtcatcctttcttgctcaagtgtgtcatcaagactgagcctgaatatatcatcccttggttcaagtgtctcggccaaatccattttttcattttcgcctttctccaactgcagcgatgatccatcttctgccattacgcctacttt

SEQ ID NO: 35962 - DNA, 1253 bp, Arabidopsis thaliana landsberg
gtcgtttggagaaaatcaaatatctcgtccctagacacacattattcctttccaaattcgaaattgaatgtaagctgtaactaacaaaacttgtattatttggaaaattatcgatcttttttttttgttaaaggaaaattatcgatcttaatttattttctcacattgcccacctctataaatttcacacacttcaaaactagtataatttatcaattttactttaacactggaatattttcatcttatacagtcttcgataacaaaagaatatatactaattttaaacgaaagacttttccaacgaagctacaatgaaaaaagtcatgcatgtaaacaaaaaaataaatttcaacccctttgactgatgacaatatatacacaagaaacaggttgacatatatgatgagtatatgacttctatctatatatatatatttaacacatgtaaatatatttctataattcttaataaattgaaaaaaatattttcttctaaataaaactattaataaaataaaaaaacatacgatttcttacctagcgatgcagtgaaaatatgagagacgccagttgcagtcaacttccaaaagaacacgcactctgcacatgctctacccaaattcctccttacctattataatcacctccgacttttaattataacaaaccaattcacatcgtgaacgtgacttttctatagctagtggtcaactcgacacgtggcatcatcccaacggtctccttgattctctcgtcatagaaacgatgcactgaatcaatctccataacttcagggcattgcccttctatataaacatcacatgtccctgtgtcttaaaatacctcttatcaaacaccaaaccacaccagaacagaactcagccatggcttcttcttcttcttctcttctaatcctagccgttgcttgtttcgtctcgctaatctcaccggcgatttcacaacaggctggcaaatcacagaacttgaactccgccggtccgttcgatagttgcgaagaccttccggtactcaattcctacctccattacacctacaattcctcaaattcatctctctccgtcgctttcgtcgccactccatctcaagccaacggtggctgggtcgcttgggctattaaccctacggggactaagatggctggttctcaagccttcctcgcttacagatccggcggtggtgcgggtccggtcgtgaagacgtacaacattagcagctacagcaggctcgtc

SEQ ID NO: 35963 - DNA, 684 bp, Arabidopsis thaliana landsberg
taatccatgccatgtttaaatttgtttttaataataggcgtatatacgagttttttcatgttttgttttggaggtattgtggctaaactgatatttctttgggtattctgaaatatttttggtattgaataaggttattaattttccaactgaaaaggatgaattctctaaaagttttcaaagatagggtatcatttcaaaatacgtttttaataggtttgcttctcctaatttcatattatctttttgacgtcaccactcaccactattgaaaaagcatttcttaattttctttaacaaatggagttagtagaatattattatctgcacgttttccctatctaataacaggggtaatttcgtaaatctcacttcaacaactaattaatgtgccggaatcgcaacttcttaaacttctaccaataacaatacgccacgtcatcattcttccctgtcatcaattacctctgacggtgtcggagacgtttcattctccggcctttagtggcattttctcgtaaataaattcataatctgtgggcgaaccttatgcttcgtgtttataataaagtccaccgcgaaatctctatcattcgccacaacaacaacaacaacccaaaacccaattttgttacctcttctttcctcaatccttaagtcaaaacaaacaaaaagcttcctttt

SEQ ID NO: 35964 - DNA, 1008 bp, Arabidopsis thaliana landsberg
aatatctactgttcgtgtttttcagtcatattctatgcattaaatgttaataaaatccgttctttctttgatttcacaaattagtattgtttgggttattagattgttcttgctatcaagaaaaccaaataaaggaacaagcaatgtgtctttgttcgacagtgcaccaccaatctgaaaataattagactactccttgggcaaaacatttatttaattttctatgctcctagaaagtagaaacggcaaattacgtagataagtagaaacaagtttaccagaaatctccaatgtagtgcaagtagaattattcgttgggctctcggaactcggaagctaatgctaaaatagtccatcatgaatgtagtgcatctgttttactaatggtttgtgctaattaatgttgtttatatatgataggcttccgcataagtgatgttgctttttattttatttttattactaaaaagttttaggcctaggaacatacgtcctctcaaactagagcattttatatggtttctttccaaatgtcattacaactggtgatttctaggttttgtcttatagtctttaacaattgagctattaacactcagtaaagtaatgttattgacataaaagaaatgtttatttgtaatatgatcaaatttaacgatatattatcaaccaaatagttttataataattatttgaatactaataaaaataaatataaatgacagtatatgtcgataatattaaatttacatgatcttgatttactaatactcagttagattgtaacttttaatattttcatcagatttgaatatcaacttttgctggatattttaactttttaagtaaagtattcattatggtgttattaattaaaaggattatgtatcattggaatattttattgtatctaaaataatagtcattttatttccaaagatttccaaaggatattatcccataaccacaaaacaatgggtggtatagtttatatagagatcgcaagta

SEQ ID NO: 35965 - DNA, 5764 bp, Arabidopsis thaliana landsberg
cgaacgtgtttcatgcttccattgggtcttcttgtcttcgtcccactataatttgctttagtggctgattatcattagtgatcgttgtgttttgtcggtactcctactctattgctactactctatgtgtccaattcattagaggaacattttggaattagcattacagtgctcaaatattctttgtagaaaattgatcttagctaggttctttgagcataagtaattaccaacattttgaaagtagtgttcattaatccaatctagcacgacaaacggacaaacatataatccgctcttacttgtcacgtatcctccttatgatttcccataatctattaggtaaaaatgctctctcgttttctttgaacggaaaaaaataatgagaatttgactgtttcaaagtcaaacatgttcgcatttgcatgcaagtactaataaaacaaattactgatctgaagtatcgaagaaatttcagtttttcataatttgtttttacaaaatacacaaaaatgccaatagaaatgttttatttcgtttgtttttagcgtattttttaacaaaagtttttcttataacatggtatgattgtgagttcaattcatttgaaaaatatacataccaaatatagaaaagtaaacgcaaatgtgaacaaaaagaactatgaattctagctggttaatgtctagtagctttgatttgagattggataatgacgtggttgtataacgtgagtcacgtgacctatatattcatgtgtggatgcgcctgcaaagagagtgaagcacgatgagtctctttctttatttatttatgattcttactcgatagagttattcatcaatattaactagtagaaactaaagagagagcgatgtgttccttttatgtttttttttggaatttgaataacattttgggacactaacaatatgtataggatttctgattccaagctactagctagagtgcaagggagtttattttcgacacctctcggtccaatgtcactcttcgatatatatcacaatcacgctcgtctctcggatcacttctagaaccatttcactcaaaatttggatgttcttttatgttccaaattgaaacctatccattttttttttactaaacttccggattagcaactatatttgttttcttcttttttcctctagttgatttccatgtgattcttatatagttttatattttcattatatttatttctgagtttgtagattaggtacctcgtgatttataaattaaaaaatttatgaatattttctttaccaaatggaaggtggtctagctagtacccttaactgacaacaaaaaaaaagaaaagaaaaagctagtacccttaactgagtatgtaaaatcatacagtaattagttcaactccatttaaaaaggatgatttatgcactaaactaatatactatcaagtatcaacatatatatgactttggccttcgagaaacacattttatttaaagaatgtatacattctttgtgatgatcatgatcatgtgattgacaaaaaaaaaagcatgatcatgtgcctgttagagaagttttatcaagagaatttgttatgactacgtgttggatgtgtataaagccccccaaattaaaatttatgtttcaattcttaataaaatgttgttagctatcgtattaatttttgattataaacttactatatacaattaaagatcttttctttatttaaacgttatgcgatgaaagatttataataataacttttcaatattttaaatttattaattattagaatttatttagaatttggaaatgtgtctttactcaaatggtgaagtacatttgaaagagacgacaaaaaaggttagcattgcacatttgaaaatgatggaaagacgaactattacagcgggcggtgtgtcgagagatgaagaaggcaattggtgtcaagggtttcctctaaacattgggatttgtttagctgccttagccgagttatgggacgtgtattatagtctttatatagcttgagagagatgagttacacggttgaatctggaagtggactccgtggtggttgtcggtttcctgaagacatggattagtgaaccttatccgctatcattccttgaaagtttgtagtatgacttcctatcacatgtatataaagagactaattgtataacagatagatgttcaagacactgcacgggttaagaatgttaggatattggtcttgtaagttttcttaataattgaggggatattcgtctccctttgtcctgccaaaaaaaaagtccatttaattttatatttttcatcgaagtttcgattctactaaaattgggaacattactgtacatagtataaaaattataacagttatggattgagacttgtcgatacgaatatgtcaaatgaaaaaaagaatctaatgtactttctaaaatcgttttgacccgaaaaaaaagaagtaattcgattaaatgttattgtttacattaaaaccctataaagtcttatctcagttcgataattcttgttcaaggggatctctcagatcgaaggttcgatactcaaagatttcgctttttcttttctttttgtttcactttcttcttcccagcccttcttcgccgacgttttcttttgcccggaggagccgactattactcaagattttgattctgactttcaggttctttctttctttctttcttctgcagttccgtttctatcagctcaagatttatcgattaagatttctcaaagtattgatttttttttagtgattagacaaattttcatcagtaactcatgaactttgttatgattagcggcttgggtttgttttgttgaattgtcaatgaagaaaaaccctaattttgcattgtcacaggaagtaaaaatatggactttgatgatgatgacaaaccaaaagaggttaccaaaacccgtagattcgctcctggccgtgccggaaagtctaaacccaaacctaaaccggaacccactgctgataaaccggtacagccgccgccgcagtcacaaactgagtccgtgagcaagactgagcatgacgttgatgctaaattcgttggcactaaggttgaaactgaggtttgtaatggctctgtgaagatggagatcgattcaaaagtcgataaagagcctgagatcatggaaactgagttgatggaggaagatcagcagcttccattgcaggaggagaaggaggaagaagaagaagaagacgacgttgttgttcgtgaaattgatgttttctttaagccgtctattgatgctaatactcaggtctattggattagattcttcaaacaatattttgattttgctaatcgttttttggagtattgactaatgtatgtttcttaaatgtgacagctttatgttttacaatatcctctaagaccatcttggcgtccatacgaaatggatgaacgttgcgaagaagtgagtgttcctctatgtgtattgcttattcatttgttttggttctaatctttttgtttgtttatgtgtctttaaggttagagtgaatccttctacatcgcaagtggaaattgatttgtctatggatgttcattcgaagaactatgactccaattttggactaaatatgactaagcaggtagtgttttagttccaagcttgatccaagtttaatctttttgatgcaacttcatttttcttgtttttggtagaccttgaaaacaacatggaagcagcctcctactttggattatgctgttggggttctttcaggtgataaggtattttttttcctcgttttcgaaagcttgataacattgttgtgtagtgtggactggatgtcttattgaattggacttgttgacttgcagttacacttgaatcctgttcatgctgttgcccagctccggccgtctatgcagtctctttcatccgacaaaaaaaagaaacaagaagaatccactgaagaatctgtgggaacatccaaaaagcaggtatagatccaacctttgctaaataattgaggtgtatagatcggcctgagcagttagtttggctatttacatgattctagttttgagtctatatttcctttgtggcagaacaagggagtgcagcaggcttcgacggatcagaaaccaattaatgaagaagtatgagatttggttttattttgtttttatgtgatcctttcttttatttggtttgttggtgggtattgcttggtaaacttatgttgctatctttgttctttctttagacttgggtttcactcaagtatcatggacttcaatccgaatattgctccagatatcttaacgggatgatggcgaatgggaactcttcgatagatttcaacatgagcccgtatgatgcctttctctaagttcgcatgagataattttggggtttcctgcttactttaaactttttttctttttcttaatatcctcttgtatttccttgaaggggcacttatatcaacgaactatgccgtgggggaagcagcataaactttgaattgaaaaaaacatttaaaaggtacaaaatatcagggtcatctagttaacatttgtcatctaatcctcgaaaaggaattcactgtcgctttaccaatgtctggtctcatgtgtcatctagtcaacatttacaccctttcttacgttccttaatatcctcttgagttcagggtcttgctctccctaccacttaaagaacgtgtgcaaaagttgctctgcgaggttggtagctattgtaatcagcattatgtttctcaatttcctgttcttttctgtttttcaagataatgtttatatggttcctgctccttagttttgaataaaatataagccatttggctaactcgtttgatcataacagggatctccgttgattcgatacagtgttcttaaacactatgctcctgagttctcagacgaggatttcttaggggccctccaagaatatggcaggttagttcaaggtttatggactcctaaaactaggctactaaaactagacgggcctgtagaagctgccagggattatgtcctgtctctgttcagccagaatacaactataaagtactctgaagttgaagcaacgggtgacaagatgaaacctttgatggaaagaatgttgactgaatttgccaaagaaaggcatgtgctaaaagattggaagttcaaagagcccactgatgtctcattcataaaatcctacccggagattgttaaggagcaagatattttttggacggataagagagagaatctaaagtcgagaataaccgcccaaggaggaaaaagtagagctgataaaaggaggaatgttgttggcacaagttcttcagttacagttaaaccggaggttccaacaaccctctctgacaaaggaggaagttcaaaaaatacgatacatcgtgttgttacacaagaaatgccagaagaacttaagaaggcgttaccaaaggctttgaaaaaggtgtttcaaactcacaaagtttgccggtgagattcttgggaactatacttgcaattatctgaacttccgagttttcagatttatttttttgataacatgtgagtttgtttacgaaaaaggaaggagagttaattcataaaccattttgtgtgcagctatgagacgaactgccaaggacttaaggatcttgcagtttcgacatcgaataatccaaaagctgattcaggaatggcggtgaatgtggcgctagccgtggatgcttacc

SEQ ID NO: 35966 - DNA, 8645 bp, Arabidopsis thaliana landsberg
  unsure (1)..(8645): unsure at all n locations
tactctgctcaaagtctttctttctaagtttctttcacacgagtgtaatgaaagaaagagaggggtatatggtgataaaggtcgctactttaacacccaaaatctccacagctagcattaactattactccttccgtagagttcatgtttgaaaggaaattttttgttctaaattatatgaagtttcagttttcaatacaattttttttttacgctttatattctgtaagttgtttcatcattggttaattgtaattggataattaataattgatgttttagttaagaaaaaatcaaattaattaatttttaatctgtatgtacaattctaaaatatcaactattaaaaacggaggaagtataatatatagtcgtcacacatagggagaatatgcattaatttccaaaaataataaccaatcaaaatcaacatataagatttgatatctaaattttaattaatttaatttaattagaaaaataaaatacattattaatttccaaaaagataaccagttaaaatcaacaaattatgtttgatatctaaattatcatattaattttttatttattattatagttcacctctcatttttatatgagtaacccattcgagttcgggtagaacccgttcgggtttgggattaatgggtatatgatttactacccaatagaataatcctactatattatttgggaagtacattttaaatgtaaccttatcttttgtaagtaattacataggtatgccattagaaataaaattttaaatagtaaattaattcatctttaagaattaaaaagtcaaatactaatttaattaattaaattcaattaaaaaaagaaatacattattaatttccaaaaaagtaaccaaataaaaacaacaaattagatttgatatctaaattatcatattaattttcttattaattattatagttcacctctcatctttatatgattctattttgcgaaaaaataatatcatcgttaaaaacaattaattagagttgcttcgcatatgccataatgtgaatttttaagaacgaatataaactgttcaatacataaaaaatattataacggatcaaaaatagatttaagaaaattttctactgagtattaggtcataatttgaatatttatattcaatttcatacatattattttaaaaatttataatcttatatactacaataattaataatatattagattttttttatgtgtatgatgtgattcaatatttaatagaagctggaaaatcctagaattgacgggtttaagggcttgattggttctcccgctaccacctgcaaacgcagcgtttgggggttgtagcggttgttagtgattgacaacaatcatacaaaccgttgaatataacttcggatccctcgaaatcgcccgttttcaaaagctcctttccacaagcgtttgtggttgcgggcggtagcggttaggttaaaaaaattgaaaactttttttaattaaattaaataattgtggctttcacccaaactctaatcattataattaaaataatctaatcttttatatatcttatttttattagaaaaccttaatcaatatattataaccctattgtctcaattatggcatccgatgaaaatcaaaatcaagaatcaaacataagtatcatctaaccttttattcattcattagctagtgtaattctttaactatttcatagcatcgttgtttttattttattttgtattctttttagttttttgattgaatacatgtttcgatttgttttctcgattagaaatcatttgatcggacgagatgatatattgtatttttatttggtcagaaaatcaagttttctaatattatcaatttatcataatatattgtatttttatttattttaatagtaatatattatatttattttgattatttttttatttaattaatatcgcacccgctggtttaccagtcataaaactctcgcaaacgcactcattatcaaacgctcaaccagtcgttcaaaacgcttgataacgcttgaaaccgcaaccgcccgtttccgcaaactctcgcaaccgcaaccgcacccactgcgtttaaaccagtcaggccctaagtgatgcatcttgactaaataaaatttatgttaaattacaaaagttgtcgatataacagccgatttgtctatactactaaggccaggacttagtagttgcgttgattcctctatatcatgtgtatgtccgttcccatatcaggtaccattctcattatgttaataacttgattgtggtcaaaagcaaatcataattttaatgactttattaaagtatgaatccaataactcgagatttatgaagattttaaattacattttacaaatcaaaatctaataacattaaactttaacagagtcttataaaatcttaattgaataacacaagattttttaacatttcaagtcactaaaaatccatataaatcacaaaccaataacaccttttagttaaaaatacagaaatccaaatctcatggtttaaggtgagatttgaattaattttacaaaaatcatatgaacttccctaaaattatcaaaatcatttaaaaactcaagaaactcaaatcactttaaattctaatttgaatacacgccctttctaagtttcaatataaaagagcacttgcttttccggattacgtagagagtcttaggtgtttagtaggagaggcagtttcatggccgttgaactctctttcttaactttgggatgattactctattgcatacttactcttatttcacagacaatcttacctctttttataaatttattcggactttgtctccttgcttctggggtattatgggcactatagtttctgtctaccaaaacgagttcccgataacattattatacatatgaaaagaggtcatgatttaatcctcaacccaatcccacaaaaggtataaagatgcatatatatacgtgaagacgggacccgggtacgtaaatccactttaccagtcgggtatagatatgtaggttcaaaaaaagcgcattggttataccttgtctccatatttataagttttaaattattactatatactcagctggaaaaaaagcatacaaaagacagagaaatctagggtttcgaaaccagagcgatcgatcatgatgagaagacgcaacaaaaagaccaaaaccgtgatcagcaatccagaaacgttggaagagagaaacaagtttgatgaaatccctcatgacctagtgatcgagattcttgggagattgcctgccaaatctgtagctaggtttctcacagtatccaagttatgggcaactagtatccgcagtctagatttcatcaaatcttacccgcttggatcttcgtcgaagcctcgtaccttagttgcttctagtgaaccagatctcaatatggaacaccacgaatgatacttcttctcgcagtcttcctcatcaacgtctcttgtatcacgtgtgagtgtgacatgtccgctcccatattactatgatcatcactaatatcatcatgttaatgggttgataatcattggacatggtccagagcaagtcgtggctaaccctagcacaggtcgaaccatacctttaccaagagtcaaaaccaggagaacgatagcaacaagttttttcgggtatgattctgttagtgatcaatacaaagtgttgtgtatgacggtaaaagcgtatggtgatctgagggatgagtcatctcaacatcaagtattcacattgggagctaaaaagaaatcattcagaatgatagatactagtattattcctcaccgtccttgctctaacggtgtgtgcatagatagtgttgtgtattatgttgctaaaacgggggcgggaatgttgcatctatgcataatgagatttgacttgagttctgaaatattggatctttttactagtttgcctcaagagattcgacctccaagtgaattattgagaatttgataaactacgaggggaaactagccataccaacggaaactacttcatatacatatgttgtgtgggttatagatcaggattctgaaaaacatgaatgcttgaagaaattaactttcagtattgaaccagcttggaagaattcatttgttaatctacgcctcataggctacactactcatacgtgtgagtttattttgcatcaccacactataattatgagatttatgtctcccattgcaatcccgacacgaatagttttagacgcactaaggttgaagcatccgcagcgttcaagtttccttttataagagcaatggtttttccggattacgtagagagtgttaggatgttgtaggagaggcagtttcatgctgtataatactctctttataaaactttagcacttataaagagagtattcattcgacgactctaatgtacaaaatcgaggatgtaattgtacattacaattcacgattacaattcacgactatacgtgcacattacaattcacgattttggttgacttcactatctattagttctttatgttttcacaatttcacagaaaaaaactctgatcataataaagtaacaaataaaactttccttcttacatgtctggaatacattggactctactaaccgcgatcatacaagttagttgctacgacaccaaactattcacacacagacacattgcttctttaaaacttctggaaagcatacaaattaccaaaaataaattcaaaactttactgaaaatgttacatgtttgcgatcgttgtgacaaaaggtaccaatcttctgtaatctcttcttcctagagcgcaattatcaagaacccgacccaacattagccttgtgttctgtaaagccacatctctcggaggtatccctgactctgccgcagctgcaccaagagnnnnnnnnnnnnnnnnnnnnnnngccatcattgcgtactgaagaggtccgcttcgggctttaaatgaagtctgaggtacaagcgttttctcatcagtcccgttttcagagtaactcgaatcctgagggtgggatccaccggtgcccccttgtaccgggctgcagctctgaagaagagcttcgagaacactcaatgcctcccaacacagagtgctttcgactagctgtgaaacaattgtgtacatgtggggactctgcgaagcatccatgggagtgtgttggagcaatgccttgagcataagtaatatgactcgttggtaatccactggtcctttttttagcagtcttaacaagtgaccgaaagctaaagctgagtgtttcgggaaccatttgttgcagagcagaggagagacacatgcaaggagattttcaactcttttaatctcgccacgagcatatgcgacaaaaacagtcgctaattcatcgagtgattttgcccgacaccagacagcaatgttagatgccacagaacatgccttttgatattgctgctggagtggtaacgcagaaaccatgacttggtcttgggtcagctgcaagcaaagccaaggaagtagacctgtgatatgcataaggagtcttgtctcagcatcgccaaatatagagtcacatgaaggcactgtaatccttgataggacctcaatagagaactcgtggctaacagtagacatcagtcctttgaggacaagaggttgtacaccttcgaactttggaagagttccacttgacggcggcatctcgtaccctctagattctgacctttggaattcccccaaatcattagtgttgaattcatcccgaggcatacttgccgagagtacattgtcagttgttttgtcaccaaatgatagccggtcaataatacgggagaagagctcaagaacctggcaatagacatggacgaagtctgtgtgcatcatggcgacacagccccagaagagctgtgggtagagtatgactttctctggctccatgttctctaccatgacctgtagcgtcagaaggatttccataataaaacccaaaactggaggaatgggattgctaagacatcgatgaagacagcgtagaagggagacacatgcatcacttgtcacacttgggcgtagcgcacggtatatttggtgtgaccgacatgctagatgtcttgacgtgcattccatagcccatttgagagcttcagttccccaagtttctcgaagatctccttggaagaatatagcatcaaccatactctgaacaagtgcagacaaaagagcggcactaggaagatctgttctcacaaccgttggatcttcattctcccacatcatgcttcctcgttttgattgcacatacttaattaaactcacaacctgttgtttgttctctccatcgctgttttccacctcatatagctccaaatgccgacccgctagtgagtacaataaattcacaagtaaatgttgacaatgctctagcacaatgtcttcagagctatccatcgaaacaaaagtgacgtggaagagcaaaggcagatgttccctaaaatcttcatcattctcatatgcgatttctgcaagaagaatcagagctatgtcagcatgagtgagtgagtgctgttgatgtccctgcaaggctgattgaagttcctttgcattgacgccgtgcattgcgatccctgaatgcaacacatcttctccagaatttggtgtatctatgaggtaatctccgctatcacgtgagacatggcgactcctcaaacttcctgtagagctacgaactcccattaaaggtcctgatgcattcaccaatgatggcaggagctgaccagaacgaccagtagctacaggaacaatattcaactcaggaggcattggacttaaaggcccagaagcacttcgcccagtcatccctgctgttctccagcttaggcttccacttgtattcctaaggggaccatcaagggagcctctgacaagaagtggtgacatatgtggttggctgtctgcaactgaaacaacttgaggtgctgtggcaggtccctgagagaactccagcacaaagtttccattggaatcaccccggtttgcactataaccaatgggttcaatactgtcttccagcatccgctgtgacagttggtaaaccaggtgatcaatagtacgctgaggacatattcgtgcgaggtacaaacttacacgcttagcaactgaaaaatatgtagcaaatgcaccagttatttcggcagatgcatttgaatcacagtcctcaattccctttgtgatcaagaaatccaatacagggctgatgtttctgggcttactagcaatggtactccaaagtttttcaatttcatcagggaattgatccccgtgtcgccatgtcacatagtaaagactttttagtaatctttcactccaacccgaatccttgagtttccagaaattaaggttctcaatccatggagccatacaggtcaagacctgatgctgagcaattatatcaacagcatcaagctgacgctgcataatttcttcacaaagcagctggcttaactccggatgatccttggcgagtttgcaggagagcttgtattggaactgttgatatgaatctggaagattacctacaactgctgctctatagcctcctgaaccttctataccatcctcagcccactcacgcatagaaagtgtctcaagcatttgaagagcatcatcgcgaatttgtctagatggatcgactaccttgtagagaattagacttaagagcctctggatttcacattttggtatttcttgtcgcatgtaaacctcagccaacacactgaagtacccatcagctatagccgcatcagagtagtaacactgggaaaagtacagatgaattaggtcatgcagtttagaagagtctaatcaaggatgtagtcaaacagatgagcaaagcatagaagtgaaaaaagcttattaagagaattcagatgcttaaactggagctaataaaacaaaactatctgatacggaaccatcactgcatggataagttgtcatcattggtcaagatttatcaaacatctgacctagtaattaccaagacgacagtataattaaacacaacttccatgcattcagtcagatagaacattacctgatcaatgcaggcaggaaagagatccaagtttgtaagtagaagattcttcagggccaattttgccaacgcaacacgttgatgaccacctctatgcctatcacgacctgttgtccctcgtccaccttctcccgtgtatttggagtaagatggagttcttggatcagcaggcgagtaaccnnnnnnnnnnnnnnnnnnnnnnnnnnnnnnnaaactatttatccaagatatcacacggccgctcatttttcttgcattgtcatcaaaacacggtccataaagaagggaagccattgcattcaatgaggcccactggatggcttcaatttgctcattcagttccttgtcaaaagaaatcttgtctacagaatctttggaccggttatgctgtgaggtcttatagcgctctacttcacggcgataatcactaacaccatcctgtccccacgtatttccagtgtcatcggaccaggaaagaagcagatcgaatagacgtttcctacttctaacatcaaacttctctgattt

SEQ ID NO: 35967 - DNA, 1056 bp, Arabidopsis thaliana landsberg
tcctggtgctacaatcactgctctacctggtatggctttctcttcatccactttacattttgttggagctttgaaagcaggaggaaatattttatcctctgaatcttggataatagacagtggggcaacacatcatgtgtgtcatgataagaatctctttctaaatttaactgaaagtatgaatacttcagtcactttacctactggttttggagttaaaatcacaggaattggtacagtgaagttgagtgatcttatggttttgaaaaacgttctctatatcccagatttccaattaaatctactgagtgtgagtcagttgacaaaggatttgggttatcgagtgagttttgatgaaaattcttgtatgatacaggatcatatcaaggggttgatgattggtagaggtgaacaacattccaacttatatgtgctagacgtttcctcaatcatgccccatgaccctcaagctcttgttgtttctgcaaatgttattgttgattctagtttgtggcatagtagactaggtcatccttctatgttgaaaacagatatgattacagatgtacttggtttaaaacaatgcaataaagatcaatttcattgttcaatctgtcctttggccaagcagaagaaattatcttttccttctaagaataacatctgtgataatgcatttgacttgttacacattgatgtgtggggtccttttgcagttcctacaacagaggggtataaatattttctaaccattgttgatgatcatactcgtgtacatggttatatctcttaaaggctaaatcagatgtgctgcagatttttccagactttctaaaaatggtggaaacgcagtacaagattgttgtcaaggctgtgagatcagataatgctcctgagctcaagtttgtggaattgttcaagtcgaaaggcatcattgcttatcattcatgtcctgagactcagaaacaaaactctgttgttgaacgtaaacatcaacacattttgaatgtggccaggtctcttatgttccaatcaaagattcctgaagcatattgg

SEQ ID NO: 35968 - DNA, 1550 bp, Arabidopsis thaliana landsberg
gcccattttcctctcaacaaatgtcggcatattattatgtcggcaaattatgtttcttttgatgttcatatttgtggagatgaactaacatatgtgtatggatgatagggaatatgggccggtatgatatttggaggaaccgcaattcaaacgttgatattgattatcatcactacaagatgtgactgggacaatgaggtaaccatttggagtatattacaaaatatcactttcatctaaaattttagtaaattttgtcatagttagtacattactttttaacttgatataagaatttttgagtgactgtttacagtgtacaatcttaaaacattgcaggcacataaatcaagatagtgccttaaacagggggtgatttatctgatcttgccaaaaacattttctttaaacttcatactcgaacaaaatattgcacacaactcctcacgcttactaacctgaggaaaaaagggaaaagagggggtgagtaaagaatactcagtgaggggaatcaactttgcccactgaaacatagaacactttctaaagctatacaaccataatcataacatatagatttatcatacacaatcaacctaacatgctttaacttctaacaacacattcataacaatcatcttatatatatattaatataaatatacacatcggtaggtccagtcatcctcgtgatgactagaacctcaaaattggaggctggccctcgtggcccagacactcccattccgggctcgtcatccgtttttgaccagctgttaacccgtcggtcaatcactgtccacatcactagggagaccatgtcccatagctcgattctccccagtcttacattcatcatacatacatactcataatcgtacttaacatacacatacttattatattatacataacatcacattatcaaacatcatactcaacaatcagaatgtcatatcatcatctaatcttcttctacacaatcagatctaagtctacatatcatgcgtcaagaagcataacaaaagaaaatgataatatgtttcgcaaataccaccctcaccttagcctaattgaagatgaagattcacttctcctttctcaacctttaccacaactacatgctcataagctttaacttggttctccctcgactaagaactgaatccatgagtcatgaaatctcctgcaaaacttcagctctaatcgaactcgtttcccaaccaacaacacaaattcatcactatttacttcaaataaaactgtcttggaaacatactcaaaattcaggaactaaccgttagaaacgtgatctcaccgttgaatatgtagatagaagtatcatgaataactccacaaatttacagcatgatcggacttcattaaaagctccaaacgttgtcatcaacaaaccatctcgaactgtcatttaggggttcctgcatttgacagactttgcagttacttgtcatgaaagaaacgtacataacttcttgaatatatactcgattccaattctgtcagcggctatggattgttgatatcgttat

SEQ ID NO: 35969 - DNA, 1338 bp, Arabidopsis thaliana landsberg
acgggcaaaagcgagtctttgtgtatgttatacctgagttattagctcttgtactttttattgttccttggataaggaactgggtcgaggagctgaatcttggagttgtgtactttctgacatggtggttctatagcaagacttttgttggtcgtgggatgagggaaggcttagtggataatgttaagtatacagtcttttggattattgtattggccactaaattcatatttagttacttcttacaaattaggcctctaattgctccgaccagggcactactgaaccttaagaatgcgacgtacaattggcatgagttttttggtagcactcataggatagcagtagggatgctctggctccctgttattttggtttatctgatggatttgcaaatttggtactctatctactcatcccttgtaggtgcaacaattggtctattttctcacttgggggagatccggaacatagatcagttaagacttagatttcagtttttctcaagtgctatgcagtttaatcttaaacctgaatatgcatctttttagccctaaagcaacaatgcttaggaaggctcgtgatgctattcaccggctgaaattgcgatatggaattggtcagcctttcaacaagatcgaatccagtcaggttgaagcaacttggtttgccctcatttggaatgagataatcctcacatttagggaggaagaccttatcagtgatagggaggttgagctactcgagttgccgcctaattgttggaatattcgggttatccgttggccgtgtttcctcctttgcaatgagctcctacttgcgctaagtcaggcaaacgagctctgtgacgctcctgatcactggctttggtcaaaaatctgtagcagtgagtacaggcgttgtgctgttatggaagcttttgatagcatcaaatttgtgattcttaaaattgttaaaaatggcacagaggaagaatccatacttaacaggttgtttatggagattgatgaaaatgtggaaaacgaaaagataacttgagtatataagctgacagtactactccggattcatgagaagctaatatcacttcttgagcgtctgatggacccagaaaagaaagtattcaggatcgtgaatatactgcaagctctgtatgaactttgtgcatgggaattcccaaaaactaggaggagcactccgcagttgaggcagcttggcttggcgcccactagcttgtaagctgatactgccctgctgcttgacaccgacatcatcctccttgatttgtcgaatcttatctactcccctcaatgctcctcgcctcttatttctcttttc

SEQ ID NO: 35970 - DNA, 1442 bp, Arabidopsis thaliana landsberg
attttaagttgcacttcatcaaaccggaacaaaagttagcctataatcgccaaagagataaacggcgatacaattagaaataaagccagccatcgacgctatagagatttgggatcaaggttaagctactttatccaccttgatctcattcaatctctaaaaaccaaatgagtttcgatttaggaattttgtctattttcaatcgataaaacgacatcgtagtgtacagtaaactaatgtcgtttagacataacagagaagactaacaaaaaattaacaccgtaatttttttttgtgaatctacttaacatcatatctaaatagtaaaatgtttacatttagtcatttaacgccaccattgagaccgccgcttgttaacccatttctaatcttatacatgacatataattgtactaactcacctcaaatggtattaataaacagtttttggttcgtttcagttatatcagtatatgacaaactcttggtgagatataaatctacacataaaacacatgagtattggtttgtcattgtccaaacatatttgattcacaatacgacgatttataaattataaagtttccctccaaattattttgaaggatttttaatccatatatttgaaactataaataaacgtgttcacaataaaggataaggtgataagtaacaaataatcctcctccaataagcgtaataagtagggacatcaagggtaaatatggaattttagaaagaaaaaaaatgcacatgtgtttttttttaatcggaatctcctaaaaccctatatattggcggtacaattacgctaagcttcagtgactcactcacatcgtgctttgattctggaatctaggtttaaagtttagacctttgagatcactatatcacaaaatggaactcaatttctcttcaatggctataacaaaccccaaaatcccttctttcggttttacacccaccggaatattcctaaacccatcaaaatcagtgtgtttggcttctcatcatcgccttccgagagtttcatgctctgtttctactactactgattctcccaagctagtgacttcaacaaaggtaagttttttatttgtgggttttgctgaaatgatgtgttgtttggatgttttcgataagaattggcgataaattgatatgctttaggtgacggcaatggatggagtgagctctagagacttggagatgtcgaatttaacggcgttatcgcctttggatggacgttattggagtaaagttaaggacttggcttcttctttgagcgagtttggattgatctatttccgagtttgtgtcgaggtattgggttatgttctgattcattgattgattaggaagattggttttgtctgagtagttagctaaagtcttcatcttagaacttttgttagatcaaatggcatattaagctttcaaat

SEQ ID NO: 35971 - DNA, 2576 bp, Arabidopsis thaliana landsberg
gctttttgatcaaaagaaaaaggcaaagcttcatagattggtaagaaaattactacttcacgtgtcccataagcaacacccttcctatatcttattaggcattaggccttaaaccccacaagcttcttctttcttctccttcttcttctttttctcttcttcaagcctcgatatacatcattgcagccaccatcatgagagtgaaagaaacaggaaagggttttgtggttatattaatggtgatgataccaatagtgagctgggttgatgcaacaagcaggcctattgcttccagtcacgtttctttttatccaggtttaatttcttatttcttcagagtctaatatattagaccattactatgtgtgtatctatatattgaaagggagacgtctagatttgtaagtatgaacaaaaagacttctctgtttagtttctgtttgcaaagaaggttaggttcaatttcttacttgtttatactaattttatgagcaaatcaatgacttgtaatagtggctattttagactctaaaccgtggtcccaaatatttgcatgattaacggttaaacccaaacaaactatggttttagaaattactgttatagattagtcagtaaaaagaatcatagaaaatggaatacatgttcttattaatgtctaaattctttttcgttttcccaataataatttatattgggcctgcagagataataaagccgcaggctgcagaagaaaactctaggagacgcattttgaaccccaatgagaataaagaagagatagtgaaaagaagaagaagaataggatcaaagccaccaagttgtgagaaaaaatgctatggatgtgagccatgtgaagcaatccaattccctaccatttcttcaatccctcacctatctcctcattatgctaattaccaacctgagggttggagatgccattgtcctcctccttaactaatcattctctctttttgtattccttacttagacacagtaacatattatatgttcacaacatgtatctgtttttaaactattatcatcactcatatcagtaatgtagacttgtagtaaactataacgtcaaagattttttatcaaactcaagtaattttttcacagtgaaatagttttttttttctttttcttttgggtaaggtttggtatactagaaggggcgggccatttgtttgtagccataagggcgagtaatatttattttattgggccgggcctgacttttttgcgcttttactctcccggctcgtgtacttgtgtacggaatagtacataatataatatgttgttatattatttcataaaaattgtggaaaataaatttccaataatttgtattccacaaatgttatcactcatctatatatacatttttgcatccattttgtaaaataatcctcaagttggacttatttacagtgactgccactggcatttaataattattttttataattagaaagtaaatcttcgaattaaatatttgacatttaacaatcttcccaaaatctctccacattaactacacaattagttactaaaataaaactttcaaaatatttaatatcatttaaacactacaaaattatcatttttgatattgcttttttcatgactataacaattcgattataagcatcaaaccgcagaaatatttgatagcagttaattactacaaaattacaaaatatttatacaatgatttataaacatatcataaataaaatcaacattataaaataaataggtttttttacgggacgggtttgacaggacgttacttaataacaattgtaaactttaaaataaaaatattttatatatagatacaatttgcaaacttttttatatattaaaaaattaattgttctcgcagtgtaccgcgggttaaaatctagtggttctgaattttgatgaaaaaaataaaattaaaaatcgctataaattgttgtgtgatctttaatagtgatagtctgatagatagattgttagtaattataaacttgtgtgatagacaaagacaaagaaaatgaaagaaagtgacaaaaccattaaaacattgtggcagttaacaagaaaaaaacttggtgccaactaataataataccatttgttagtcaatacaaatcagtaattaaatagtttaatttctgatttggttttaagttttaactaaaaacacactaataatgagaaagaaaatcgctaataattaattaaaaggaatataaaaataggagtcagctgaaggagtagacagagagaacggaaattgctgcgttgggtttgagagttgcagtcgcagagagtgtgcaagccagacaaagagacagagaaagaaagagatccagagatattattttcccttttgatctttcttgtccaaagggaagacacagagagagaaaaagcgagcccttttctccttcttcctcaaattctcatctattcgaatttggcattcattagctttctttgtctgattgatctccgtcggaatcggtgttctttatgaacgaccctcccgattctaggtttttctcgctttctcccca

SEQ ID NO: 35972 - DNA, 2291 bp, Arabidopsis thaliana landsberg
gtccagttccaactcgagttgtttctttgccgggttatcttttttccctgaagacccttttttactgtgtggtgaatcatcaccaccggaaagtttcaggactgtatcggaaagtggagtctcatgagtcattttcaaggacggtgagcgtgaagacgatgaggttctagaaggagactcaatatctagaagcgggcgttcgatagcctcaaactcttgttttgttttgtccaatacctcaaatagttctttcactcttttatcatctttcctggatccaaaagaacaccaagcacggttaaaacaaaagtgaagttagatcttgactatagttttttcaaagattttgtagctttacctggagataccttctgtttgtgaatagaatggctttttcatcgcatccaccacacttaatgttgttacaaactgttaaagctattaaataatcagaagagctgttacgtaaaaggacatgcagagtagtaacttgtgccacaagcttaggaatgttctgttttactatgcacattgagaaaagtgatctagatgtctatttcataaagccatttaccttagcttcgaggtctagatattccttctcaagctgttttctagaatcgaatggctttgaatccttgttgtctatgattttctctgcttctaacctaatatttccccataagcagatcaactttagctaccatcctaacttagtgtcaaataaaatttaccagaacagataaatgaacagatatataattaccctttacttggttccaaactttccacgactcctcggatttttggtatatatggatccaattgttcctgatttgatattacaaaatatgaatgtgagatatgtatcataatacatttggcactacctttcgtataaacattttgaattaccttgaaaaaaaataggagttgaacaatcaggtcgatgaaatggtcactatatctctccatctcaccacttgagcatcatcgatttcatggtgtaaggaatggtaacagacagatttaatgcaaagttattagggaaacaacatagttcctgagatttttgcaacgtggagacaagacatacctaacttggttatccttttgttgagaaaatttagactggagaatccatgtatcttccaaaaatttgatccacttatttacaacatctgcctctactcggcatgaagttatcgaacgagtcagctcttcttcctacaacatatgccacccaaacatcacaaactatatcttcttataggctaatacaagggggaaggacaaagtagttacgtacctttgacttcaggtgcataagaatttcgttacttgcattatcaaactgctctctttcttcttgtgcattgccaaagcgagcccgggcagatgttattgaggtgttgaccttcaaagaatacatttgaactctgtaatatgacctacaaatctatatctctaacagttcactattgaataaagtttttgtgatcaaagttacccttttcagctcagcttcaagatcttccttcaaaatctcaagtttttttaattctgcagctacatcctggatattacatttttactcagcccataataataagaagatgtactaaaaacatgaagagacaagtccaaagtactgaaccaaccttctccagctgaccaacttcagtagttttagaaactcggtagcttagagcttcttctttttggcttctgctttgtcatatggaaaaagatagatctcaactatggtaataaaagattgtagataaaatttgagattgctatgttacattttctcacctatgatccatgattcgcttttcggctttcgaagtggaattgagtaaggattctgatagaactttcagtttatcgacctgcaagatacatagtgagaaaaaagaagctaataaaaacttctatagcaggacaaaatttctgagacaaataagaacaaaccaaccaaaatagtgaatgttgtggattgtctctagtttctcaccttctcactgtggcgttgaagggtatcaccattgtgtaatgattttttcctaagcaagagtgcttctagctttgaaaaagtgcgaacttgctcaagaatttcccggagagcctacaacgacccaagcttttcagtacatctcacagggattgatccagggatgcgttgacaaatcatgaaaatacttgcgaaacaaaacaatgcaataaagattttcctagaaacctcacaggagtgaacaatgtggcagtagtaaagtaggagagaaaat

SEQ ID NO: 35973 - DNA, 891 bp, Arabidopsis thaliana landsberg
gcaaattagggtcgacccagatttaagtgtttatctctttcattaaaccatatttggcctcaactatattaaagtttcggatacattctgcgaaaactctatgtttggtccacttctaaattcatattatggaagaaaaaaatctgggccatgattgttggaatgctgtccgaggaggccataattgagcaccctgagtattatattttgtgtggaacttaacttgttcacacgcatagccttgaatcctgactacgaagctctacgcgatggaatctatttctttgtgaaaactaataaggcaatttagggggaaattcagaaaagccaaagaaggtcttaataatgcagaaggattgctttgtgattctgttgccaaaagtttgcaacatttgtccttagagacagtggcaacatccttcagttattatatatagacaatgtgtgagcttcggcatcaatgagaaactgtttcaggtatcatcttatctgtagaaatattcaatttctattttctttcaagagatcataggagaaaagatataagaaatttggatttataacctacaattttttttataaattaacaaactaacctataaaaaaaacctttgaatacaacagatatataatatatattattacaattttacttttactactaaccaccaccacaaccaccgctgccggaactatcaccactaaccaccaccacaaccaccgttgccggaactatcaccaccatcggatccgctgccaccgctatcagagcagccacactgttttgggtgctacgtcgttgtcagagtagcgcagtcgcataccactaccatcactggagccgcgcctgttgccggccaccatcatcttcagcgctacagttgttgcagt

SEQ ID NO: 35974 - DNA, 1532 bp, Arabidopsis thaliana landsberg
caaaaggttaggttttaattgtcgaccggttggtatctatttgcttgaaaaaaaatctgattaatgaaacatttagcttttctaatttacaaacgaaaaaaatagaaatcaggaacgatcggggtcctacacaaaggacacgtcatcttatcgtcttggatccaacggtcaatacacgtcttgtgataaacatgtacgcaattcctcaaacacccggacttcgtcaccgccgtcgaactcatccttggcatatccggcagctctccggcggattaacccttgatgatatatcctcgaactttgttgccggaagcatatcgtccatcggaatcttgtcggtgatagtgctccctgaagatgccgaaccaaacaaacgacgaatatcaagaaaagaacgaactgatttgataaaatcattcaagataactccggcgataataactccggcgccgctataagataagcccatgattctttttcaagaaaagaatggtgaagaagaaatctaagaagataggaatcttttttacgatcaaatttggagaaagaaagaaggaaaagttacgagaggatataaaaatggctatttatatgatttgtatatattagaattaggttttagcgtggaacgcgagggcgggatttagagaagaagattgaaacgtacgtcaaagagataaagatactgactgtgatggaaagaaaccaatcatagaagaacatgtcaatgggaaaaaagtgtatgattggttggtgacggacaaggacaatgaaatacagaaaaggggaaaagagatgttcacattgttgaaaaacatgcctttgaagcaaaagcatatgatattcaattattaaaatagagatagctaattgacttgtaaatttatagagctttattttctgagattttatttggaaattttatattccagattaggctaccaatagacaaaaaaaaaaaattcacattatattcaatttaatatagagatagctaaatcacatgtagatcattgctatattcattcattttaattactcaagatgtagaatatatgtggcgtaaaaggattggactaactttggataaagtataaaaataaaaggtccaattaattaattatattgcattatgatttatgaatatgaaaccaaggctttttcttgcatgaaatggtcgtatacgtattacctttgtttggttgtgtatagtcatatagtgcattgtgggtacgcaaacattttattatttaaccaattaaagcaatggagtcaagactacagaaaacgaaaaaaaagttatatatatatcacgactcaagaacataatggagatcgataacaaatcattcatttcagaatttacgtaatccaatgctccacttattgcttatttgagaatatataaactgtatctagtttctgatttcatgttttggtgaaaaagaaaagaaaatctaatggcctccatatattagatctatgatgtaatgactcgatgatagattcggaggtgaggatcatgcggtacg

SEQ ID NO: 35975 - DNA, 1109 bp, Arabidopsis thaliana landsberg
ttcgtccttcattaacaaattagaagaaaaaaaattaaattagtgaatcatgagaattaattttgttctatagtggtgaatcgataagaaaatcgactttgtattaccaccaaatacggaagaggctagtagattcatagacaggcttcttagcatcagcatctattgtgcttacctttttctttgtctgcaatcaattttgatatttaatcaaatatttgaaaatcttccaaaacttgcaatattgcatgatttatttagaaagaaaattctagaagaatacaccaaatattttctgattattgtatgttccttttattttaagtacataaatctttttgattcaaaagatcagtacacaatctaattattattttttatagtaattattttttacaaaatttatatccactaaacactttttaatatcaatgataaaatatattaaacttttaaaaacttccaaaaataatggcgtataaagccatatattggagagatgctcgaaaagattatcgattgttgtgcagaatctaacaccttcgacaatatcggcctgataaacttatttttgaacataaattttcaaatctttttcttttgtgcaaatgggaggcaaaaggaacttactttccatcaagatagggaggagggttgaggcaagtaggcacgtatagcacgttcaatgaacattgacaaagttgtagtatctaaaattgtttatattttcacagagttataccctaagtacaaatcagtggttccaattgaaaaattatgttgtaccaatttcacaatttaattacatcaaagtaacaattctgatgtaccaattaaactactcgtattaaataaactaattgtgtatttacaaacgaacaattgtcacatttaaactagctgtttaaatgtttttatagtatcatattactttgcttttatttccatttgtttttaattcatcgaagccattgattcgaatttagttgggtataatcttgatcagaaatttaaaccgttgcagactaaggtgttgttgaaccggatttttcctttgctgggggaatcaactattcaaacaaaaaacccattttcctaaaaccctcgtc

SEQ ID NO: 35976 - DNA, 2491 bp, Arabidopsis thaliana landsberg
  unsure (1)..(2491): unsure at all n locations
gcgcgacactccacctgcattccacagagaattggttcacagtacgtcaatttataatctcaaaactgttattccttttaatctaccaagttcaagatccaatttcaacattaagctagaccaggtgtattgattagaggacttgatcaatttgaaacttattgagagtttgtatgatatataaggtgtaagttgaagctgaaacctgggatcggttcccaagctgatcatgaggctggtgctgattttctttcccttgaatggacttgttcagctgtctcttcttgagtatcgattcaggtgtgtcattacccagaacttccaaggcatctgcatatgccgtagctgagtgttcactcaaatgcttcatcagtcctatggcatcataacttctctcgccgggactcataaaacacccaatatcctgggaagaaaaaatgataaacaacaaagaagatacgtccattaacaggcgcttcaacttaaaacaaaaagtaaaacatccagaaactaaatttattccatctcatatttacctcaaatgtgatttctggaggcaactttggactttgcaagaaagaaccaaagagtaaaggagatttccaaggtgatggggtatcaaggagttttctgaacggagttccatcaaatctggaaaacgagttgtaccaagacaacttaggttagaactttcgagctaatatgattcaatagcaaaatgagctatcaaacacatacagaggaaaagtaaaacttacatgttgaagttttcaatatcaaagctggtctctgcagtgttagttttatcgattgcagataaaggaatagagtccactgtgcatagaggttctgatgacatttcttctgttggaaaatcacctaatgatattttgtgctggtttgatagatctttcgcacttgcattaactttgttatctggtctagctcgagtcataccaggagaacacagtcgtaactcaaaaaaacttccagaagtttcttggtcctggtacaagggcaagtaagagatttagagattaaagcttataagattacgttatggagatttagaccaactataaaactataatcctctacaaagacagctgaaataactagatgctatctgtttgagcaaatgtgattgatacgatctcacatgaagagaattcaacatactagatgatgtgttaagcaacaagaagttcactaatagactcaataaccatgtaccagacattgcaccttacagctatagacatcagagaatgagatgactgggattttataactgataccagataatatgcaaggacaaagacggacttacatttttagctgaagcaccaccgtcattacatccattttcattttgcatagaagtcactccacctgattctaaggtttcctttggttcctcatctatcggaatcatttcttgatataaccgagctgatgcacaatttctgttatctctggctatggaaggggaggcacatatatttttatcttcaggagactctgacggacgagaggtcatgcaatcatctccttcatcaagcattacatctaagcgcgaaaaatcattagccaaggaggaagtcgcagcccttttaagctttttgtcttttcttctatcaagcacaggtgaaannnnnnnnnnnnnnnnnnnnnnnnnnnnggatggtgcaccactaaaacttttggcagtatcattaagcatgacatcagggctcctatcgtgacacggtgaatcccataaccttaacggagttgtacaattcattgaagaaatcatcaactgacggataccaaagggactgtactcttgccgtaagtcactatttgatggtacaagatcacagctgaagaaaggaatatctgcacttggaaaacgtggaggttcataacaaagagctcctttgtctttttcagccggcttatcgtcaataggaaaataaatcttgttcactctagaaggagaagaaaaactattcaaaggtactagcttcaaagaatccttgggaatatatgacagcccctgttgttctgggaaaccaccattatcatcattgccatgggaagttacatgtccgtaagtatcgatgaaaccgtcatttgtatcagtcttacattctaattcggtagctccaaaaaggcgacaaccttgtataggagcgttggaatcattacggggtaaaagtgagtccttcaagtctgaatccaacaaagggacacaattatgacccgccaggccctcagaacttgaaggatgccagggtaaagctggaacttttccagtttcatgagcatgggtttctgcagcctgagaacaaagagatcctttgccgttttgagggtcaaccatattccgaccttgctcaccagaagatgtactgctatctttcatgttatctggaaaaagaaccctacaacactcctcatccgtgatcaaagtttgagcttctggatctgtgtccgagtttgacaa

SEQ ID NO: 35977 - DNA, 1245 bp, Arabidopsis thaliana landsberg
gatattatatatacgtactgaacgaaatcacaattagttcacagctaaatgcgactgttattatatttttacatgatcctattttagggttagactgtctttttcaacatatctcttagagtctttatgtaataaaaattacagagaaatgagcggaagttgtccgtaaaaaaacaaaagaaactgtcaaaaaaagacagtaagatctccactaaaactgggtttgaagaacatgaaaaaaataccaaaaccacttcacctattcataagctaagataaatctaaaacagctaatatcacaatcgattcctaataatagataacgaaaattcttatatttaaggagctcacaagctcttcagttttggatcataagctcactagttcttgtttgaataacaaagcaaaaggcaataatactaacaatcaataagtgaagaataaataataatggctggaggagcctttgtatcaaaaggtggtggtggaggaaacagctatgaaggcggagtcaccgtctttgtcatcatgacatgtattgtggccgctatgggaggtctcctctttggttatgacctcggtatctcaggttcgtaaattccacattcgcctttttcttcttcgggttgagttattttggttcgctttcgctgtccactctagcttcggggaatgtaacgtgacttcttttgttgtataggtggagtgacatctatggaggtgtttctgagcaagtttttcccggaggtggataagcaaatgcacgaagcaaggcgcgagactgcttactgcaaattcgataaccaattgctacagttgttcacttcctcactctacctcgcggcactcgcgtcttcctttgtagcttcggctgtcacaaggaagtacggacgcaaaatctccatgtttgttggaggggttgctttcctcataggttctctattcaacgcatttgctaccaatgtcgcaatgctcatcgttggtagattgttgctcggagtcggtgttggatttgccaatcaggtgagtcaacaactcaacatggtcatggtgtgtttattatgtggtttagctcaagacattctggttctggactcggtttggttcaaaaatttctcaatttttcagagtggttccaatttccaaactagaatcaacttacatctaaggttcagttttaaaatacaaataaataattaatactatcaaaatttagttgcgggttattttggtttattcgttgct

SEQ ID NO: 35978 - DNA, 719 bp, Arabidopsis thaliana landsberg
tttctttctatggacttgaaatttatgttgttgcacttgcacagtatcctctgagaaactgaacaatctaacaaaatgcaaacagtgaagttcttttattttattttttcagaataatagaatgatgggtctgacaagctctaggttggattaaaatgggcttgggtaaacaaagcccaaacaaaagcagaaaatacgtagcaacagaaggggcataatcgtaaattagataggctcaatttcaaatacttgagaagcggcgtcgctacttttgggaatttgcaacggtagaactctcttgcaattgggtttctgggaagaacaaagcagaagatctggagatttgaggaaaatggcgttcgcgaaggtacgtgaaaatcctaatttcttcaaaaaacgagttagggttactacgttcatcgcagatgaatttgagattcgagcgagggcttgttattttaaacgagattaggattagggatcttgaattgtttcgaagatagaagatattatggtatttgcctatttctgcttcttttatcacaagattagattcttgagttttcagtagcttactactctcagatttggttagttagatccacttcatcttaaaatcacaggggataaagccttgctttttatttacttacgattgatttacttttgtggcaccacgactaagtagagatgatattcttgaaatcgaggtacgagag

SEQ ID NO: 35979 - DNA, 1583 bp, Arabidopsis thaliana landsberg
tgttgttcatgctttgattttgcaatggtgatttgccttcttcataaagacgaggaggatacttgtagacattactcgatgacgtcatacttaacttccaaagaaattaagaaacaccaaataaaataagcaatagattaatcatttaataaacgattgtaataaaaaaaatagaaacagaacaagtgatatctcaaacaaagccaacaaaaaaaaaatcagtcaccatggtatcaaaataccataaatctggagcaacaattagattttatatcaaccttcttcccatttttggtaataattagtctttaaaaaacaataaacaatgattttgtccacaaatcttaccggaataaagaagtatccgatgaatttgacggcgaatgttattgtccacaaatcttaccggaataaaaaaagactagtgaatcaaaattgaaaattgaaaattgatatacggatttcttgagttatttttcttaaacaaaaactatgattttgggaacaatccttaccagaaaaatgaagattctgaggaatacgacaacaaatttcaatgaggaggacgatctccaagaaacaaaagttgtctcagccaccattgacaatagatgattgccgcctaattgtattcaagttagtacaaatacgctatcagtaggtgtttaaatcaatagcctaagcgaatatcaatagaatccctcacaaatcaattgaatacctagaatatgaagctaaaacaatataatttttctaaaacaatataatttttctttaaaaacccgattgttttgtctacaaacattaccgaatgacactaaaattagtcaccactcggaatttttgatgaatttagttaagtctgcagatggacttccttcagcgatctgcaacaaacaaaagaagagtctatcaaaacaaaaggtttctcatctaaagtttctcaaagaaaatgattaatttctcaaagaaaatgattcatcatctaatggattaatgaataatccgatgaatttggccacaaatactattgacgaggaggacatgcaacagaaaaatagaaattaggaagagaccattcaccttgatgtctgaattgagagtacggctactcccctatatctgcggcggcagaaatcgtgcgtctgtgggtacatattgtacaaatgaaacgacgacgacgaattgtgtggataaaactacggcgacgaattgtgcagatgaattgagagtacggctattcccctatatctgcggcgccagaaatcgcgcgtttgtggctatagattgtgcaaatgaaacgacggtgatggattgtgcagatgaagcggcagcgatggcgacaaattgggcagatgaagctccggcgacgtagacaaaatgtgtagatgaaggagaagtaaattctgcgtctcctttgctggcgagtcaaagtttgggttcttctttggcgtcgtcgatgttttttacgattttgtgaatgggggaaatatgaggagacatagtaaactcagaaaccgatacaccctaatatgttttttaagtgttttttgtgtttaaaatttgtatttagtaataaaatt

SEQ ID NO: 35980 - DNA, 2087 bp, Arabidopsis thaliana landsberg
  unsure (1)..(2087): unsure at all n locations
aaaatctcagaggctacttttgaaaaacatactcaatgaggctaatgagttaagatcttgtcagggttacgaagacaatgatgagaaggtcgaggtctcagggcccttgttgtctaaatcttatggagttgatgagcttttggaacgccatgaacgccaaattcgccagttagttagaaaatcgtggttccagaaaggtaaaaccatgatgctaataactaacaagaaaaagagaatgttttatgattaactgtgatgagcaacaattgtatggcttcgtgaattgcaggtaagaaacaagggaaatgaatgactctgcataaacctttctgtgtcatgaaacaagctccccaagtggatctagaagagagctcctagaactcaaaagactatatgcattttgatggtttgagaaagacaacgttaacaagatcttcagacagaaactgtgatggtgaagcaaatatggagaaagccatgaagcattattattttctgttaatgtcaatttataatataatcttctctaataaatcaaaattttgagaatatgacaattacagcgcagttttctgatttttcatgtataggcataagcatatctataaaatattcaattgtagtataaataaaagatctggatatttgttatacagaaattattgattataatccaaagttgggacaccatctcgttttgtgatgtgtggtggtcactggtatttaatgatgtctcgtgacgatggtgtatgggagtgatgttggattatgacgtttgttgttatcatcttgtttcattatatcatcaggatgtgacacattatgttcaagttatataatccgtgcactcaccatatgtctactgatcagaatctgagaatctctaaatcttatcaaatctcaatgtaatagtgtacaaacaaagagaaacttgaattttgtaccctttttggcagtttggtttttgagaatttcagccatctcttcctaggggtgggcacaaggcgagtacttgctattttagggatacttgttactcgacttgccttgtacgagtaatcaaataagtaattgtacttggcttgttgaaaacgagtacttgcaattgcaagtatttgcaaaaatatgattgccttgcgagttacttgccttgtcatgttacttgctacttgcgagttacttacatgtacttgcgagttattatttgctcattgcgagttatttacaaatatttacgaattattatttgctacttgcgagttgcttacaagttatttgcaagtatttgagagttacttgcaagtaacactttcgaattacttaaaattacttattactttatttatcgtattttttacatgtttaaaatttactttacttctaatatagtttttaaatgtgtctaacgctaaaacaatacaatatatgtatataaaatagtaaaataataacgagtaacaagtcaaacgagtcgagtattaatttttttttcattacttgttacttgacttgtacttgcaagtatctaaattatactacttgttacttgccttattaacgacgagtatttgttttttcaaggcgagtacgagccaagtagcgagtataggacgagtacngagtacttgtgcccagccctatatcagcgttttagctagtgtatatgtaaacttttacatcctaaaaaattcgaataccagaaaaacaatcctactaaccttgaaactcgcaagcaattgaaaaacatatgtatcattttaagatagttctttagtttctttttctctttattttttgttcttcagtttcttcttgtgtataagtataacatttgatgcttccatgataattaacgacatttaacacccacgttctacgtgttaaaaagggcatcagtctgacacatgaatttcatcaacattttgttttaccttttttttgttggttatatttatacagtgataacaaaaattattattattttcttacgttaagagcacaagaaaaaaaatattatgcatttaaacatttataatattttttttaaaaaaaacaaagaaaattaagaagacaagagatatttgttt

SEQ ID NO: 35981 - DNA, 1589 bp, Arabidopsis thaliana landsberg
  unsure (1)..(1589): unsure at all n locations
cttctgagagcaaaacttgaaccttttatgtctaggaggagcgatcagaatcttgaagctttttctgaacgtctaagagcagctggtgagaatagtattatgaatgctcctgcattgatcagtgaaggtgtccaaatgaaaacgccggtgagttcttcgaatttttctcagttgttacttaaaagagctatgaaagggaaaggggtagtaggaaagaaccaggaaactcctcctgaatttgtctctgatcaagatttaggaagcaaggaaaaaaagttggatattagcaagtcgcctactcctcacgatgtgttacctctaaaatcaagtcccaaaggaaatggtatggtatcacatggtgatgggaatcatagtaaatcttctattggaatcagtttgagggagtttcttagatcaagttatgctaaaagagaaaaaagacatggcctttgtctatttgggcagctggtcgaaactggttgactcagcccattcaaaaagattattcttgctagacttgagaccatcccttttcactttagttccatcaaagaaacttagatatattggtaattttggaaagaacgatctagaatcagatgttgacgaagatttgaataggaggaggcctgttgttgaggaatcatctagtggaggtaggtattcgattaaaagaaaaatggacttgcatttgaattctccagggaatcaacttcaggccacttcaaccgggcgacctttcaaaaggaaaagccctgtgattgatttaaacatggttgatgcacgtaatccagacagttgcgagcttcaacagcaagactacataaaaaatttaagcgtgtcttcagtgtcgagaaaacagtctatgtccacatggctagaagagcaatggtatacttgtccagaggagataaatggagaagatattggagaaaaatcaaatatttatgcccttggtgttcttctgtttgaggtatggacgaatacccagttttattgttgtggatagatttttaagttgctttataccaagaaggatgtaacatttccttgcatttgaacactatgtactgtcatatcctgcttatgtgggctttgggaggtttatattctttcattttcatgaaatttcttactctagtctgaactttgaatcccagagctagtattttccagtctgcagtatataacttgtcagtatttttgtttacttgtttgatactttcatgtgaagacgcctactgacatctagcttgaccaattgttgtttcagttgctatgccattgcgagtcaggcgagatgcatgctgcaatgatggcagatttacgccatcggattctcccaccaacatttctctcgaaatacccgaaggaagctggattttgtctttggcttctacatcctgaaccctcctcccgaccatcagctaggtatttagctgagtgctactcttttatgattcatgtgggcgagtatttactaggagtctaggagtggtacaaaggagaatctgtagaccttccattagcttaaatagtcgtatntaagatttctttggccgatatcttcaattttatttaatggtttc

SEQ ID NO: 35982 - DNA, 1458 bp, Arabidopsis thaliana landsberg
  unsure (1)..(1458): unsure at all n locations
cggtaaactgtcaatatcatttatttattttctaacaaaagagcttttgataattttacctgatgccctcagtccaaccaggaaatggttctttgaatgtgctggtaataattgaaggacgaagcaacacaagtgacagattttctctttttgtccctaccatcatctcccccattgctttggtgaacacatatgtgtttggccatccgtacatctttgccctattcattataatatcatagccactttatttcaaagtatttaacactaattaacaataaaatatatacgtagggatatgaaccgtctgagtccgagatccttcatggtttccgtgatggtttcaggagcggctccgattactcggagctggtcaagtttctcctgaaccaattttttctcgtagttgatgtctaaaccggtggttccattcaacgtctcacccatacggtacggtgtttccattatcaagccagatttttctccgcacacgtaagctttgatacaaaattcgttagttgctggcatttagttatataagcttctttactagtactatccaagaaaaagacattccacaattatgatccaataacattttttaattttttgatcaatgtggtcatgtttatagtggatactggatagattggcaaaaatactggagagttgcaagtttttctttcatttctaatgttggtagctcataacttgtttgttggtagttatatgtcgaaatcagataacttatgctgatttatatcggtgtcctaaacccctaatacttagtacatagtccctttctatctaattttccatgtgaggatgttttttttatatatatatatatatatataaacctataaaactctcgcacaaataaaaaagaagtatgaaactcaaaattaatgtattaatcgtttcatacttctaaaccaaccttctcgaccataatatgaaatcgntaacgtatatatattgaaatctttctaattttaagataaggattaggaaatcggatagagggactaaatatttcacttgggtctaataaacacaatttattacagtctcattgacagcatagtactttgaatatacctgttgatacatgaacaaggatcttattctttgcacatctcttggcaaagttcaagacattgagagcaccggatgtgttgatcccaagagctacatcgtgtctgcagatgaattaattaacattcctttagttttacagtatatataagacatgtaactacaaattatcatgtgtaaaacatattccctcgggacaagggagatgtaaaatcaatacctttcatcaaacttattagttgcagctaaattaacaatggcatcaacttggtggatcatctcatgagccacgtctatgtctggaagacctacatcctcaaggcaaatgtatgcgtcgccaatagtgaattttctttgatg

SEQ ID NO: 35983 - DNA, 783 bp, Arabidopsis thaliana landsberg
  unsure (1)..(783): unsure at all n locations
aaagtacagcaaaccttattaaatcctggggactatagtggtcaataagctctagcttctcatccatcgccacttcctaaatgtttctctctctatatctcgtgcaagctttctcgcagaagtgataccatctgttattattttgtatagaaaaaatgatatatttacatcgcatatatttcatcatcgtcctcttcacactaattttccatgggcgtcttggtttttccgacaccaataaacttcaggaggcggaaggtgttactataaagattcttcctctagtcctgtctctcgtctgtatatgtgtatgcatctctatgatttgcaaatcaaagcactttttttatctttgatgatgatggttgtttggtatggtttgaaattgggaagtgagggcattaaaggagatagggaagaagctagggaagaaagattgggacttcaacaaagatccatgtagtggtgaaggcacttggattgtaacaacttacacaaccaaagggtttgagagtaatatcacttgtgattgctcctttcttcctcaaaactcttcttgccacgtcattagaatgtaagtttcttcttcttcatcctgcttccctttcttatcttcctctttaattttacccatttatggaaattacaaatatctttagcgtgtcggtgccaagtcacgaatattggatttcacagtctgtaaaacaagtgtacgtaatacaagtatggagaatntcacagtttttatttttcggtttgtttgtgctaaaaataatttcacag

SEQ ID NO: 35984 - DNA, 936 bp, Arabidopsis thaliana landsberg
acacagtatcatgcaacaggaatcttcgcttatctgcagtgtacatctcatgagcccatattcatttctgtaaagcaacacctactctgcagctatgtctatcctattcccgagcgtatccatagctcacatctacacactatataaggctatttacaaacaaatgatacaactatatgttctcatataagccgaacctaatgcttcaagatattcaaggggggaaaatatcgagacagtatacaatggaaatcgataccacgtgcatgccaatctttagtagaagaagattcctagagtccaacaagaacatgcgcattttttcacgaaaggctggaaagtttaatatataatggtcgaaaaaataggcataatctatttaagtactagcttaagtgttttacgctagatctggtgttgacacttgtacacctggttttaaagttgcagagaaaactagattaatgctcaaattgtagtaagtagattggataatttacactcgaaaaaaacaagttttttcagaagaattagactgttgctcacttgagaaaaatctagctagctttgttaattgaggatagttagttatagtatttgaatgacattaaggtgtttgaatatcgcatgaattgtcgccttggtatttgggcaattaccggtcattattttgatctttgtgatgtcaactaatcgatcccaaccatatatatcataaactactgtctcttaattgatccattgtgtttttaattttatcattactttttttaactagttgagagaatgattatctaacccctttcatattcagaaaacttaggttttgagtttttgctttatttgctgctctcttgaattaatagagctctcgtatgcgattgactttgggtgatttttttttgttggaaagcaaatttcattgacgaatatact

SEQ ID NO: 35985 - DNA, 1226 bp, Arabidopsis thaliana landsberg
  unsure (1)..(1226): unsure at all n locations
aacctagttcgtggcaatgctcatatcccaaagttttatactatggttctcatttcaaccattggaagtcgggaccgctactcggtagatcttattccaaagtttggggaaaacacttccatcatgaaagattttaaagattgggggactgatttgtctcttcagatgtaatcttgtttctaagaaataatagcttttttagtttttattcctatcatgttcttcttttgtaacattatttataataataaaaatttgcttctttcaagtacttaagttaaacatcacctagaagcctttataatataaaatttttatttacgatgttagataatagtgtccagtataatctttataaattaatacctcgataaatatttacattatttttttaattactccgaatacgttttttggatcaaataatatattaataactttatactttcatcaaatatcatagcccaatgttattaatttatagaggtttgattgtatatgtacatatttatgatactgattcattatattttttcctctatgtcagtgtaagtgttgtataatgattcttcccacatattaaaaatacattaaaatttattaattttctatatacttttctttttcttattaatacattaaagtgataagataaatttggaactttgcctaaacttgaatatggaagatcttaaacaatactgaatataaaatggaggggtgtatcaatttataaaagctattactatgttataaatgttttcctcataatgttcatgaaggattaatctatatatatatatataataaatataattttatatcgatattattaaaattctaaataataataaataattttattaatatttgatttaatattttttcaaaccaaatttcaatcttacacattcaattttttatacactttatattccaagtgtattcagtgtcattaaatactacctattgaaaatctaatttaaatgtaaacataaactggtgtacgtaaaaaaatcaaacagtatagatttcaaaagaattatatttaattgagaaaaagtaaagtgcctacccgctctctggctctctgtcgcacaacttccttcgcacggcagccctccgtcgccttatgggctctccactgccttcccccggcactncgnnctnttacganaaaccctttaagacatcttagccttctcagacagtcacacatgtccgaa

SEQ ID NO: 35986 - DNA, 740 bp, Arabidopsis thaliana landsberg
gatgatcttgctcgataacctacaatccaatgaaatattatttgagaactcgaatatgctttttgctaaaaagaattttgccgacccaaaaagtagtagttcataaggaaagcttctcttcttcataatatatggaaaaagaaatttggtaacgtagctttttgataataataagaatttcaaaactacactagccaatcattcaaaaaagaaaatggtaattgatcaagtccaatttacgattttgttttacaaaattaattttaataaaaagatactaaaaaacactttgagtttgaagacacataaaaaagtgttgtggcgagaatccgtatcggatcaaaatcctcgtcatagcgggaaaacccagctagttgctgcgtcaccattaaaaaaaggacacgaccgtcaaatttacgaaaacaccttttgacatctcacgtgcgttgccctcactacaggggaattggttgtcattataatatctaattgccacgttctatatatggcagaggatctccaccgcacgagactctgatgtttgcaagataatctctgcataattgctgcgattactctgcaaagacacaacacaaaaagtgctttttttaatcagatatttgctgggctgcactttaactctcttcgtgcttggttttccgatcttagtcgttactaattgagtcggagactgttcatttcctgattctgaagaaagttttggagaaagagaagatgtc

SEQ ID NO: 35987 - DNA, 1413 bp, Arabidopsis thaliana landsberg
ctgtctctttcattctcacgtccctctcctcctttctcattttctctcatttattttacaaactttagtatctttaaccattttttgttatttaaaaataataatttcaaattattacagtataaaaacaaaagtgtacactataattgtctgatcgcctgcaaaaaaatgtctgaacatctaaaattaaaaaaccagtaaatctattggtcttttgtttatttcttttcacttattttaaaaaaatatttcctttaagtttataagtttgttattttcttcatcttcttcctcttcttctccataagccaaaactaaaaccctctttaatggcgagaggacccatctccaagaataaacagtaatcttcatttattgtcattacaaatttttttaagtccaaaaaaaatccccaaatcaaaaatcttttcttttttttaattacatgggcagatgaagagacaagggtccctataattttctctttagatcttcaaaacccaaacctcaatcatgttggtcactttttcttcttcttttataatctttgtagaaacaaaaatctatggtttttaacttttcatgtttattcagtctctccatcatcacacagctgagtgcttgattggctccacagacaaacagaaagtttgcatctttttttctgactcatttcaaccaaaaagctccggtaagcaaatctctcttatttatgtaagatatactcacttatttatgataaagattacatttttaggctaaaggaagtttcttttttcatgaatgactgaatgagaagtttttttcttataatgaaaatctcagtttagggtttagggggaaggaaaaaaaaggtaacccaaggaagtaaaattgacagttttgtatacaaaagaagcaatttttggacactatttgaagaattctctgtttttgttgttactatgtttgtaagatttttagtttaatgctaaaagataacattttttttttgtttttcaggtctttgagaaacggttttactagattgaagacgagagttttgaatgattggtgaatttgttgatcatcaatggagaagaagagatcaccaagaagtagtaagagtcctggacctgcaattttccctaaaagccctcttgtctacgagagttataagtctggttgtggttggaaattgataaagttcttcgaaggcgggcatgtcaaatctggtaataagagacttggttcagagaagaagaaattcgtcagagattctgctggttaatagtttttaaaatcagtgtttcttggataacatcaagataaagctaattggatttgtatccctttattagtaggtcatgtttatactaaaagccaactcgatttgcttaagaagcttcatgagaagtgtcagagtaatgatgc

SEQ ID NO: 35988 - DNA, 975 bp, Arabidopsis thaliana landsberg
actcagttggtgttcatggtggaattatcgagtacgttaatgtcgaatgtccacatatgataataatcttttttcttttataagtgataaaattttaccttccttctcattatccatggctttgttctttgatccattatctcaataatctgcatctttttacagtctttctggaaacaaaggactatgcggtgtaccatctcttccgacatgtccactattatgggagaatggccacttatccaaagggggtaaaatagccatagccatatcatgtatggtgtttcttattctggttttcttggtcatttacttgtgttgcatctggagaggaagacatgattatgactttgcccctcctcacgatttaacatgtgagtaaaattacccaacttagtcatagttgaagaagatttaaggacattctcgaatctagatatctctctttgtatgtgtggcgcagcgctagcagcaaagagaaacagataccagaggcaaaagcacgcgacgccaccggaaagggagagccaacacgcgaaaggaatgcccacgcttccactgaattcgcaatagccgagaaagagaaataggaagagatttgacttggacagagcaaggagatgagatgaggattagaggtttgtcatgtgtaattagtatacgaagcattactcctcaagaagaccacagataacataaaagaagggcaatggatcaaaagagtgtgcaaatattccccaaagaagtaagagagcttccttcattgttatttcatttttttttttgggtctctcttagatatatgatatgttattattaattgataaaacattcttacttacgccctctcccatgtatctctgctgcaatgtagcatacacattattgttcacttttgtttttgagaataatgaatggattaaccaaacttgtctctataatgaaatatttatgttctagtttcatttccatctg

SEQ ID NO: 35989 - DNA, 2242 bp, Arabidopsis thaliana landsberg
taaaatctttggccatttggtcggaatttgtgaacacgacttctcaattccaagagagttaaaagaaaaaccacacttgagaaagtccaataagcataggcaaatttaaatatccaaattatcatttcacgtataacaaggagagaccaaatgatagaatggcccaccaaaatttcaattatttttgagacttaatcatcattttggtcacaagatatacaaaatactctcctggatttttatcatgagtcattccacacactaagctttatatcttttgacttgccgacaatggcctccattactctccgtcggagagacgccgtgttattgacggccatgttggcgactgaaaccggaaatgtggctatgaatactttgtttaaagcagcgacttcaaaaggccttaattcttataccttcctcatctattcttatctcattggctctattgttcttcttccttctcacatcttctcttataggtttctaaataacaatctttttgttagttaataaaccctgtttgattgattcttgttttgtcaaaagttttcatttgattacttgtgcattcttttgcaggtcaagataacttccttcactaagtctttcaattctctgtaaaattggagttcttgggctgctagggtaaagccaactacacttcttgttcttcttcaacttttgaatgtaattattttcctaattgttggtaaagaaatttttattaacctgaaaatgtttctaatatactttactttttgctaaatgtgaatataatgaacagatcaatgtatgtgatcacaggaggcataggcatcgaatacagcagcccaaccttagcctccgccataaacaatatcactcctgctcttaccttcatcctcgccattatcttcaggtttttgttttctttgactaattattaagtttttgctgatttcaattttagtttttcggattattctagtcaacaagtcgaaattgtaaccattccatttccggctaatttaattttaataattataatagttttttatgttaaccgaaattaattaaactcaaaagaactaatcccgaaagatattgtttacatatgtgatgaagccgttcgctatgaatttttcgtgcattataataaagttctttagaataattacttcaaagttcccctataattttttcaattcgactatttttttttccataaatcatgttagttttcacttcactatattcaacactatagtttgctaaccaattctttaccactagccgccttacccctatcccacaactgtctcatactcttatcagtaactaggtaaataatctatatttatggtaaatgcgtttaatatgttcttctttctttctttcaatgcatacattaattcaggttttcggcatctatatttatggcaattgatatgaagatttaagttactatcgcactattgctcaatcttgtggtccaaatcatacaaggctgtttgcatgaatgaaataaatgcgtattaattgtgtttgatcattgattatttcttagccttcttttggaataaacacttaacacactaaatttcattttgtgaataaagaatggaaaaagtatctttcaaagagaggagtagtctagccaaattgatggggacgatattgtcactgataggtgcacttgtggtgattttctaccacggtccacgtgttttcctcgcatcttctccgccctatgtaaacttccgtcagttttctccaccgttgtcatcttcaaactccgattggctcatcggtggagctcttctaaccatgcaaggcatattcgtttctgtttctttcattcttcaggtaccaattttttttccttatatatagtagaaataattttaaatttatggttaagtcaaaaattagtcattaaaaaaggtggaaacatacgaacacatggtttagagtagacctaggcgttcagatatttggttcggttctagttcggttccaattctttcggctctcgagtttaggattcatataggaactaaaacagttttggtttggtttgggttcgggttcggttttttcggttctgaagtttaattaggacccattcggatattttatttcagatattttttagtattttcggatattttcgagtatttttggatattatggtatttttatatatttttcaactatattttcggtatttttgaatgttcaatctaaaaataactaa

SEQ ID NO: 35990 - DNA, 1660 bp, Arabidopsis thaliana landsberg
aactatcttcaagtgaattgttagtgtttgcaatgatctgcttgcattagccactaggataacaagaagaatgggaactaagaactctgaacatagcacagtatagggatgttgcaagaagaacttaaatttctacaaacagtaacacaactggagttcaagttccagataaaagaaacaaaaatacaaatctttcgattagaattgagatgatagttctaatccagtttccagttaagcttgagtcaaacaagaatcatgtctcctggagattttgtggctgatcaagcaacgctatagcttctccatttacatcagaatcatcaaattgttctatctcctgaagcttttgtggctgctcaagaaacaccggagcttctccatttacaacagaatcagcaaatggttcagtaggtgcaggcccatcaccaagagtctgctcattctcaggatgaaagttgatagggaacttagttactctaggtttgtctgtgagtatgttcctttggaccttatcaatcaaaaccttggtaggaggctcttccctgagctgttcatcatcatagtcattgttcacataatagccaactcttataaactcttgatccatgtatgagcaagtcaacaataacacagtaacaccaataatatcttcctcacgaatctttaacggatctggagagtcagcctatcatttaatcaaacaaaaagtttagactaagattatgtacctaaaccaccagaaacaaagagagaagaataaaactaatcatacactacctgcaacacaaatcgatagttcccaacgttaacaggaccaacaagaacactttccaaaacttgatcatacgtttcgtcttcagctgaccctacgtatataagcttccattccaaatctgtagcaaaaccaaagaaacgttatctcacacatcaggcttaccagaatgtgatcatgactagaaatcacgaaaatttacaaagcacagaaacttaaccagttggtataggcaaaacggttttacgcttttattgcagaaggataagcaacacacacataatgatatctagaacaataattctctgccatgatcaagaaccgataacttgcaactagtaatgtgtgaaattacagtacatagccactgagccagaggtcaaatctcaattgagagccaacacattcgaaagataagccatacaaaataaccattcacagaaaatctttccttttagagcaaagacaaggctcctaaataccacatctacaatgttgaatacgaacaattgcagacatataaccaacttctaagccaaagagagtacactaagctcgagacagatcgtgtgtgagctgatacaaatgcaagaaaaccctaacacagtgaagtcaattagctacaaatcatactttaaaaccccaaaaattgaatcttttgtagcattattcacatatccaatcacaggttcttcattcttcaatcggttccgatgaatattataacaaaatcgaaaattaatcaacatagtatcaatttttcgaaagatagaggatcagggaaagtaaaaggtaccgtctttgagagaggtcaagcattcgtaagaaatctcgacctggaatggattcacaaacggagcaggattgtccaagacggtgacgtta

SEQ ID NO: 35991 - DNA, 794 bp, Arabidopsis thaliana landsberg
acccaaaacatcgatagatgtactcgttttcccattgacgtaactggcctgatgatgataatcttcttcgaaaaccatttctggccacaccaatgacaagtcattctccgtggacgaaccatgatgacgatgaggattgtcttcttcctccttcattgaggtagttaaactaggactcttgtgatcttcggaatccatgaagatctcatcatgatggtcacaagtcttgctcttgggagtttctgcgttggtgttacacgtgtggtttcctatgtatgtgatactgaacatcttgggttcgaggtcaaccttctgcacttgcttgttgccttgcacccttgggtatacttgtgtgtgcatctaaagtaacttctgcacaacataaattaaaataaaataatttaggccaaaatatatatgcctcaagcccacaaccaattaagctcagaccacatttatggtagatataattgcggtccatgtgtaataatacccggcaacatgtcacatatcagatcggaatatatatagtcaaagtctatataggggtaaaaaggaccttgggaatttggcattaagaatctccttttgtccatatttcctccaagaaaatgcgtcctcaagtatagtcgactctatagtacacgtctccgatctctttctgctcataatattaatgaaatcaattaatcatttggctacttatgattcttgcaaccaaagctaaatgtcttgtttgtttgtgactaaccataaaagtaactaaatcctacatgatagtttttttcatgaag

SEQ ID NO: 35992 - DNA, 3827 bp, Arabidopsis thaliana landsberg
ggacaaaacagcgtccgaaccaggttttatttctatatgcaatatctccgcctctaccatcattctcctgcaacacgaatcataacagtattctaacattagttcatccaaatacgcctaaaggaaagattcttctagttctagattccgatatgtagagagggagatagagaagaggaacatacccagaagcatcatagacatttctagttatccgcatcttcttcaccacacctttatacagatcctccaaactcacaggcaatggattctccatagctggaactttcctcatctcaccgctataaccattggcaccaccggtgttgaaatgaccattcctaaacgctctgtttcctctcccaccagcattattgcttcctccaccattttcagatccaaagaactcagcatagatgtcctccgcgtctctagggttaaaacgaaacgacgaagcgttaggcggatgctgcggcctgtgctgatgaaagtgaggatatctcgaggaggaagaagaagaagaagaagaagcctccgatgaagaagaattagggattttgccagatttaagaccttcctcgccgtaaagatcgtagatctgacgtttctgaggatcagagagaacatcgtaagcttcggagatccgtttgaatttggcttcagcttcgtctcgacgcgtcgatggattcttatcggcatgccaactcatggcgagacgcttgtaagctttcttgagatcatcctccgtcgcgttgtgattcacctttagtatattgtagtaatctacacccatcttaatcacggaatgaatgaatcagattcacgaatctgaggttttcgccggcggttgatgatgattggccgtcgccggagaaaatgggggaaaatgcgaaacagaagcgtgggagactagggaagagggaaggctgtttccaccgttacgttaaacaaaagagtaattattattattttgttacccaattctctctttttatctgtttttggcttattttcacattcttaattttatatatatggaaaagtttctgattttttttttacatttttgtattcttcagtcttattctattttagttttctctctttccatcttatttatattttccaaatttgttttacaatatcataatcataattataattacaaaactacatagcatgttacctttttttttattttgtaaacatataacgtgttaattttagtctttagacaaaccaatgctgtaagaaacagacatgcgaataaacaagaaaaagaggattccattctttaacatgtccatgattattaacttgctctcggacacacaacatctgactgtattgacttaatttgagacccacaaaacttcaattttcaaatgggcctaaaatgatataataggcccataatcatcgaagtccatgaagcaaatgtatctctcattaaaattttcttaagagataacattagataggtcataggtgcctcagaagtaaagaaaaaaaaattgtgatacatcaataaaaagcttgattagtcaaaaagagacataggaaccacaagactagtcgtgagaaccggaacgatgaagagaaggattttgttgaaatggatcagacggtggtcctaatcagtttgaaatgttgattattggactgattagaagaagtagatgaagacagtttcatgttgtcatatctttgtgaaaatataaagaaaaaaagagttatagaatcctatatatatgttttatctttcatactatatggatgcatttggaagaaaaatgcaacaaaacgagataagttttcaatagcatgcatgcatgaatgatatattatgataatatattgcgaagaacgaatgtgggacttttagaggaagtgagattgcatataattatttatattcattattaatatgacgtaaaatcaattacacaataacttctttaccttattggcatttttccgtagaacaaacattacatggtcgatgatgtacccgtataaaaaaaaaaatcttttcagatatatatgtttcacttatatctcttcatataaattgattagatctcgcgattctactgattccatcaatttttctactaatctcacaatttgaaggtttcaagatagatacaatgtcaagacctcaaaagtatagatttttaagaataaaagaaagaaagatagaaaaagaaaattcatggaaagatttattgctctagagagtacggacgggtaccgtacggaactagacaactactagtaccttttcaatttatttattttaaagaatgaagacaacaaagatgacgatatcgtgtggggtattgactactgagaatcgttgttttgtttttccattcaaaaccattctgacacctaagtccaacacacgtgacacgtgacacatcctctcggtggttcctaccctaatggcacatgaccttccctctccgcggccccggaaccgggatccacatcttatctttattaacatgtttaattagtccctcaacgactcttttaattttaatctcaattcggatcctatttctttaataatagaaaacgatacaacgtttttgaaagatagataagttgtaatcaatatcaaaataattaaaaacagtaaaaagtaacaatacgaaaaatgaaagaaaaaaaattataacgtttttgaaattggtagttaaacggtaaatctcgtattgcagtaatataaagtgaccaatgggagtttatatgtttgacaatttgttttttgagattaagatactggtttattggtaaggtttagttatgtatggttgagctaaaaataataaactcatatttaaaaaaagaaaagaatttagcataaaataaaatcttctgatagtcgaactgaagctaaagaggggtgacaaaccatacttgaccaattataaatctaactaaaggtatgtcacttcttaaaaagcaaaccgtataaaattttcggaaaatattaatttgtacaagtgtgcttaacattactaaaaacattaacaaaatttaaaattttacggactctacaaaattaaagtgatgatacaaataacatggtgtaacttatctatcaatccattccaaaatgtaatatcatttacgtgcacgtaacctattatagcttctaggtaatccctcaaagagtggctcctcccataattagtcccttagtatggatgagcgtatgatgagtatgacgaataagaaaccttagttaattggtttgattatgctctaattatcttttcttgcacgcttctttatctcttgacccattcacaaagattagttaattagtcagagaaattaaaatatatatattttttaagaaactgtgtacatatatatcttctttttacttcattgatctttggtcaaatattgttgactgaatgctaagtaccgatagaggataattatgattctcaatttctcatcatatatagtaataaactatcaatatctctttacaacttggccttaaaacgctaaaaagcttttggattttgtctttggagtcttttggatcattttggataaaagatgcggccaaataaaaaaaggaaatcagagatataagatttgatatgtaatacaatttttaacaaatagagaaaacaattaagtagttaaaacaccttaccaaaaaaaaaattaagtagttaaaacaatacaatatagtggatcaaaggagagttacaggaaaaatttccgagtaattttataaatcgtttttgtatcaattacattagatgcagtatatctcgtatcatagtaataaggat

SEQ ID NO: 35993 - DNA, 386 bp, Arabidopsis thaliana landsberg
  unsure (1)..(386): unsure at all n locations
accgaaatcatgtcaaaccgaaccaaatatcaaagtttttgtaaacccaaaataccgaataaattacaccgaaaccaaaccgtaaaccggattgtcttcacctaaattacttatattataaatactacaaagagattatatgggaataggtaaaggataattaatttgataattanattttttgaaagaacaaattntgagaaaaaaaaaaaagataggcttgagagctgtgaatgagctgtttntntttaatttatattgcaanctntttttttttgcacacaaacataacacaaaacctgcttctctgcctcatatctgcatatccgaaaaatactcttataacattggattattatacaatctacatttcccattttaccctg

SEQ ID NO: 35994 - DNA, 3249 bp, Arabidopsis thaliana landsberg
gaggacttatttttattgtccaggcaaggaaatatcatttcgcagaattaggcaaacgttaggtacaaaagtattatacaaagctttgttcgttttggtcgctgagtctggtccaaatgccaaaccagtagcgacacttacaaccaccaattgtaaactacaacgagttaggtttccaagtcgtagatcgtggtagcttcaaagccattgaggctgttgggacgaatccaagtaggcgacatcgctgcaaactgtgatttcagattctgagcagatgatttccgcattctgaagtgtgaatccgtgcattatgggcaacgggaatcccttttctaggtggtcatttgcatatggcacaaacactgtttgtataacagtccacactattggctagaagatcggaacaagataaagaaacacgtgtgaatgctaagaatgaaagaaacaaacatgcgagtgctttaaacacttgacatgatggttttacctgaagaagatgcagatggagatttccaatgttgctccatttcaaagacatggagaaatcttctaaacttacgctgcctccaaggttattgcccatgactctgagagcaccagatccccggatcatctgcagccaaggaaacagtgaatcatctattggtaaaccgacatcactgcaaatttgcttatagtaagtaactaaaacaaaagatatggagcattgtcattggaggactcaccaaggagatgcaagctacaggtattacttggtttgcatctagaacattgattactaggtctgcattaacattagctccaacgtattgctctgatatctttacaagcggaggtgaggacaaactgatgttcagattcatatcctggttcgggtatttcttgtatagttgtggaatgatgaacctccacctagcagtgtttaaaagagactgctctggtattttatccacaacccattgcacaaagtctgcctgaatatggcaagagtgaacatcctcatattagaaacaacggtggaaaacagtaatattgatgtatcggaaacatatagaacagttttatcaagagcattctttctagttggaacctaaggaattaggaaattaggaacttacattatagtacaaagctgcagcagagttaaaaacagcttcgtcaactgaaattccgagcattttagaatttccagggcagataactaaagatacagactttttgaagaaggattttaagacttgatttgtttctcctttggtgaacaagccatcaatctcaaaagtgatagatgaatttctcaattaggatcactggtgaaagtgacattaaggtcagcattatcatccactgggatttcctttgaaaggctttgtaggaatgaatcaaggtctgatactccttccgtgtttttcttggcaatggtactttccacacttgacccaatttggtctttaaatgcattaaccatcctgaattgcagagaagagaatgaagtttaaaatgaaaaacaaaccaacacctgtcttgcaataagagggagtggatctatcatcaataagcaaattatttcgtacccctgataaaaccatgatgctcctccttccaactcaatggtaatgtcttccacatggcatccacattccgaaagagaaagttttaagcctccttcatcacttttcaagcctagagagagcccgatttccatgccttgaaccttaccgagaaggcgagaatcagcactcatcaaattccctttgtaaaacagatataaaaatgagcagatcacagcaacaactaaaaccaacacatggaaatggtaaacagagagcaacagtcacctctgattcccatatgcaactatgttctaagacatataacaatcacgaaacataaggatacaaaacagaacagaaatttgtgattcgcaagaaaaatcttgtctttccattgattcacaagattgagatgatcaaaactaagaattagtaaaattgatcataattacctgaacagatgcaataccctgatcagatatttcaataggaggaagccaagtactgtaagaataatgccaattcatactcaaattacaagtcgtccctgaagcgacgatgacaacacctgtctcaccaagcttaacataagatgacgcaacgtcaagctcgtatatcgtgagattcgagacaacaacatcgattcctccaaggaacgggattttcatagatttctcaattctgggaatctggagaggtataatcgacgcgatagctttgttaactagaagatttttgacgaaatcgagtccgttttgagatacgagaaccgatgtgaatgaatcggtgctctgcgtttgtgaaggcaagaagaagaaacttggtaatagaagaaagagaaagcatcgtccaacatccatggcggatattcaaagctttttttgttttggtctctctatcttcttcgatgaagaaaacaggttaatacagtgaagttgcgtaatggtttggattattgagaaatgtctaaaataaccttagtcattcgatttgcattgccttctggggtaatctgattcaaaaggaagtgtttggggtgaatacataaattgttaaaatattaatgtttctggtcaatcaaagctaaagctgaggtctatagggcaataaaagtataaatacatatgtaattgtatatactgtacatattaacgtttgatatgtatataagctcaagtggtgttaaatattctaatatgtgtctaaggacaatagttcgattaaaattggaagcttcgggggtaagaacataagttttgaaaagtatttatctttgtggtaaatcaaagctaaaattgaggtctaaagggcaaaagggtgtcataattggtctctcgcggtggcttggcgacacggaacagagaattaatcgagaatctttttcagcttgtaaccggaattcatggcgatgcaagccggtgttcagacctctaaggtccttatcctactcggcgcaggtctctttctcactttgatgcttggtctattatctttgcttgttgtaatcaaattcgattcgtattgctttgactctctaatctagggaattggtttatgaagagttagggtttgaatctatcttggcaaattgattgatcactttgctaaaatggtccagaacttctaatcttcaattcgtagtgtaattttgatggtaatacagcttggatgtagccagaatgatttagttattcta

SEQ ID NO: 35995 - DNA, 328 bp, Arabidopsis thaliana landsberg
tacctgatgattttgttgggcatccttgccctacttgtgtttggtttctgcctcttctggggcgtaaagaggaagcagcataaggaaatcaagctcgagctggcctgaagattgcaattttttgattcgttttattatccctcctgtttgatttcatgatttttctgtttctttaaatttgtgacatcttgtgtgaacttctttaagattatgtttttattttgggattatgaatctattttcggattatgtttttatcaacctagatatgtttcaaaaagagaaattttttttttgtgtgtgacttgatttttttttttttttaatt

SEQ ID NO: 35996 - DNA, 1321 bp, Arabidopsis thaliana landsberg
tcatcattagtaccaaatgtcaaaaatgcagacacttattgtgctaatcaataatcaagattctaaagcattcaggaagaaaatcgctaaccttctctctcatcatttgtgagagataacaccatttgctcgtgcattagcaaattgccattgcagcaacctactgtataatagccttaacaagtgagcatcagcaaccccattatctctgatcttctctttaccatccacagcaaaattcggaatcaaaggtgtgtttttactcagcgagcttctcactcttagtggactcattctatctgaaggactaacccctctcgaggggctcaaacctctagcaatgctagttcctctcggatttgacaaagctgcattcataccaaatttactaggtgaagcaggtcgaatctgctcactttttggaaacaattggcttccttttggggacaatacaggaccatccacagatatcttcctcagtccatgcgagctaggctcgaaccgatcctgcgaccgcgattgcaaaactctggccttaaccacattgccaagagctgataacattttccctcttccattagagcttccagaagaaacactctctgtctctagatcaacactcgttatccgctcacgcgaaaccggtctattactaaccatggaatgctgcagagctctagctacaccattgccagatccgatcagtttcttcctagtatcagtgaaatctacacttctacttaaacaactaggttgcagagacctaggccattgatcagagagtttcaatttctcttgtttacctccaccactcttagatattgttgccgaagaagtcgtcttcctcctctctaatgttcctggagtaaacgaatccgcctgaaacgacgcaaacaagcttctcccagaagtcaacaacatcctctccgctttagaaacttctcgtcggtctaaagactcacgacgtggtgttgattgcggccgattagtagcaacagacgacggagtcaccggtcgagtaacgatcggagattgacatctcttcggtgatgattggtggaagaaagaagaagtaccgccaaggtatcgcgatgctacatctcgtgtttttgggcggcgatttgatgattccgatggaaacgacggtggtttgttctgtttagcgtttgcgttgaaagaaggtgaaactgttgcagctgtcatctccgacattgagaaagcaacattgcctcgttgtgaatgtgagcaaggagagattgtatagagaaacggattcgagagatttccggcgaaactttgtaattagtataaatctccggcg

SEQ ID NO: 35997 - DNA, 868 bp, Arabidopsis thaliana landsberg
tatattttaaccagtaaaatcaaacatagtaattgatattgaataatatccggatataggagttgtacatacagaaaatcaaaaatattaattattatatattcttaatcgattaaataaattaaatttttattcttaaaagaacaaaatcgtcatgcaatacatcgcgggttaaaatctagtctttctatattctcgttatactctgcaactaaatatattttctatcattctaagaagtttaaactaccagaaatctttgtgccacttatcataccagaaagaagtagcatgtccatttcccactgccaccttacaaagcttgtctatctcccttatgcatgcacgaggtagtctacaagctgcaagccaaaaattgcatatgctccacaaaacccaactgatcagatttaaacgtccagcaaaagaaagaaatcgggacgtccaggattcaattttccttgtaatcttttataacaggggaagacagtcagatgccgtgaatcgcttagtgaccagagggagtccgagatacctcactggtaactgaccaacttcgaaagggaacctttgggttatctcatggtggactgattcttgtattcccgccaaatacaaagtagacttttccatgcttatttttagtcgtgataatttttgcaaaatcgtttaacacatgaactattccttctattgatatgacctttccatcggataggatcttaaggtcatcagcaaagctcaagtgagttaagccaagacttccacatttcagatggtaaccaaattgtctagcacctaaagctttatccaacattttagagagaacatccatactaatgacgaataagtatggagagagagagct

SEQ ID NO: 35998 - DNA, 532 bp, Arabidopsis thaliana landsberg
  unsure (1)..(532): unsure at all n locations
cccaccaaggagcacgcgggcccgctaggggcacgaccgctgggcgagcgagccaccgggcgtgcgcagggagcgggcacggccgccaggcaaggcgacccgctggggagcgggcccgggcgcggaccgccggggaggggcgagctgccggggaggggaggcatggggccacgggacgcgcgcgcaggggaaaagagagggacgcacagggagggagaaggaagngagaagaggaagggagagggaggggagaagagctcaccttggggtccaaatccggcaatcaccgtctccaaaacctagggcacaatggggaagagagagaggtggaggagaggaagttgttgcgtgggaaaaattgaatgagaggaaagggagagaagggaggggggcgcgcggccggggccgggccgggctaggtcgggctgggtcgcgtcgcgggtcgaaatcccacgacacgcacaaccactgatcggaatccactcgtgaatcgaaatccaaaacaagacaagacgaacacgcgattaaacac

SEQ ID NO: 35999 - DNA, 894 bp, Arabidopsis thaliana landsberg
  unsure (1)..(894): unsure at all n locations
aaccattctaacaaaaagaattcaaacaatcatcattatcataaataactttgctactaatagagggccaccacttgcaaatttacctttttatctaccaatttattgttatttatttatcttttcttgacttttaagattaatgatggatgggatcattgactttgcaatgattataattttaggcccaaaatcacttcaaatattctcttttacactcctttgcgctttattcttttcccttttaatatattttttgaataaatactttttaatatattataaagatatataagactttatattaattatggagattattacggattttgtcattttccttacaaaatttacgaatttgccagttttattatttgaataggttaaatttacgatttgtttttgctaaaatacatactttataacaaatactaaattttaaaaacaaaagtaaccaactaaactcaaacatcacatgtgaaacgctttgtcaatcctatttttatagcttaaagacaaatccacaaaattttagtgaaagtggcaaattcacaaatgatactccaaacaatgacaaattttatcatttttctaaatctattttttcttttcattaactgtattatttcccccattatttcgtctcatttgtgttccactgcagatttacctaaattaaatttatttaatgtccggaaaacgccataacctaacacgcgtacggcaaagaaatgagtaatggattatttcacaattcataaaagttaataaggtttcattatttaaagttaaagcaaaagtataaatagtttagacgttgtcgtatatagaaagcaccnaaacttgaaagctaaaagtaaaagctgagccaaaatgtaaaaagaatgtttaacg

SEQ ID NO: 36000 - DNA, 3053 bp, Arabidopsis thaliana landsberg
  unsure (1)..(3053): unsure at all n locations
aaaagaacttaaaaagttgttttttggcttttcggtattgaccaaaaacggaaattaagtactcactttataagcgttttcggggatagaaacgtagactgcatgctgttttttcttagaaaacgacaaaatatcatttagggcttttacaaaaagcccgactagattatgaagcctttttaattaagcccaacttcaattagggtttcttcttttcttgttctataacctaatgagtcgcgaaaagtttctgaacgtcccttgtatcaacttgaaacacaatgaggacgacaatgtcaaatcttccaaaggaactggtagaggaaattgtctctagggttcctttacaatgtttgagagcaatgcgattaacttgcaaaaactggaatgctttgttagaaagccagagctttaagaagatgcacatacggaaagaagaagaagcagcaagggaattaggagagaatcgaatgattgtgatgatggattacaacgtttatttaatgggcatcatcgtcaacgaaaacctatccataaagtctctaggtaaacttacttgcctacatggttctaaacaagtcaagatatctcaagtctttcattgtgagggtttattattatgcatcttaaaagacgatgatactaagattgtggttttgaatccgtatttggggcaaacaaggtggatccaaaccagaaagtatcaccgtacaagtgaatgggaaggacgagatgtttataactatgctctcggatacgaaactaacagtggaacccggagccccaaaatcttgaggtttatagatgatttccatcaccaccccgaaaaccccgctttacgatatgaagtctacgattttgactctgatttatggactactcttgatgtcactccacattggcgtatagcgttttgtaacactggcgtttcttttaagggaaacacttactggtgtgctgcagaaaggaacgtagatgtagatgaagtcttagctaatcgcttaatctgttttgattttacaagtgagagatttggtcctcttctgcctctgccgtttagtggtgggcatcatgactatacgactttgtcttgtgttagagaagagaagcttgcggttttacttcagcacgatgaatcaaatccatatgagcttgacttatggattacgaccaagattgagactggagaggttttgtggagcaagttcttgagagtggcaacagctggatttaatagttatgttccttttataagtgaaagtttcttcattgacgaggagaagaaagtcgcctttggttttgatggacgtaaccgcgagagagttattgtcattggagaggctggatacttgaggggattggatctcgttggagattttggagaccaagaatgtaggactgatctgtgctcttatgttccaagtttagtacaaatcaagcaacctgaaggaggggaatcgaaacaacaaagcgatttagaaaagtgtcgatatgatgaaaacatgttgaggcttgtctcactctaagcgacaaatcaatgagctttgataggaggaaggaaaaaggagccaacgagatgatattactctattattacgcagaaacagagcttttatttcaagtcttgagttaatgaaactgaagattaagatcatgttcatggttcattcttatctttcttcatcgataatgagctagtcgctcaatctttttcttctggaacttagcttagtgtaccttaaaatgcaatattagagtctcatgaagtcaattgggaacgtatacgaatcgaaagagagaacttctgtaatcaaccactcgtactctcaatcttgtttcgtaagaaaatgtgaaaagaatataaagaagtgaacaaatttattcctgtttcttacaagcttagagcaatcataatacataacgattgtaaaacagtacagagaaaagttcttgtcatatttttacatacttaatctgaagttttcttgtttttttttgtttaaggttgagaagaaatcaacagagacacaagcaaagaagcaacgattgtaaacattaaaattccaatatgattcactccgttactcatcactacttggttttctgtatgtacaacagagataataatcatagctatggactatggttcaagcttcatctgaagcgttggctcagaacctgcaacataaagatacgagactttaacaacataagagatagttctatagtttcgatagacgaatttgcttctaatttttcttacagttgttgttgttgttgttgctctgttgctggaggatatctccaaaacccatctgaacaatgctttgcaggtcattattttcccagaatcctggtgtctataatgaatcaaaaacataaaaggatcgagtttacgatacgcacaaacgagtttttctagaatctgacgttagctactactaaaactacctcagtgtgaacaaatccatcgtttgaggggaattgtgtgtctgagaatcttggcatgttcttgccaagtgaatagtatgctgatggaagtctttgctctgagcaagccattgcgtaaagagactgcgttaacgactcccccggttgaatcatctacacatacaaatacacacattatagatacaaaacattccataatctgaccattccattatagatacaaagcagaatcttacctctgtggataaagaagcattagcattaaactccatccttggatttacggtagccagcttcatggacaagaactaaagaaacaaaccacgagttttagattcaagatatattcaaactccaactttcaagaacatttatgaaatacacaattcatacctcaacttgtctttgcaatgattgtacatagtttataatttcatcaagcatcagtgcttttccagtaacctttcattgtataaacaaagaaaacaaagacattaatgttctaattataataatcaacactntaggttataacggaaaataatcagtgataatcatattcttaaaaatataaaaataaaagtctcaccttattgcatcca

SEQ ID NO: 36001 - DNA, 855 bp, Arabidopsis thaliana landsberg
tggtgccggagttcctgcccgtactggacaggatcaagaccttgacaaccggtggtctgacgtcgatgcacgtggtcggcgacttcctgaagcgccggatcatgtcgctgcagaggagggcgtgcctgtgttgctggttcactggcccgaacgacatcagccgaatccagagcgggccgggtaccgacctatcctgggaggagctggaactcctggtgaaggggattactagtgattccttcgtccctgagtccctaatcctccccagagcatcactgcgctctgcgacgacctagggttgaggacggcgatcttggccatgctgccaacccagggttgagagcgtcgtggcggttcgcagaccggcggccgggacccccactgcgggatccggatctccgatgcgctggctgttggcccctagcctgctagcgtggctcccagcgcccccactgcggccccccgccccttggacaagggcaaaggggctgcaagtagctcctccaccctaggcgacgctaggatgtcggaggtgtagaggagacgtcgggtgcatcgtgccgacatatcgtttgttttggacccccccacccccacccgctggggccgaggaggccggctcccaaaagctttaaaggactgctagcggggccgaggagtctggctcccaggcccagggcacgcagaggcgcgccagtcctccgccaccacagccattgggtctgctgccaccacaaccaccaccaccgtcgggctcgtcgccgccaacagcacctagggatggtctccccataggtgtaccagcagcagcagcaacagcagcagcagtagaaactacggtcgccccacttccag

SEQ ID NO: 36002 - DNA, 876 bp, Arabidopsis thaliana landsberg
  unsure (1)..(876): unsure at all n locations
caaaagattcttgtgaagaaacaaactgaaaactcatcagcttatattattaggctaaagctagtgttatgtctgtaaaaaagatgcatatatataaatagagctgaataaaattacaacaatgacaatcacctgcctttcccattggcgacttcacatctttattttactcagaagagtcacattcatcatcaaacatggctgatgacaacagtccctgtacaaactcacacttctttgccttctccaatttatcactatccgataaaggacacgacgatgtaccctcttttgctgctgacgaatccttaatcggattcttgtcttctacacttgaatcaggcagcacaagcttggtctgatttggtaatgcagaattgttgatgaacgataaaaattgatcggaaacatgtttagagggatgctgatgatgattcatacatgggggcaactcatcgcgatgaggatgttgatatttatcaaatcaatatcgatcttccctgtaagacatttccttccgctcactgtaaaattatcggtcacggaatttcaaataaatcacattcattatagcgaccgaaatttcacttgacaaggttctgaaaagaaacaacaaaggatatcttcaagacatctctatgatgggatgttatatcaaccaccatatgcatctgcacccttttgctacatacaggacatatctacaaaaaccacaaaacaaccaacacgaattgtaagatgatgctaccacatgacaattcacggaaccagattaataatgttccatcatactacttatatattcatttctttagctcngaagaccaatctatgcttcaaaacagagagctcaattcacctactctctatagcaag

SEQ ID NO: 36003 - DNA, 1409 bp, Arabidopsis thaliana landsberg
  unsure (1)..(1409): unsure at all n locations
tgatccctctgggttccttgaagaaaaaaacaccaattccattcatattcttcttcatacgttcaataattcttacgaggacgagatcttcctaacgtctttgatcttcttcattaggttcatttgcatttgttaaacgcttaaaaatggatctattcgtctgatatatatatgattgttgaatcggttttgttatgattgtaacaggagataagtctaaactggtcgaagatgttgggagatttcatcatcagactccttgtgtatgtcctaaccatatctctttttttcttttgattaattaatcatgtatattgatgtatatatataattgaaatggtgagaatggccgatctgatattagggtacacatacccagcattcgaatgctttaaaacggtggagaaaaacaaagttgatatcgaggaactcagattttggtgccaatactggtattgaattatttatatatgatccccttttttctatcctcgatacttttaaacattcatatataatgtgtagcgtatgtagtagatttgtagtgataggcaaatcgattatagtacgatcatagtgatatacttttctctgttatgggtttttgtttgactataaaagagaaaaaaatcaaaagtccgttaagttgatgtcttctgctacaaaaaccatttatgaatacaccttatcttttgtacaagtctttggttacgaacgttgattatatacctagtctggggattactgagacaatggtattaggtttattttaaagatatctgaatatatgngatgcacgtaattctaatatgatagttcattgtcaatatgaactcgaaaatattaatttactaaacatttgtctttgaataattaggatacttttggcgctaatttcatcattcgagagggttggcgatttttttatctcatggtaagtaagttttattattagttaattcatgccttaatccatctctgtcttaaaaaatattaccaatcatcaaataattaattgatatatgcaattattatttgcaggttaccgttatacggagagatgaaagtagtcttcttcgtatatctctggtaccctaaaacaaaggtaatataatttttccttttaaaaagtgattagttggatcataattaattagtggtttatggtgatgtacaaataataatagcgaaataaataatgaatgaagggaacgagacatgtgtatgaaacattgttgaagccatacatggctcaacacgagacagagattgacagaaagatcatggagttgcgagctcgagcttggggctttttcatgttttacttcaacaacttcccccaggtcctcttttgaattatctttcagtaacttatataggcaaattaatctttttaaaggtttgactaa

SEQ ID NO: 36004 - DNA, 3577 bp, Arabidopsis thaliana landsberg
  unsure (1)..(3577): unsure at all n locations
ctgtcctttatatttacttcctttagaccagcactagattccataaccttcgtcccttccattgatccaatctctttcatatcttccattaacgtaataattataaactccacatccgtaacacttccctctgtagaattcaccttggtaaaaatctccattgctaaagaattgaacctccttctttaacgacaagtctctgtttcttcttctttgatcggttccggttttgaatctccgatgtaccattgaaccggtttcggtttgtgtttgattcgagaccttacacgaatctgcttgattgcgattacggtttggttaataaccgccatgtttctcgacgcgaagaacagagcaagagcgacgaaaatcaaacctagtaagagattctccgacgtgaaaatctcatcaacgaagaacagtaagaaagatgagagactcaggaaagagagacaagcgagtgtgaatgcgagacccggtttaattcggttcattgacccgaatgatttaaccggttttctcctcctctgtttttcctctttctcaccggcttcgagatcttgttcacggcggtggtgagaggtttcgttgaagtcatcacattcagtgattgaagaaaggctttggatcgacgatcgaatcgtcggagatgatctgagtaacgacgattgagtcctcgtcagtttcttttggctcatctccgcggaaattattttttgcaaaaaacagaacaaagaaacaaaaaaaagctttgattttgaaggcttaagagtagaatcaccactttcgttctcgatttttccggccaaatcttaaacggtaatatgttaaccaccactgcaccaccgtgccaagcatcgcaaaacggagaagaagacgagcgatctctcaactccagcaatatcttgttcttatacgtcgtttttgttttccgataccggagagttttcacggcgaagctaaaaagaaggagaagaagaagaagaagctcactttgcttaggagagatcgagaaagagagagagaagctttgcgtcgggtttgggattattttaagagacaagaaaaaaggagttagatttaatattgaccgttagatgaaaatctgacggttgattaacgaaagcgtataacaatagccgttggatctgagttaaggaagaagaagtcacggtcttgacggggaatattaggagccggacgctttttagctttactgttgcaggccggcacgtgccgctacacacacatctattggtcacaattttttaatattaaacaaataaacataactttttcgttttacaaaatttaaaattttgctgaaaaaatctctgctttttgggggaattttctatattaatataacagttgaactggactttcaatagagtattttaaaattttaatccatattcatagtaagtatactttatatttattaatagaaaaagtgtgactatagactaaaataaaatcaacgattcatattgggaagaagatagttggtgaaaactgtaaagataggtaatctactaatcgacggtagagattaattacttgattcggaaacaaaaatatcaataaagataagaaacacaaaaaatgggttttgatccaatttgtgaataaaaacatatttaccaaacatcctcgcatggtgcactccgcattactaggcctcatatatatactttaaaaaaatgctcacatgggacaatattttatcaaatttccaatataatgtataataaatgtatatttattcatatataattatataccggaaaccgttaaatcggagccggacganaatgacattgtataatgttattttcaaaagatagaaaacgacaatcttaagctaatgacattagattaaaaatggttcttctagtatttgattgattaagctaacatcgctttcactgagatctaagttcttctgatgcattcaattactttatttaactttcggctttagaaaagataatccgaccactaaaatataataatttcatcaatttcagtctttcagagaatattcaaccttaatctattaatttactcattaaggacttttcaagattcaacaaaagactattattgcatttgataacgtaaactttactttattgatttgctttgctaaatcaaagtctctcccgaaatggaaccgaagaagaagttacacaactagataaaaataaggtatctttctaattcaaacttcagacttttctcttaagcttctgcttcatcctctcaattgcaccacgcaacgtctcttcgtctttacagaacgcaaacctaaccaaattcttcccttcttctggattcagataaaagacgctcgttgggatcgcaacgaccccaacttcttcaataagatactcacagaaagcaacatcgttctccattccaaatggagtgtgatcagcaaccacaaagtaagtcccgctcgatgggaacactgtaaatccgacttccttcaaacccttaaccagagtctcctttttcgcattgtaatctcttttcagctctttgaagtaagactctggtgccttgagagctgcaacggctgcccattgtgctggtgttgatgtggcgaatgtgaggtaagagtgtgcttgtcgaactccccaagtcagatgaggcggcgcaatcgcccagccgatcttccatccggttaaagagaaagtctttcccagggaattcatggtcacagttctttcatacataccgggaagagaagctatagaaatgtgatccatttcaaacgcaagcttatcgtatacttcatccgagaacacaagcacatcgttttcaatgcagagagatgcaatggtttcaagctcctccctagtgaacatcttcccggtcgggttgtgcggagtgttcataaggatggctcgagtcttgttagttaccgcagctttaaaatcataaaaagggatggagaagtccggtggacgtaaagtgattccttttactttagcaccagccatagagagtgttgcttcataggaatcataaaacggtgcaaagagaatgacttcatcaccagggtttattaaacccaacatagctgcagctatggcttctgtgcaaccagatgtaacagtaacttctttctcaggatcaacaacaagacccgtatcttcacgaaaccgcgcagctatagcagagttgagctgaggaatgccgtatccacgagcatactggtttttaccatctttaatagcttggatcgcagcttctttaacaaaatcaggaccgtcgaaattgggaaagccttggcctaaattgatcgctccatgtttaactgccaatatgctcatttgagtgaaaatagtagtcttgaacttctctaatctcttcgccacctaagtaatcaagtttggaaatatttagaagaacagagagaaaaaactttactgctaatatctcaaataccaaatccaaaattttcaaagtacaaatcttttatgcattgagatcaggacgtatgccaatgatgaccctaaagtcacaaacgagaagaatcannttatcgggttaaactctgcgatgctta

SEQ ID NO: 36005 - DNA, 973 bp, Arabidopsis thaliana landsberg
  unsure (1)..(973): unsure at all n locations
aaatttaacttgaaaagttgtccacatacacatacaggtacgaaaattttctatatatgttaacgatagccagttagccacaatactcaattattgtagtaattgagaactggtttaatcaaaattaacaatctatgtgattttggtttattcgattgtaagaaaaaaaaccgcctacctatataagagggtcttttgtaaacgttctcactaaaaggcttgtttttgcaacgtacgtatgtcaaaatacggatgtcaaatggactgtccatgttcaaatggatagccccattttttggacattattgggttaagcccaaataggaccaaccccaaaaggaactataataaattagacaattcatagatgtaaataatacatgatatcacgaacacatttattcaccactccatacttaaatcttaagggggtgttattgtttagtggattttaatagagttaaactctaacccaaatctaatgttattcattcattgattttaaatccattatttaaatcaactgttactagttcttatacttacaatatcttcattaaaagactttaaaattaagtgttattggttttcatatttctaatgtttattactagagtcttaattctaatgttattggttctcatattcacaatgattagttcaagtttcatgttattcatgtttgatagattttcacaaatacttttatttgaaaagatttgaatgaatctcaaactgatttcatgtgtaaattatagcaatcaaaatattgccttgtatcttgagattttcacaatcatacagtctcatgagaatattacatattgccttggaacttggccaaaaactttctttttccttccacatctaggttcacgtaaagtgtttcacacantgatacaattacctaacttcaatacttcataaacttaacataaggttaattcctcaagttaatatttaaaaccattgg

SEQ ID NO: 36006 - DNA, 822 bp, Arabidopsis thaliana landsberg
catctaaaaaaacgtaatgattactgaattagtggaattgtttcatttttatgcccagggggtaaaaagatggcgagaggaagtaccatatatgatatacacttttcttgcttacaacaaaaggagatgctatctttctttgaaaatccgaacaatctttcgctgtgtggcatgtctgactttatatatcctttcttgtttccctttcagggctacgaaaacgattggtgatgataagaaaagctatggattggctcgtattccgttaaaattacaaattgcaaaaaaggaaaaccaaaacacactaaagccggccgttaaggggaaagcatgaggcacaccactttgctttacttcaacaagccgtttttgtatggaatggaaaaagcaagcttactataaatacaccaatatagtgtatataaaagaccataattatacggttaaatattatgcgggataatataattagccacaaaattttgatagaaaactaacattgttaagaaaaatttgctaaataaacacatacgagattttatattttcgcgggtcgaactcgttaacttgttgaagaactcggtcgaaagtttaacaaaagaaaattttgctgaattacttatatactgattctgattttatcaaaggtccaacaatttgttatgtaaaaatgtatatatgaatctcgtagtgatttgaaaagagtgttatagggtaataactcctcggggattgagtttacgtaattagcaatgttttgaagtttagctttttttttttttttgaacggttgtttgctcacatatgctatgatttctttat

SEQ ID NO: 36007 - DNA, 1502 bp, Arabidopsis thaliana landsberg
ttcctcttttcttacgatgtaaatctcttttttttcctttaagtggtttttgttgttgttcatgagtatgcatagagatgccaattctctctttaaaaagattatgaacaacttccacctactagaaccggaggaacacaattttctttccttgcatacaaaacttacagataaagccatcatgttagtacacgttcgaaagtttcttctcatgccaataaaagttaccattaggttaataataatcggtcccaactcccaacatattaagctacagagacacattcgacagacaagaagcaaagtacagatgccaacttaaaccaaactaaagtcttaagacaacatgaataaatagaaagatcttttcctcagtaatttcttctcaccctcacatccatcatcattagggtttggagacaaagagaatcagctcctccggtttgatgaatgtaaacttgcaggtatccccaacaacaaggggatactctttaaccaaacattgccatccaccagagaaagctccataactccccagatacaccacattccaaaatttcttcccatttggatgatggactttgaatattgttttctcaaccggcatttgatccttaacagaacttcggatcctctacacactcaaaaaaagtttgattcacatatcagttttttttataaaaacaatcattgctcaatacagagattttgtttagagtgtttttatcttaccagattgtagagatatgctggctggaatacggccgtgaattctacagcagtagatgaagaggcacctgcctcatctcttcgggctctaaccactttctcggtccttttagattcttgggattcctcagctgccttcttcccaagtttgagcttccttccaacagattcagctgcggttgtccggccacgattacttgactcagacaccacctcttccttcttgtcatcttccccttgttctgttctgaatcttctaatacgacctgattcatcatcaatagtaaaaacgaatcagtttctttatcatctgttcattgtttcataatcagaaaagcaaatcttacttgaagatgccaagaaggctctaggttgtggaggttgcatcatctccttcccatcaactcacgggttgcttaaagatgttgacagtaaagttcatctctcctttgtgagtgaaggtaataaactcacgggttcccaaagtgttgtccctcacaaacttctcccatccagacttctccatgtagtaaaatgtcgggtttttggagattcctacttcccaagagcgtccccattgcgttcttacttcatcttacaggaaagctctttgtccgtgaagcttctcacaaagtcataaggaagtgcccgcttttgtttatacaaataagatgcaagagacaataataataagaatgtagtatcttcaattacacacaaaagacaaacccaacaagatattgaaaaagaacagagcacaaatctcatccaga

SEQ ID NO: 36008 - DNA, 5983 bp, Arabidopsis thaliana landsberg
  unsure (1)..(5983): unsure at all n locations
agcatgtaagcttgagtgacttaaaatatattacttacagggaaatcaatatctttcttctaagatacctttgacatctgtgaggccttttgagtatacagaggtaaagtttacttttccttaatatgttatggtggtggcagacttctttgcttacatattttcaaagtgcagattgttttaaaggatgaaagtgatattgatcccaatgatcaaaactcaattctggaacacttggataaagtggtacctattccctcttctcatagttcatgtggatatcttttctcctgccctttttgaataaccagtcactgaatgtctctactaatatcaacaaaattgttaggtcagaaatctaatagagaaagctagcaaaaaagctgttaacagatcagagatcaaactcccattggttcgaatcaaggtaacttgtttccaagttttcttcaaactgctgcaaattctagcaacactcatataattaaacctttattttctaacccaactctagaggctaggctttgccagtttgatgcatgcacacccatagccacaaacagataattgttattaagaatattaaatgactgacaaaagactaagatctgcttcatctttcaggtagattattctggatttatgacgataaatcctcaaagatttggacagaaatatgtgggaaaggtacctagaaattagttactgtaacatgatggtcaccatacttctttgaatgttggctaactaatgacaaagtcccaaacacttacaggttgcaaatccccaggacattttgatattttccaaggcttctaagaagggtcggagcgaaggtaagggcattggtgtactagtaatttatacaattttgtttggattagattgatgcacttgcttttactctaacttgtaatagcttatctggcaaaaattacggttaagtagtgtatctgagatatagtaatgtagaacaatatgggcctatgattacctcctttgttgttttattgtcggtattataattctcgtcatatatatcatgactactaactttctgttgtgtggagcttgatattgatgtattgagtgttaattttctttctgttccacttttcttgttagttcatgtttcttcgtgtgtaacctatagcatcaaaattttgcgaatcttatggattatctctagttagtatatattggaaatttgccattttgataatttttttgtctagtgaattgaatggcaatgatgcatgtcctgatggttgtccagtgatccagttatgatatatttcaatcttccatttcacagccaacatcgatgattctgagcggcttcgtccagaagaactgaaccagcagaatatagaagctttagtagctgaaagcaacctggtacatcctgcaaccttctttccttatgattgtgttattatcgtcaacccctgtagaactttgccacagaatgatatagacttgggtagttaccaaatgggcatgagtacactatgggatgatcattctattnnnnnnnnnnnnnnnnngagatccttccagttaacgatctggatgttgctcttcacaattatgtgaacaaggatgattaactagccttctactcatgcgttcagtacaatctttttgagactcgtgtatgtactattttttacttcaccattcaatacaaagttctgcataggatattatttttatttcgtagcacgtccttgttattgcttttatgatttatctcttccctctttttgtacagggtaaacttgcaaaggattcagatgccaagaaatttgaggaagatgacttgattcttaaagtgggagagtgcttagaggcaagaagatatagattcagttagttctgccacagattatgagaaccagcagaatattgatctcacttgcattattgttcgtgcaggaacgcttgaaagataggtccactcgacccactggttcctcacagtttttatccactggattgacttcagaggtttaaattctcttttttagattttccttgcctctgtccttccgttggtttctcacagtgctattttctacctgagattggtacagaatttgacaaaaggaagcagtggcatcgcgaatgcttcgttcagtgatgatgaagacacaactcagatgtctggtttagctcctcccactagaggacgaagaggttcatccactgctaatacaactcgtggtagagctaaagccccaaccagaggacgaggccgtggtaaggcctcaagtgcgatgaagcaaaccactcttgatagttctcttggtttccgccagtctcaaaggtaactttttgacagcacatttaaccagtttagggtaggattcacggacgtgcaaggaaatgattggcatcactagctagctaatgttatgtccctaatttgtctttcatagatctgcttcggctgctgcttcagctgccttcaaaagtgcttccgccattggagaagatgatgtagattctccttcaagcgaagaagtcgagcctgaagattttaacaaacctgacagcagttcggtatggactattccttacactgttattcatttgttcactaccataagaaagcccatgtaaaaacttgacagcatataacttttggcattcttatttctctatttgaagtaaattttgcgtttttacttttcctgattcttgtttgatatccactaaaggaggacgatgagagcactaaaggcaaaggacgtaaaagaccagctactactaagagaggcagaggtagaggttctgggacttcaaaacgtggtagaaaaaacgaaagctcttcttcacttaataggctactcagtagcaaagacgatgacgaggacgaagatgatgaagacagagaaaagaagcttaacaaatctcagcctcgggtttgttaatcacatctattttcccttctttcgctgcttattagcaggttttagtaagttgttgttaaccatttgagatcaaagctcacttaatagtacaatttgaatatgcaggttacaaggaactatggagctctaagaagataaatacatatcaaaccccaatctctgacatcacaacgaagcttcatttttctgttattttctagcgacctctcaagcggaacaacttctgaagaagagaaattagtactaacaagagttctgtgagatgatgtacagagaattttgtagtgtttttttttcttgctctttttaaggttacgttgttgatgaatgaggcaatatgattaacgtcagtaagaagtctaaaactgtagtaaccaacaagttacttagccaataatttaatccctaattttacatttgaaattcaaataatttgggacaatctaattaatattggaaattcaaataatttaactaatattacattttacatctaaatcatagtttataggaaaaaaaataaaacattataaaataaagagtaaaaaacttaaatgggcaacgagaaaagaaatatggataaaaaagagatggaattagagatacttcaaatccaaagctgtttcctgattggctaatcccaacatctcactctctatctatatcccatctctgattctcccacctctcttctcatccacaaaatactaacataaaagtcaaagtccctgagaccaatactttcaccaaacagcaaaacaagaagaacaacaacagtaagcaaaaaagaaaagctcaagccgagagagacaatggcatcaacattcacgagctcaagcagtgttcttaccccaacaacattccttggccagactaaagcctcaagctttaacccccttcgtgatgttgtctctctcggatctcccaagtacactatggtctgttttctttttggtcttaatctcgtcatattaaaggtgtttcatctttcttcttgagtttgtgtctgactttcacgtaaaatgtctatgtgaagggaaatgatctttggtatggacctgacagagtgaagtacttaggacccttttccgttcaaactccgtcttacctcaccggagaattccctggcgattatggttgggacaccgccggtttatccgcagaccctgaagcctttgccaaaaacagagctcttgaggttagtctctaaatctcactcactcaatgtaaaaacagagtaaataactaatcatcatttgcaggtgatccatgggagatgggcaatgttgggagcttttggttgcataacccctgaagttcttcaaaagtgggtccgtgtggacttcaaagaaccagtctggttcaaagccggttcacaaatcttctccgaaggcggtttggactacttaggcaacccaaacctagtccatgctcagagcattttagccgtccttggcttccaagtcatcctcatgggtttggttgaaggtttccgcatcaacggtcttgatggtgttggcgaagcaacgacttgtaccccggtgggcaatactttgacccgttgggtctcgctgatgatccagttacttttgctgagcttaaggtgaaagagatcaagaacggaagattggctatgttctctatgtttggcttctttgttcaagccattgttactggaaaaggtcctttggagaatctccttgaccatcttgacaaccctgttgctaacaatgcgtgggctttcgcaactaagtttgcacctggagcttaaattttcaagtcttgatgtgattcttgtaatgatatgaacataacctttcttgttcctctcaaattacaaatcttctatttgctatgcacagaagaagtctcaaaaatacatgtctctcacagctaaatctacaatgctcttaatctaacattttgggatcgtgatactaatacaaagctaagtggatgaagattccacacacactaataagtaataagaaccctagcctctttttccccaccatttccggtgacgacctttatcaccatctactctatggagtcttgctttagtatctcttaatctagctttgtaatctttcttccatgtctcaaatcttagcttcagtctcctaaattcatcttctggatgttgctgttgctgcccgtttggagttgcctgaggtccgagcttcacctccacaatagctcttgcatcttcatcgaaattgagtctcctttggtcaaactctcttgcaagatgattaaccgcattcaaacttccgttgagctctctgattctgagttcaggagtgtttccgtttgtgaacttattagtaggagttcttactcccggagttccagtagacatcgtgtcctctgagtcataaccgaaaggtgatatcgatgtgtcttgtcttcctcctgcttgacccgtaatgctctctgcagctagactctttctagcggcggcaagactcatctgcaaaaagacatgatgcaaaaacatttcagaaaactttgctgatgcagtaagtgaatggactttcataaccaggtaaacatttgacctgcaatgatgacatntgcttttgccatgtttcctccattgacttcatctttatatcatactctgaccatctctcctcaaattgcctcaactgctctctttatgctgtgttttcttcttccttctgcgatggggctggttcagatttcaaaatccgtttctggagatcagacatagatgttggttgaacttggggctgctccagaggaatatcctgaattggaaaggagagaaagttgaaagtgtactaatagtataattcagacatagacaatcttcatgttgatagcaagtaccttgtcttctgaaatccttctgccagctttcctctttgattttgtcgccacattgcgtagctttttttgcctttgcatactattgaaatgtttgcgagccagccatccacgaaccgctgcaacacagaaaaatgatgatgagcctcaaaaacactatccaaaatctttagttgaccacagaagatagtgcg

SEQ ID NO: 36009 - DNA, 1304 bp, Arabidopsis thaliana landsberg
cgggactcatattttgatatctacacgtttctctcaagttatgtacatggagccgttgaaactctcttacctctgtggtgctgaagctatgtctttgatgcatgggaatgttaaagattatccggtttcggaaatggatgcattgagaactattgaagataaactcggacggttaacgttgggattagcagtcgtaggagcaatattgtcagagcttcctataaacccgagccggcttttggatactataaatagaatgccgttaagagagatggtgtgtagtggtcgagaggggaatctgttgagaagaaatgcgtttctgttgcagctgtttgaagtttgtttttcgatctttgatcacgcggatggacctagaagtttggctacgagaatggttgttgctagtgggtggttagctcctgcaccagttccagcttctttattagctttggctgctcataaactccctgagaaacacagaggtccgaagcggttatggagaagactaaggcgcgctataacctgcggttatacgtcttcaaactccacacgatcaggagctgaagctggttcaatgctacttagattcaacattgctagcaccagcagcatcaagctagggtttatcaggatccacgagcgtgtgcacctctatgcgagatatcgagaactagtcaatgaatacgctcccgccctggcccaggcggtgataagccgcggctcgactgttgaaaccgcagagcagatctgggcggtttgtttcttgctgtttggttttagcaacgaatctccgactattcagctgaagataacagagctgctgattcttgtgaaacaagtaatcttgcctcttgcaatcagaacgttcatatcattttcgcgatgcacagcctcagtggagctactaagggtctgcacaaacgcacttgaagcagctgaccaaacgctagtgacaccagtagagaaatggctagacaagtcgctttgctggagaccagttcagacaagtgcacaactaaaccctattctatgggaagaacttgctctagctcgagccaccgtgctagagactcgagctaagctgatgttacgaggcgggcaatttggtttggctgatgacttgatcagaaaagcaatcttcataagaacttcgatctcaggagaggatcatcctgggactgtgtcggctcgagagacattgagtaagttacgaggcttttatccaatgttcatcagatttataacacttcaccgtaatagagagaagttttagggcttcttgttgtacaagtataagggtagag

SEQ ID NO: 36010 - DNA, 717 bp, Arabidopsis thaliana landsberg
  unsure (1)..(717): unsure at all n locations
ttccgaatctcgtggagatatctacgctgagggaacatatgatagggatacaggtgagctatgcatggtaggatgnctacagttaggctaaaaaacacagtggctatacaaaacgagactgtggattgcagtcttgcaatcaagattaacttttctccaattgattcgagaagcgatgaccgtttaaagggaaccatcaaaagcacacgggaaaagacagatccgctttatgttggacgtatggagggttgggcgaggtccatctatgttcatcaagcgaaagaatctgtttggagaatggatttggaggttgctatggttttagtttccaatacactttcatgtctcttcttgggtatgcaactctaccatatgaagcaacaccaggaagcacttcctttcatctccgttgcaatgctgatacttattacattaggtcacatgattcctctgctgttaaactttgaagaactctttaaaggcagccataaccagcaaaacttgttctttgagaacgacagatggctcgaagccaaggaaattgtggtgcggatagtgacactgatagctttcttactcgagtgccgtcttctccaactagcttggactgctagaaaaaccggagaccatcatcaccgtgaagatgtgtggaaagcagagaagaaggtttcttatgtgtgtttacctctctacatcaccggtggattgattgcttgg

SEQ ID NO: 36011 - DNA, 1866 bp, Arabidopsis thaliana landsberg
tcttgtgtatatctcagcattgacattcacgctaaaaacaaactaattatgtatattttgtgtaccggtgaaatgttgtttggataactaccaagttgtaaaacatactataagctactgctcaaaattttgtactataaagtatattgattcaatatcatcacagaatgatgtttagtttgtctccaaatacaaaaatcatggatttataaacaaaaaaccctgagaaaaaaaaacatgttgggtttaataaaacatggagataaaagtctaaactaataaacctagcgggtatttctttttcttaaaagacatgattaatattttcttcgcatctatattttggaaagtgaaaaaacatactacatacattagttagataaatctagttttcgcaagagaatctgatagtacttgctaaaattttattattttcctcgttattttaatgagatttgagaattgtaaaactagatttttgagggctagtggtcgttttataacaatgttagtcgcgtcacctagtaacctgactttaccgaatagttaataattttcttaaatgccaacataccaaatcattaccagtttaccactcaaccttagtccttaattgataggaatgtccattgtttgatgaaaaaaaaaaatgaaaaaaattgataggaatgtccattaagttaaaattcttacaatacatgttagtgttttactgtttgctgactgaatcttaaattgatttaccattagtggttggtggtaaatttgaaattttgtcttacatgctttgtttgttcagaaagacagaaaccatgaagcattttcctaaggtataagaacattatcgtaaatctgttttctagttacacagaaacaaactttcctctatcattattttatcactcagcaaacttaaatcattgaagtgaaaagacaaattgatcaacctcatttgtaaaatctattcacaatatatatgtataaattattagttaccgaatcttattggtactctttcaaatattaacaaatatacgatgatggagtacaacataatatatgattttttgaaaagagtataaataagtgaaaaagtgtaaagaaaagaagatatgaaaacccatcaaaagttaaaaaaatttcttttttgtcaaatgtataaataattgaaaagaataggcaagtcaagtgctctctctcccacacccatcgattcctctcggacactgccccaatctctctctctctttcgacaaagaaaaagtcagcgccgtcctttacgccatagtttgtctcctcctctctctcctcctctctctcctcctctcaccaacataatcaaagaagctttcctcacgaattcaagatcgccatgtcctccgaggattgggatctcttcgccgtcgtcagaagctgcagctcttctgtttccaccaccaattcttgtgctggtcatgaagacgacataggaaactgtaaacaacaacaagatcctcctcctcctcctctgtttcaagcttcttcttcttgcaacgagttacaagattcttgcaaaccatttttacccgttactactactactactactacttggtctcctcctcctctacttcctcctcctaaagcctcatcaccatctcccaatatcttactaaaacaagaacaagtacttctcgaatcacaagatcaaaaacctcctcttagtgttagggttttcccaccatccacttcttcttcttctgtctttgtttttagaggtcaacgcgaccagcttcttcaacaacaatcccaacctccccttcgatctagaaaaaggtttgttcatatcgaactaaacacatctcttagttcaaaggttctttctta

SEQ ID NO: 36012 - DNA, 774 bp, Arabidopsis thaliana landsberg
agaatgaattgatcaaagattcgttgtatcgcctgtgtgtaagtgtaagttactttgcgaaattgttgataaacattgctttggaatggttcacagatgcatcaaaaaccggggttgcgcatgatgcgactcagactattaagagagggttgtctatcggtgaagcataagctagacagattcttggtgtaactgagaaatcatcttgggaccagattcttaaggtttgtcttcacacttcaccccgggctggctgtgccaacgcgaatagcggcttatagtttctagtctctactgctgcttgaaaaaaagagaccctcattcttcttgagattatatgttatgtttgtagaaatccgacacgttgttcgaacgcaatgcgcagaatggaagcttctatctccaatctaaggtccatagagctaaggaatgcttagagactgcataccagaagagtacaacaacaagcgcatgaacaagcaataaaacaataggagcaaatcaggaacatatcttttgatacaagttatagttttaggacagaagtttgaaattgagtggcgatagccgcaaaagttgaactcgagacaaggtcggtgatggcccggaatgctgccagtaaccgactcaccggcgttgttaaaagtcttgttattttgtttaataatatcgacttttctcgttcttaggtaaactagttgaattctagcatgtctattgaattatctgagtttgaaaaatccgtctacttcatcttaattaccaaatatattg

SEQ ID NO: 36013 - DNA, 506 bp, Arabidopsis thaliana landsberg
aaaaacccccagggaaaaaaaaaccacacccaaaacaaaaaaagcccaaagataaaaccccaaccggccaaggagaagacccgggggggacaaccaaaaaccgcccgaagacaaaaggacccaaaaagagaacaacaaccggaacaagaacgacacgggaaaaacaacaagcaaaccaaaaaccaccaagcggaacaaaaaagacaccgaacaaaaacacgacacgccagcagaaaacaaaccaaacaaacaagaaaaaaaaaagaagcggagacaggacaagaacccgagaccacaaggaaacgagccaagcgagcgaccaaacagcccaaccccgcgcagaaacaaaaaaacgaggacaaaaccccaacaaacaaagaacaaaggaaggagccccacaaccagaaccgcacaaaaagaaaagcccacccagacagaaaggcaaaggggccccaccgaacaaagaaaaaaacagaaaaaccaagggaaactcaaaaccccaccag

SEQ ID NO: 36014 - DNA, 6355 bp, Arabidopsis thaliana landsberg
ctgattgtttttatttgggtcttccagggttagcaggtggaatgataccaagatattttctgatgtatacgcggacagtgaggacagtgacggagacgacatggatgcggagtctcatggccgcagcaaggcttcctctttgttaaaatccaaggcatccgctttgaggttggttgttatatacacattttggcactaatcttgtatcgctatgcttttggatctacttaaccgacgtgttgatgacatattacagatccaagaaaagtcggaaccagagtcatcttgaagtggatgagtcagatgatgaaccgcttgacttaatggatcagcacaaaacaagattagctcttcggtcaagtgaacttcgcaaacggaaagctgactcggatgaagaagcagagtttgatgtggaagggcggctagttattcgtgaaggagagaggtctaaaaggaaggaactatctgatgcagattcagatgccaaaagtagcaaaggcagccgtttctctggaaactcatccaagaagaaccaaaagcggatgaagacatcagagtctggatacgcttacacaggcaaagagtatgcaagcaaaaaggcaagtggcgatcttaagaagaaagataaacttgaaccatatgcctattggccactcgatcgcaagatgatgagccgtagaccagagcaacgggcagttgcagtgagagggatgtcaagtgtggtcaagatggcaaagaaaatggaaggcaagagcgctgcagaagcacttgccaccaccaagttcaaaaaattcaagaggagtggtcagaagaaatcagctgggaagaaaaaaaacaagtaaacaagtggcataagctcctcacctatgttttaagataccagaggaaaaatagcttatttaaaacacattttttgactgctaaaactttaaacacctttgtccattttgtattgtaatcagattttgaaatatggtttcagagttgatacttcaaagagaatttgtgaacgtcagttccggattgttcttggcatttgatccatctcagccagagtagttaagagcaaactatccttgaaaacgttactcttacgttaattatcccaaatctgatgatatccgtggttgagacagcctttactaccattcatagagtgatttataacgtatcttgaacacgaaattaccttatcaaggatttgacttctactagaggatctctttcttatatatcactactggattaacgtagcaagaacagacttttggaactaatactcgtcttttcgtactgctcatagttctagacacgtaaattaaatttcaaaataattcatgattatattccgcttaataacatttcacaaaaaaacctaccattttttttccacactaaaaagatattacgacaaacaattaaaatcgtgaaaataacatacatgttttttttcttctttttgttgaaaaagacactgtgatcccacaatcacatcatcaaccatctttggcggtaaacagtaaacacaagccgcttattttcaatccacacaccattcactctcagctcttttttttttttttaaggcactcttgtagtataagccacatttgtaagatgtcctgtccaaatcatattttcactgagaaagatggaacgtatagatatattcttagtctctagcagagtagagactttgatgccaatgagaaatacccagtcgcctctaatttgcatatattcttaaatttagacgtcgaagctactttgttgcttccaatgatttaatcaccaaagtaggataaaaatttagtttcaaaattatcatcttttgttttacaaaaatatatatagtttctctaaagaaagttcattagtcgacgcaaattagccacaatattatagcatgatacatttctagcccgtaatatccttccggaccgctttacgattaccgataaacgacactgtcttcgctagtggaactagaaaaactagtattaacaacggatttcaaatcatcgttatatcacattcacaagtaggctagaaatggattcgactgtcacttatcagctgttttcttgtaaatgatacatcactataagagaatcttccgtattttccagtctttaacgtatacaaaatcttctatttctataacaccgcctatatttaccaactagacccaaaaaaagagacaaattactatccggccgtaaacatatactaacaaaaattaatatgcgacacaaggcaacaatggtgagatgggatcatctcctataaaaaaaaaaaaaaaaagacacatgtataggtcacatgtaattgtcttcgtaaccttttttttttctttcttttttctgtgttgtctccataaccttaaaagataatataaaacactaatccctaacattacacatcattagagaaaccgaacaaaacacgaatccccaaagacagggataatccctaaccttttttttttctctcttttttctgtgttgtctccataaccttgcaagtactgtcgctcactctttctctctcaagagtctacattctctgaagcaaagcgctgatgagggaggagagagaggatatgttgtcatggcctctgatcggagagaaagagaagagaagtagatttgtaaaggaggaagtggagaagcagctactgttgtctggaccactaatcgcagtgagtcttcttcagttttgtctgcaaataatctccgtcatgttcgtcggtcatcttggctctcttcctctatccgccgcctctattgccacctctttcgcctccgtcactggtttcactttcctggttcgtgacctctcctctctccctctctctcttctcaatttcagtgtaattgaattgattaccagaaactgaatcgatttttcctaacagatgggtacagcgagtgcgttggaaacactttgtggtcaatcttacggagcaaagatgtatgggaagctagggattttcatgcagagagctatgtttgttctgctgatactctcggttcctctctcgatagtttggttttacacagaggacattcttgtcttggttcaccaaaacaagtccatcgccagacttgcaggttcatacgctagatacatgattccaagcatctacgcctacgctcttcttcaatgcctaaacaggtttttgcaaacgcaaaacaatgtgttccctgtatttgtgtcctctggaatcactacttgtcttcacctgcttctttgttgggtcttcgtgttgaagtctggtttaggacacaggggagctgctcttgctatctctgtctcttattgggtcaatgtcattctcctctcgtgttatgtcaagttttcagcttcttgctcacaaacatggactggtttctctaaagaggctcttagccacatccctgcttttttgaagctaggttttccttctgcggttatggtctggtacattgttctttttccagtaatattttttgtttgtacttacttaatcctgtttatagtgtcatgatctttttgtggtatgcttatggtggacagtttagagctctggtcgtttgagcttttggttctcttgtcaggtttactacctaatccggttttagaaacttcaactctttcgatctggtaagacggattacattcatccttgtcaatttggtttacggggttcttgtttttactgatttctgcaatttttgcctagccttaatacatcattaactgtctggatgatcccggttggccttggtggcacagcaaggtaagcacacaaataaccagagagacgagcatataaactaacatatttcacaaaattcagtactgttactaacattgttttcctcggtcatagcacgaggatctcgaatgagttaggagcagggaatccaaaaggcgcaaagttggctgtacgtgtggttatagccacagtagtcgtagagggtattatgattggatcggttttattggcgatacgaaataaattaggatatgctttcagcagcgatccaaaagttatcaaatatgttgcatcgatgataccaattgtcgctgcaggcaacttccttgacggattccaatgcgttttgtcaggttcttccatctgaaaaaatgatctttatgagagagtaacaactatttgtttctggtctgttgaaaccaaaactgattgtacatttttgattgcaggggttgctagaggatgtggatggcagaagataggagcttgtgtgaatcttggatcatattatcttgtcggagttccgttcggtttattacttggttttcactttcacgtcggtggtcgggtaataattcaattaaccaactctcttaactcatcacaaacttgttcaaaatcaatttaactcaaagttaaaacatgtagtaactaaagtttaatcttaaggggctttggttgggaattatatgtgcactcatcgttcaaggtgtatgtctttccctcatcaccttttttacaaattgggatgaagaggtaaaaccatcaccatgtttagtatatttttgtttttagtagaaatgtaactatagattacggatatcttatagttaagtgattgttattgattatggatttactgattcttcgtttatttattcgataggtcaagaaagctaccagccgagctgagtcttcttcagaagtaaaggaatttgcagtagacaacgggtcaattcttgtatgagattctgagaggcggaaccgacgacccatatatgaagcctaaaacctttaaaaacggttgccacttatttgtagctaagaaaaataaactttgtgtacgtggattttcaaaaatataatcctaaatgttctagaagcttcctacatcattagggcttttctattgttacaaacaccgtcgttttttgttcgtagtttttttttttaataagcgtaatcagccactgttgttgaacgaaaccaaaaaaagttatggtgagactagtttgcagccgaattctcaaatttccaaaaccgtacttatggagtgcgacgcagactacaagccgttgcttcaattcacgagcccagtctcataatctcatcacaaagacgatcacttcgtctcttcaagacgttttaacacgtcccatttggcaaaatcgaagctttgttcaatgcagaagagtctcttcctatgctcagatggttaataatcatcaatctgtgacgattgagacatttgatgctttgtgtaaacaagtgaagataagagaagccttggaagttattgatatcttggaggataagggatatatagtggattttcccaggcttttagggttagcgaaactatgtggtgaagtagaggctttggaagaagctagggttgttcatgactgcatcactcctttagatgctagatcttaccacacggtaatcgaaatgtattctggttgtcgatccactgatgacgctttgaatgtgttcaacgaaatgcctaagagaaactcagagacttggggtacaatgataaggtgcttagcgaagaatggagaaggtgaacgcgcaattgatatgttcacgcgtttcatagaggaagggaataaacccgacaaggagatattcaaagctgttttctttgcgtgtgtttcgataggagacattaacgagggattgttgcattttgagtctatgtacagagattatggtatggttctttcaatggaagactatgtgaatgtaattgagatgttggcagcttgtggtcatttggatgaggcgttggattttgttgagagaatgactgtggaaccgagtgttgaaatgtgggaaacactgatgaatctttgttgggttcatgaatatttagagcttggggataggtttgctgagttaataaagaagctagatgcctcaagaatgagcaaagagtcaaatgcaggtcttgtagcagcaaaagcatcagactctgcaatggagaaactaaaggagttgcgatattgtcagatgatcagagacgacccaaaaaagcgtatgcatgaatttagagcaggagatacttcacatctggggaccgtttctgcattcaggagtttgaaagtgcaaatgttagatataggatttgtccctgcgactcgggtcttgttctgtaacagcggaatgaagaggaaaaagaggaacaacttctttttagaagcaacaagcttgcctttgctcacgcgatcattaattcagaggctcggagaccattaactgttttacaaaatatgcgaacctgtattgatggccacaacacatttaagatgatctgactgatcaccggcagagcactgatacagcgagatataaaaaaataccacttttaca

SEQ ID NO: 36015 - DNA, 1837 bp, Arabidopsis thaliana landsberg
acacacacacacacacacacagagcttaaagtaaataaaacaagaacttcttcctcacataaagagcttcgaaaagcgtcggattaatctgtccagaaagcacagttggcgccacagcgcaatatctatatcggcgtaacgttaagaaaaaactaaaacagagagtctcaaatcaaagttgagaaattcctataaccaaaaaggatacagaagtggtctaatccaagttgttacaggtacaggttgggaataataatagatacaagccaccaagattaaagctgcaaaggtaataagagaaatcatattagtgtcaattattagggttcaagattagggttcttgattgtaattcgtataccttggatcaaaagaaaagccatttcgccgaaagccgaaaagggaagacctttatgcaaacaataagcaagtgaaattgtgtaaccaacaacttcaagctcaaatgccacaacacttaagcctcgtacactcttatgttgaacgattttcattatctacgattaaagaaaccaataaggcagaaacgaacaaaagttacaattttgagattagagtaaaagtttatagacgaagtttgattttgattacctgagggagcttgacggtgattgaagcagcaacgaggcaataaccgagaagctttgaaattagaggaagaagacaatctttctccgggaagtcaccgttccggagagatccgatcgcgcagctcatgtcgattccgagataatccattgattttgagttgatcttgcgcttggatcttttggtcggaaaagctgagcagagagaggtttggttcgttgtttaagtcgcgtgaagtggtctctaatcttaaacattccgaccataacaatctgggctttaatacgtggctcattttcacatcggcctcttactcagcccaattacgacgttctcggttttccatttttttgcttcaatcttcagtagactcaataattttctttttaatctatcttattatatagaggaaaaaatgtcaaaaaaaacctcaacttttaaatttggaataaaaaattcacgatttttgaaaatgtcgttttaatcatgaagtttttgttgacttctcaataaaataaataacttttgttgactgagccgtttaagacatgctgttaaatttccgttaacagaacaatcataagattgcaccacatatcaaatctatcgatcaaatgttgacatgtatcagaagagatttaagttttgttttttaaaaaaaatatataaaaagtaaaaaaaaaaatatctaatatactaatttatatgtctatatataaaataaaataaaaattgtttttctaaacaaaaaagaaaaattaacaaatttagatctaaatgtgttattggtaatttcaatttagcatgtaatttaaaaaagaaaatcatttactatggataataataataattaaaaaatgcccttgaaatttaaaagaacaatataatttatttaacattaatttaattggatataaaaaagagaaaatttggaataatgcctgatcttttctaagtttttgtttgaaaaataacctatccatattttctcttttaaaatataatttctaaaagataaatggaatataaaattacaaaaatatccttactaaaatttactaataattttaaaacatttatatttaaaataaaatcagttttgtttatttgtcgacacaaaaaaaaaaatttaatttaaaaatatttgctaataactaactaacaattttccatataatttaatcttgaatatatttttaaaggaaaatatttgttcaagaaaaagaagaag

SEQ ID NO: 36016 - DNA, 1557 bp, Arabidopsis thaliana landsberg
aaaacaaggtcaaagtccccactttttactgctactattattgagattcatagctttgcacttaaaactgagagttatactattctattactacatttatagacatcttaataatgtcaaagtatgaatctttgatttgttttttcaaccctgttaaacatattattgttgatgttaaagacttaaagtatcatagaggtcggcagtctttacacaattgaatattatgaactcttttgttctattattgagatttaggagtacactcacgctacgctgcaggtactttttgttttcaataaatagtaattttgggattatagaagcctcaagaattttataatggacctcatcatcaaactattagctaatttattatacttattatattctcatattttaagttaagactccaaaaaatagcatagaaaactcaattgaataaaaaacaccaatagaataattacattaaaaataaaaaatcatatataataacagtgaatatatcattaatattatagagggtggcaatctttacacgattgaataatgagaactcttttgtctaatcagtattattaggcgatcaagagaggaaaaaaaattgtggacgtgaggtgtcgtttgagatgattatagtggggacattactagtttgaatcataagcatatttcccttatcattatttggcttccgagaaattaagcgaacggaggttgaagcatatagggacagtgattttgtcgtttgtaacattttccaggaaacatccatggagtttctgtaccaatagattcgtcaacggtcacacagagccttttcttctttgttaaaatccttcttccatccatctaggatcttgctccatctttcagcatactaatggattcttcttttttccttgtcgtagtcgcagctgctataggcttcttcatactttttcgaaaattcagattccaagaaagtaattcttcttctttatctcttccatctcctgcaacttctgtgtctcgaaaccggaaacacgatgtcttccctagcttccacggggcagatgttcgaaaaaccattcttagtcacatcctggagtcgttcagaagaaagggaatcgacacattcagtgataataatatagagaggagtaagtcgatcggtcttgagcttaaagaggccatccgaggatcgaagatcgcgatcgtcttgctctccaaaaactatgcttcttcttcgtggtgtcttgatgagttggcggagatcatgaagtgtagggaattgttgggtcagatagtcatgactatcttctatgaagttgatccaactgacataaagaaacaaaccggagatgttggaaaagcctttaagaaaacatgtaacggtaaaaccaaagagcatgttgagagatggagaaaagctttggacgatgtggccgccatcgccggagaacattctcgcaactggtttgacttcttgaattatacttaccttaattaatatttacttggtaaagggtatttatttgatttgttaaagtgtatattcgttcatactctgaaagc

SEQ ID NO: 36017 - DNA, 5286 bp, Arabidopsis thaliana landsberg
gaataaatgtcaagataagctagcagggtattattgattaaaagaaaacaaagtaaacaaaccgcgtattgggggttgtaaaacaataaagtaaagagttaggaacagagtattctcaaaaaactattggttagtagatctaatgaaagctaggttgttatcgaaccattcttaaactcaaactctaattatggaataactggtggtgttctgcgaaactccatatgcctatagctaatgatatatctataatttgcatgatttgggcattcattcttcacctctttgtcattgtttcatccacattttatctcattaggagtcgttttagtgtgttttacatatttaagacgattttgcattaggattgcatgtgcatggcatatttggttgttttcaggtactttggatgcttttggagttcaaacagaggaaaaacagaacatgaagtcagaatgcccaatgacgccttcagcaaaagtactctatcgcagcctcggagccctgccagggcaaatcactctatcgcaaccccggagaagcaaacagcttagtttcactcaatcgcgaagccggaggaatcaccccatcagaagcactcgatcaccactcgatatccaggaagcctatctgctcattctgcactcagccagacaagctgagaacaaataagagaagagaagccgaagaaaccactcgatcaccaactcatgacatccactcgatcgcactcgatcagggggtcgctggaccattcaatctcgacttcactgcatctcactcgatcgcaagacagagcccttgaagtccagtttgatcaatgacatactcgatcactgggaatctcatttcagcccgtcagatgccaatgacacattcggtcgcacagtcatgacgtgaagattcgctatatatttagtttccttatttgtttcagttctcgcttatatcactacaagaaaacaggtgataaacgacttacacggcagtcgcatagtagtcgtaaaaaatgataatacgactaatcagcgactaacgacgttagtcattattacatagtcgctgaatgagatagtcgtgaattagtcgttgatcgacgactatattacgacaataacacaatcagtaaataatggtcgttgtatagtcgtatcgtattggcgactatttaacgaccatagcacgattaattgtcctatacgaagcgtgtgaaacacgtggtcgtataatagtcgtataattgtttccgacgatttgacgactattggacgactaattctatcaatgtaaggaaataattctcgtagtcatataatagtcgtataatgttttacgactattatacgtctcgtggacgattatattgcgactaggtatcttagtcggataataatcggtaattagtgtgactattagacgactattttacgtctaatttgctacctaaatacgactactgagcgactacttgttttgtccgaataagaatttggtcatcgattgttgggtttcttgtttcttgtttgttggttatccactgttgttttcttgtttcttgttttctccttttttatttgaaatgctaaaaagatgaaaagacttgtatatatagaaaatcaagtacaaatacacatacaattatcttgtttattacacaaacaacttcttcaaataaacatatgttcaagtagagtttgggcaaagataatctaaggatcattaggtggaggacttggtagacgttctgtggttgtggtagagtgacttgccatgaagtccaagaactgcggatcggtttggcggagatacttctcgactaaagacaattgctcgagcttgtccttttgctcagctgtgactcgggatgactcagcttctcgggcagcaatctcagcatctctcttctcattatatgcagcctgctcttctattttcctttgagcttcctgcagccgttcttctagggcttgaaaggatgatgaggaaccggagtgatggcggttggcgctgcctagagtgtcttttagacatcctagtccataaggattgcctctggaatccctttcggtggactgaaaagaaatagagaagaagctcattagtgacagaatattaattggactctaagtcaagaggtttagactaaaacattttacctcgagaaagatggctgtgtactcctcatttgtcagctcccaaggtcgtgaagagccatcagagacagcagaagcagacgcctctagtgctgacagcctatctctcacattctgctgataagcttgagcaatcttctccgacttctgatcaacaaatgagccatccgacttagtgtgtgtttcgatgaacacctcaccaagatggaccggtcttcccaacttctcttcctgcaatgaaaccaacacagctcaaatactcaaaaacatacatgtgaggtaactgaaagaggtaacagaaaaacttacaaattcgtcttggatttcttgaaaagactttggcccacagaagtggatgtgaggaccgagaccgttacggtcagagagacgagctttggaataggtccgactccgtttttgtgctggttcggtgtcccagtaagcgcacataacagcccacagagtttcaccaatccatggaggctgctctctagttctccttgcggggctaaccatgtactttaagcaccatttacagaccttattgaagtaatactgcacagtccctcttattaagggaatccaactgtgagtggtctacaaaaaagagtagcttgagttagtgaaattcaaaagattaagcaggaaagttaagaaagtaagagagatgcatgacagctgaccgcaaactctagaaaaataacctctctcttttatccaatggcacacatgagcagttatagtagggagcattaagtttttgtgtaaaaatccgagtgatctttctaaccaactttgaacccctgtcgcgagtaaacctccaaacacatgaaacaatgaaagataaaaacaagttacattagtgaaacaactcaacagaaagaatagcaagccaccacaacagaacacaagagagcaagccaccacaacagaacacaagtattgctagatatgaccactatgttctcagaagatagcaagcgaccacaacagaacaagccaccacaacagaacacaagatagcaagccaccacaacaaaacacaagataggctagacatgaccactatgttcacacaagatagcaagagaacacaagagagcaagccaccaaaacagaacacaagatagcaagccaccacaacagaacaaaccaccacaacagaacacaagagaggctagacatgaccactatgttcacagaagatagcaagcgttcacaagagagcaagccaccacaacagagacacaagatagcaagccaccacagcagaacaaaccacctcaacaaaccacaagtgagtaagccaccacaacagaacacaagctcatcaagacatgagcactatgtttacacaagataggaagcgaccacaatgtaacacaagctcatcaagacagagtattacagaagctaatcaagacacaatccaatgaaacaatctaatacaagcatatcaagacacaatctatgttcacaataaattaacaaagcggacacaagagcaatccaccacaatctaacacaagcaaatcaagacacaagctaatcaagacacaacctaacacaagctaatcattgctgcaacgtaacacaagctaatacagaatctaaaacaagctaatagggttgaggaagagcacataccattcagtcttcggcttgggaataggagacagtacggtggtccacatttcccttccgggaaccataagtatgtcggagagagccctcgccaagtcttcttgtagctccgacaatgattgaggagctccctcttgaaagttgttgccttgagaagatggatggttgtgtccctgagagttgggatttggagactctggttgctcttggtttagaggatcttatggcggtggattaaactgcgcctcttcagatcgcggtggcggcggatcaacacgctaagtggtggagctttggaatagttgatgcgcccccggatagttgtggtagtggggtgctgacgttgaggctccgacggcttgaggaggctgcgtcagaggaacttgaggcgccaccgccagagtgaagtcgtactgctgaggcagcgaagctggccttccaagcggtgtggaccctccagctctctgtgtaacgttgggggttgtcttcctctttcgtgaacctccacgaccggcgataggcatcgatgaagagagacgaagagatcgaagaactgaagaaagcgaagagatcaaagagtagaagaaagcgaagagatcgaagatgattcgaatcgaatgagatctaagaagaagaagaagaactcgattgggtttatgtagagatgagacgaagaacagatcgaataacagatagaagaaggagaagtcaattcaaaatggatcgaagaagaagttgaagaagaagatcgaagaagagtgttgtttggacgaaatgagaagtgaatcgatcgaattagggttttctttatacaggtagtcgcaatttagtcgtattttcgtcactaaataattgggtttgggccacgaaatttaaaagcccaactataaagacaattgtcgccaaatagtcgttggatactcgttcatttttattgggtttgggcttcagaatttaaaagcccaacaaattaatagtgtgtcgcatgttagtcgtactatcgtcgttaacattattaggtttgggctttggaatttaatagcccaactaataaaacgtttgtcgcacgttagtcgttaattcttttgggtttgggctcgaaatttgaaagcccaatataattaaacgtctgtcgtctgttagtcgtattttcgtcgttaagtttattgggtttgggcttgggcttgggatgttgacagcccaacaaattaataatacttataaatattcatgaaaattataaggtttatgtaatatttattcaaataattaaacattatatgatatattcttaaacagcatttttcaaataaatatacatataaagcacacatttagtactcttcatcatcttcgactgaagacgatacattacatcggaattcatcttcttgttcagcatctcagacattgtaatcgagtatgattgggtttaagctttctaccggattgtccattaccagatcttcaattgtagacaacaacacac

SEQ ID NO: 36018 - DNA, 3072 bp, Arabidopsis thaliana landsberg
  unsure (1)..(3072): unsure at all n locations
agttttatgagttcaatataaagtatattaaaattttaaaaaactttcaatgtataagtaaagagaagtgacatcataagagtgaaactgaccagctaagtcgaatagaagttggatagagtcaggtaaaatgataagtctaccgttggaatcaccattgtttttgttatcttgattaggnnnnnnnnnnnnnnnnnttatcactctttttggaactccctctcttcttctctcttctactgcaatcaaatgtcattgttaaaaaaagggtctctatacatacaaaaaaacatgttcattttactctgtcttcaacaaaaaaaaatgtcttcttactctgtccattttcatgtcttgagaccgtaactatttcctcatcgttactttgtggtgtttcctctgactgaactgtttcctgtcaccaaaaaatgcgttttcatctcaaactcacttgacaattttgacgagaggactatgcattatttgttataagaaggtatatatacctgaacctgagcatctgcgtcatctaataaatctctaagaaaaggaatttctttttttaactcatcattcaatcccttaagatactgaaattaaagaaagaaacattaattattagtgttacaatataaacactatattgatgttactaccgttttgtgaatgtaaacttactgtcatgaaattggcaatgatcattttggcgtcgacgtcattatcagactgcaccatttctttgaacttatgatgaccaattctgataacttgtgaaagtcgacgtgtcctcactgtgaaaggctgaggaatgttgaacactactcctatctctcctgccatacttccgggacctaacttcgctaataccttcaccatttatcaaccaactcttcatactctatctcaatcttttaagtgtatgaaatgtgtttttcttataactgaaatttgttcagagttttacctgttcactcacacccttggaagcaattatatcctaaaattgcaaattttcttttaatcagttgaagtcaaatataaataagaatgagtaaacaatcttttctggataaatgaatgagtaaacaatcttttcgggataaatgaatgagtatgtagaggatatatagatatatcataccactcctccagatacaattacgtagaaatccgttggaatctcattctgcaagattatctccattttcggcggaaaatattctgcttgtatttgcgaaacctacaacaacagcatagaagaatgaattaccactgccttgtttaacaaggaacaaaagaaaatggaattgttgatggacgatcaccagctggacgaggaggccttcggggaatcctttaaaaagataagcttcttcgatgatggagcggaatagatgttggttaatgcttgatcttatggccttaggtaagtcttgaagaacctcttcttgccttaactccgcggtcttgaacttgagctgcatatgtgcaagcatctgttccctcattgtatccggtaacctgttcttgcttgtgtatcgcaatatatcattgatcgcactcctctgttcagcagaagaatgattattgtacgactggtacagtaaatgaatgagtaaacaatcttttcgggtttaagcaatgaatgattatataccatggcgaatgtacgaagagcgccatggacaactagattggtcatgataccgatgatataagaagtgaggccaatgttgaaaagcatgtagaacatgttgaatgtcttctcacggctattaactgcatgcaaatcaccgtaacccacggtagtgagtgtgacaatggaccagtacattgagtaagtgtaccctaaccatacacttctttccttaaaatcctcaacttgcgatcctatccatgtatccgtaggccttggataatggtaggctatccagtataaaatgcaacccgccaaatgtatccaaaatatcgttacctgaatcaaatttcacaatttgaataaaagtcatagattgacatagccaatttagtgattgtatggaccacatatagataattcaatataagtaaaacttacacatagaagtttgatgactcggatcacgaaatagttgaaatgtgcgtctttctctagtctgttaaaaaaagaaagaaaggaagtgtaaaatacacacacacatatgtactatatgataagtggatttcaatattgcatattatacagaaagtagtaaagaaaaaaccttttaaagagttcggctacacgacggagacgccagaggcggagtaaattaaggaagccgaaagcttggcctcgtccgacatctccggtaatagttttataaatgaattgaatgggtaacgttgatgctacgtccatcacaaaagccacgctctttaagtacctataataatgcacaacatatataattcaattctaacttattcattttacttatgttattttttttaacatataaaaacaaattgatttgttaccgtttggcgatgagcttgtggtcggtgacattgaggtaagtagtattatccaagtaggaaacaaaaaaggtgaggatgatatcaacggcgaagaagaagtcaacgacgagatcaatggtcaataacgctccttcggcagctttctcgaaagccaactcgaacaaagatgcccacgccgaatacccaaccaatatcaccaaaaacaattcccacaacctaccattaatttttatatggaaagattaaaaaaaaattaagatatatgaatattaataagaaataacaattttaagacgtaaaaatatgaaaattaatgaacgaatcatttgatcattaatttatggactaatagaaacagaaaagttatgaaatctgtaaatcactatttattgtttgataaccaaaaaacatttcttcgttgtttagttagtgagaaatgaacctgtaacgacgatcaaagtgaagaacgatgaaaggtttggaagaaggattatcatcttcgatgaaagtcccaaaagcaggcaagagactgctcgaaactgacgttatgttcctcacatctttgctcgatct

SEQ ID NO: 36019 - DNA, 763 bp, Arabidopsis thaliana landsberg
ctaagcagttgtgtatatttctttcgtaaatgttttgagacattcttataagggacatataaattattgtagataaagcctatgtttcttaaacacgaaactgtgatttattaatagactatagataggggtatgtaatgaacgttgagaaaaatgaatgacgtgacggctgagagagagagagtggacccgacccggacggcacaggagacactattagatccttcttcttctcttctgcctgtgcgatatttgtctcaaaagcaatattctttcatgtgagaaacgacttcttattcttgcactacattgtcactttcttctttacccttctttcgtatccgtgtgatttggcgtgtgacttatttctaccgtaattctccttcgaattcttcgatgggatatctgttggattcgctgctaatttcttagccaattactgtttggaatgatcttcattttgtacttcccattgcttgattttggttgacacctttctcgtttaagatcgtctcgttttcatgctgaaaactcaagtatttagttttttcgtttgtacccttttgttgatgttttggtttggggagaaaatgtggttcctttcaagttttttccgtcaatttgagttctcaggtcaacgaaaatggatggatgttcttaacccattaaccaagtttgatttttagagagattctgtaaacaaacaataacattttttgtgcttgaattatttttatatttattgcaagtttaggattttgct

SEQ ID NO: 36020 - DNA, 3443 bp, Arabidopsis thaliana landsberg
  unsure (1)..(3443): unsure at all n locations
ggagatctcctatggggagaatcattcatgttgcatcaggtaatgtatatataatgatacggaaacatggattgcttatagtaaagtagcgtaactaaatcaatttcattcttatttttgtttggaagctagatacggaagatgattggaacggccgtggcagtgaagagagagctgcttcctagagacatcataagactatctctgaacaagttcacaagaattgtcttgccactggctccatctgaagtactgatcctgagaggaaacagtttcgaagtgcgtagattgcctgagaggccggggatggaagcaacaggtgaatcagaagaagtggagaaggagatagaggagttttacagagcagtgatggttccacaggtgagtatattcctggattctgagaaatctccatggaaagagtgggtggatcatttggataggaatgatggtttgatagacgatgaattggaagatgtaaggaaaggttgggaggagtggaaagctgctaagccatggatgaatttgaagaagacagaagatgatgaagaagcattgagctctgtttcagtacctattcatcaagctctatgagagagtctaacattagttgcatctaccgtttgtgcacctttgattgaacgctttatgattaatggttccacttacatggaatatgagaaagttttatgagaagcatctaaagtttctacattggttatgattcagattaagccaagtctctcagtttaaacgcaatgttaacatatttgtttttacattttaccttgtaccttagaaaaataggaatacttttctacctttttgtttgtaaattgtaaaagcaaacacaaagttctcataagattacttggttcatttggaacaagtaaacatgatttcgtatacaagtgggtacatctttttgagtggcttgacaaataacgtttttgatatactacattatacgtttttgatagttaaaaacattggagatttaaggtgaaaaaaggaacaataataatattattcagagttttatgagattttgtctatgtatgtaaagtaaagaagtcgaacacacaggtacatttctatgtatccatgctaaatttggttgtcctaaaaatggagaaagagacttgtcgttcccaatggcgtcatatccgacgtcaatcatgcgtcagatttgttttagtttgtatcataagatatcaaaatcacaatcaattaagtagggaagttagcaatgagtaaatgttggggttacccaatacatgacaagaaaacgtggaatcattcattgtatgtttcttttttaacttggcttcgtaacgtttctctcagtcacactcttcgttttgattaaatcctttgacgatgcagcaaatcttcgtctcaacatgtcgtcgtcatgatcattaaatacgaattttattggaatttattgtctttggactcttggcttcatacgataagttgtagaacattctttgaacttctttccacttttagaaaaagaaaagaaggtttcaaattttatttttgtttttagataaatcttcgtcagtctaaaaaacaaaaggagaaaaatagattataataaactgtttttaagatatattaataaaataaaaagattaaaaaaaacgattgacaaagcgatccaaacaattcgatccaaaataagttagaaagtaactgatttacttcatgattaggtatattaaaaaaggttgtgtaccctatgcaaaaaatgtaatattgggaatattgtttgttagattatattaatatgagagtaaagttaaatgaaaactaagcgtagtccaatacaaaacacccattagatacagagatcaatcatctctatagggccataattttttgtcatgtcaattccaagaaatacaatattgtttaattgatgaatttcgtaatgtttgatggcttaagccttaatccagcctcgaatctgagcatccacaaagttgccaatgtaattgtaggcagcttccgagggatgaattgagtcccaaaacaagtgatcggagttattcggacaagtctttgtaaggggattgcacatgaatgttgtttccaagtatcctgttccgcaacatcctttcttagtctccttgaatcctgttttcatgtgtaccacaatgagtatctattgcataaattattaagattgagatttagataacttgcgttacaaggaagaaatggtatataccgtatttactagggttttggatcatgtccatcaatgggtcgtagacgttggcgtaaaggaaattgcttcccggtagagacgcttggatctcaggcagtttctttactagtttctgattgtacaaaacggagtctttgttttcttgttccacacaaaatctcaaaatgtttctcattttcgcggtcatttggatcggtaaacatcccattggtggtaaccctccgaccacaatattccggcaacctaaactataaagctcctgcacacaagaagaaaagattcgagagtcagcacgacaaatatagctccatgaaataatctggtcccagaccatgaaaacaaaaaatttcaagattttacccggacaaaaccgtcaagcctcttgagaacaaaatcttggtagccacagatagtaggatactcgagacgccttatggggatatcgtaaaagttcaagatgaaatcattaggccctgcgcttatgaccactaaagcgttgttaataatctccatcgctttcttgtctcctacgatacctttgagacgagcaatataattcttgaacatgcttggctgttgtgagaccgggatagctttgctcgatagtgaggtctcgtcatcgtagccagcacccgcggatgcaaaacagactccagtgacaatgtcttggtcggagatgttcggttgtagaaacggaggaacaaactctttgatgttgagttttgtggagattacgtcagagattagctttccgtttgagaatcttccgttagcttcgtggccgggaagatcaactccataagggaggtgattagccttgaagacggcttgtgagtagtagttgttattgcctgtgtctgccgttgagtcgccgaagattagaatcgccgggaaaagcggctgcgtggcgtttgcatccgcattgcaagacacaaggagtgttgcaacaaagagaccaaacactatggttgtagatatatacattgtgtatttgatcacttcctgttattttgatttctctatagtggtgaattaagttagtgatggcgttttaaagagcttgaaggtgatgttctgttggagtaaacatagaagctttgaatatagtctacgtaaagatattgacgagatttccagatacattaccatatanaagaagttttttttcttttttttttagtccactttacgtatttacccttta

SEQ ID NO: 36021 - DNA, 732 bp, Arabidopsis thaliana landsberg
gattttgtttccttttaagtcctttagcatatttctagaatatgactgaatgtttctttcccagttcatcgcgttggtatatattggtttcttaacgtttcaatgctcgaatcatttcacattgtgacttgccattttactagagttttttttttttcagttttagattcgatgtatggttgaatgtcaacatcgttgtcctctgatataacttatctgagatggggttgttcgaataaatttcaaagaaattgcaggaaaggagatgaaactaggctgctatctaaaagagtagactcagaaataactggatacataacgtaagcagatgaaaaagacgatggaacagacatgacctgaagaaaacgttgaggtctctctgacgttgccttgacgtgcaagtcatatccgtatacattattagtgtctgacttctgagatgctctgttctatctcagtatctccttgaagcatcttcccaactttgatcattctctctgcctcagctatttctactttccttctagctttgggtctctaatcactgcaaaattccctttcgtataaagcaagaaatcctggaaagtaaaagagaaaaacaaacaaaccatgaagcacaaaagaaaatcaattttagaccgacactttggagtctcatgtgaggagcctctaaaagatcaggcacagttaaagcccaccacctgaagaggcaacaaccgtcgtttaagccga

SEQ ID NO: 36022 - DNA, 2450 bp, Arabidopsis thaliana landsberg
tagaaatgttgaattcagcgtcactactgtatgatcagctcaaggttgagttttttttactaggttcagtgttattttttttattttcttccggtgaattgagttatcttatcgtacggacaatgactcattgcaggttgctgagccgtttttcttattggctggtccaaatgtgatcgaatccgaagagcatgttcttcgtatggctaaaagcatcaaagatatttcgacaaagtatgtgtaaccatcaccattgaagctctttttcttgttgtgacatcttgtgttcaactgtgttggaactattaaaataattgacaagggggaaaaatgtttaacacagtggagaccttgatcctctcatcacatgagcattttagcttattgagcaaggtgtttacttatatagttatagttatgcatgttcatgttgattgtgaatgttgtaggcttgggttgcctctggttttcaagtcaagtttcgataaagctaacagaacttcatcaaagtccttccgaggtcctggcatggctgaggggctcaaggtaaatcattccctctttcttgagttgcaagcatggatgactctttatctggtgctcttagaactgcgcatttgaaaaccttcagaagtatattgatgtcaaagcgatcttatatctataaattcttacgtcttttagaaccttcagtatgagctgacaccagcaattgcatttagctcctggctataatgcaaccatttacatttacggcaactagtattgatgtggcttcatttttttgtgtgtagttcctgcacaagtatactacaggtagtaacttttctgtttctctcgacagattcttgagaaggtgaaagtagcatttgatctaccaatcgttactgacgttcatgagtcgagtcaggtattttgagttttagtcacatcagagattcaagattcgaaaaatctttgttcctttctaatgcttcgtttgtttttattagtgtgaagcagttggcaaggttgcagatataattcagataccggcgttcttatgtcgacaggcaagattctaacatatgcttttcttcaactcttttttagctatcaaattttcatttactgtttgaatttatcatttatatacagagttcagggttttaactattgcctatatctccagacagatcttctggtcgcggcagcccaaagtgggaaaattatcaacataaagaaaggacaattttgtggtcactctgtgagttatctttttgatctgtacaaacttttgttccctggtatattgtagtgactgatttcatgtatatccattttaaggtcatgagaaactcggctgagaaggttagactcgcagggaatccaaatgtgatggtttgtgaaagaggaaccatgtttggatacagtaagttaactgttctttgtgtcaatagaattcaccaatttttttgcaaatagagactaaaatagactaaaagacactggatataactcctgagtgtccttacattttaattttgttcctcagatgatttaatagtagatccacgaaatttggaatggatgagggaagctgattgtcccgttgtgagttaatattgcttcttgttcttttcttgttgtgggagtttatatcttggctttggctttatactttgatgttttgacactcgtataatataatttagttattggcttcaggttgctgatataactcattcatttttacaacctgcaggcaagaaggtatggtcattagaacgatgctctgagtaatttaagaaaatgcttggtgttttaaagctaaatcagaattggtctaaactcaaacataccttgtttatatagttagatggtgggggtgttgctagtggtggccttcgcgaattaataccatgcatagcaagaaccgccgtagctgttggtgtcgatggaattttcatggaggtatccaactttatcgcaagttttgtcatctcgttgaatctttgttccaatttggttatgaaacttggttcattttccggtgaattaggtgcatgatgatcctttaaatgcaccggtcgatggtccaacacaatgggtgagttttactttttttcagaccatatccattagtctgacacaatgcattcttgatcatcgtttttcttcccgttcagcctctgcgtcatctagaagaactgctagaagagctcattgcaatcgcggtaagccctttacattatcccataaaaatttaatctgtttccttttgttgtaacattggctcttataacatctttgcagagtgtcacaaaggggaaacaacagttccaaatcgatctcacgccttatcgtgattagaatcaaagggtgtgttagtgaccgataaatcaagatagaaatgttgaactctctttgtttgttttctcatcatttgctgattcttttatgcattttgc

SEQ ID NO: 36023 - DNA, 2758 bp, Arabidopsis thaliana landsberg
tggggggtttttggttatataataccttcccttttttttttaattgtcagtaatacaaaaccttctccctttcaactaatgtgttatattttatcttttttaaaacaccatttattttaaaaaaacgtccggaatttccttttgtgaaagacaatttggaacctatatacttatcttttacaaagaatctcgtgctcttgatgtttttgctaggcaatcggacattgttacacacttacactgcatggtaaaacgaatatagtgggaaactagagtttcaaaagcttaaaatgttgaaaaggtaagcgtcctattgtaagaaaatatcattaatacaaaattcgatttcaaccattattctataatagtgtaaattttcatttagttttaagtattgtattggatagacaaaaagtctcaaaaagtacaatatccctattttttttaacaaaagcgtaaatcaataaaacggaaaacacaagcaagtgctctttttatgacaggaattgttgatatgtgtaggcacttgcacgaggcatgttcaccgtctatggacaatgatgcataagaacatcaagtcttctaacattgtctagacgcagatctcaaccctcgtctctcagattacggcctctcaaaattctaccttgtgagcattaagttctctttaattttgtagaaatttggatttagttatgacaattaatatattatatggtgtgacagagaacgagtcaaaatctagcagaaggatacaatgcaccagaagccagggacccttctgcttatagaccaaagagtgacgtctacagctttggcgtcgtcatgttagagcttctcaccggtcgagttccatttgacgggtcagtttcattttatagcaatagggttaacaattaggttgagctatcgattccgtgttaaatacatgtacttttttttctgctttaagaaaaattggtttttctgttggcttgtgatataaacagagagaagccaaggccggagagatcgttggtacggtgggcgacaccacaacttcacgacatagatgcattgtcgaatatagcggatccagctctgcacggactttacccaccaaaatcattgtcaagattcgccgacattatcgcattatgtgttcaggtggaaccggagttccgaccaccgatgtcagaagttgtggaggcgcttgtacggatggttcaacggtcaagtatgaagcttaaagatgatctttcatcgtcttatcgagcccacgacgattatgattactagagttaagaagaaagagtagtgacattatatatttataagacaagatatatagttaataattttcttgacacaaaacaagagaagactaaatcattatttattcattcaaatagttgtgtgttcatcttttaatattcggtgtattccgtcgctggaaaaacattcatctcatttaaaaagaaaaaaattacataaataagtaaatgattaattaacgataaacacaacttttcggtattctgcgagtgcccataatgggaaggtgtttctgtatgtagcatagtgtagcatgcatgtattcatgaacgctcctactatttcctgtatatgcacacacaaaaaatatttaagcaagttcaaatcttgatcacagatcatactttcttatatatgttctagatcatgtctaaaaagaagtaacctgttgaggaaaatcgccgttttcaagttgtgaattgatgataagtttggcagcacgatgaagaggagtcaaatctctctcagcctatatgtgtgaatatatatacgaaagtgtaagcgagtatcggtttcgagaccaactcgtgtatttgaaattagaaaaaaaatgcaaatatagattaaagtgtttgaacctgtcccgtatgaattagagccatcatagcccatgatgtttgcacaaggtttgatctttctccttctgatggtatatatctctgcataaaaatcatgttaaaaaatgtgataacatttttcatgataagttagatgaattgatcggacaaagattttgcatttatgtctcgacatacctgttcggagcatgataaatagctttcaccccaacctccatcatctctttgtgtcgtgagcaaaaagtggacacctttgcgcatagccaggcaacttttgcaagttttaccagctgctgctaggcctccaagagcaaaccaagtagcgtagatgaaacagataccccagtttccatgcctaacattactcaaaaagaaactattaccttaagagaaaaactatattcattaaacacgtcttaattatgttaaaggcataccatgaaccatcaggcgtttgtttgctttcaatgaattgcacccctttctcaatcgacttgatgatctcttttgccctgtgatccggataaagttggttgaacagtaccaaagcttgtataacagctgaggtacattctacatactcgcgttcagccataacacaagtaaagaaatctgtgggattgagcaactgcaacaccagttacaaaggttagacctgatcacctgaatggttatattcttaacgattttcaaatccgcaaaaaggacatcaaaaggtgtccttatgtgttgtaactcttacttccagccattcttgtgcacggacaggctcccatgcagtcaaacctcctttttcaccctacatcaaataaagttgtgttcgtgaatattaattagagacagagcttttaacaaaattagtctta

SEQ ID NO: 36024 - DNA, 804 bp, Arabidopsis thaliana landsberg
ttttatgggttgattgtattgatttttgttttctaaatgcttttagcgaaacagtcctcctacgtgtttggtgatgtacctaaagcacattccatcctcgtgaggttactaagccgacgatcttatatattgtttattggcaacaagttcattacaacttttcttatcataatagttattacaacaatctttaacatttagttttgatatgttatgattgaagcaaaaaaagcactgcctaaaatatcttgaaaacattatacattatgaatgctaatgagagttccttatatctttctctcaactcttaagggatcttcaaatgagtgtttttttttaagccaaaacaattgtgaattagtcattcactttcatcttattcagattacaatgtagtattttagaaactaatgtgtagtaaaaaattttatataaaatgcctcttatttatataaaaaaaaaaaaactacggctgtgatgagaaatgttttcccaaatcccaatagccatgcttttcatcaaaattcatatatgaaatcatttgtatcattatcagtgcctacataatacagtaataaacacccccactatcacgttttttggtgaaaaaggctctcaaaatataattctgttactgatttccacctaagtattttaatagttgatttagaaaagcaaataaaatcatgatttatttagaaaaatggttacactttaaagtaatgaagtgctcaaaaagttttttttgtcgccaaaaagtaattatttatttatttgacatagaaagaaaaaaaagattacagg

SEQ ID NO: 36025 - DNA, 699 bp, Arabidopsis thaliana landsberg
gtttctaagaggaaccgatatatgccgcctaattgtttagccaatacagccgaatgaaaatcatctacattccgaaatcctaaccctccttccgctttactattacacattttattccaagccatccaatgcatacctcttgaatcaccatttgaactccactaaaacttagcaaccacacttgtaagtttggacgtaattgttttcggacgtcgaaaacaagacataacgtaagttggtaaagccgcggctaccgatttgatcataacttctttcccgtctttggatagaaatttggccgaccatccatttattctagtctgcaatcgttctctaacaaaagagaaaattttagttttagaaccacctaaactttctggtaatccaagataagaacccatcccacctaggttagtaatgcccaaaattaaatgaatttccgctttaatagactcatcaaccttatgaacaaactgaattgaagattttgaaaaatttatctgttgacccgaaaccgcttcatattgctttaaaatacctagaattgttccacattgttctttattagctttacaaaaaaataaactatcatccgcaaacagaagatgagaaagtgggggacttggtgtgggtgcgtttgtgcgcgtggggtggtgttggtggggggtgggggtctggcggcgtgggcgggttcttctt

SEQ ID NO: 36026 - DNA, 1195 bp, Arabidopsis thaliana landsberg
  unsure (1)..(1195): unsure at all n locations
gagaaacacgatacaattttcagaaaaagagcacaaggtaggtgaaagattttttctttctttttttctcatcacaaactctgtgcatttctccacgaaatcattacttgaatagtaacccgtctctcttatatttgcttactgtgagcctgcgactgtaatttatgttcttctctttctaaagatttgcgttttgtttgaatcggagtttaattcaagaacccttttttacacttctttcttctaagggttttaggttgtagctgtgtgtgtgtgtctcacttatctcttgtgggtttttatctcttttgaagaacaggaacagttaaaactcgggatttttgggtatttgagaagcaatcggaacaacaacggcgtttgtaacgcggatttatgtcggctgtgtctgaatcggctgcgaattcgtctctgtttctaatctcctttgcaattcaatcgncttcttcttcttcctcgtctgtcttggtctttggtctgagtctgacgactgttcttaacgctcttcgcttctgctccgaacagaggcttattcttgaggttccttccatttccatgggcttaagacttaaaaggtttggccttttctctcttcttctttatctttttcttttgttggtgaaggagaatctaaaggttttaagtattggttctggattgtgattttgtgcaggacttgttctggtgttgaagtatttgggggttttcacgaaaagcaaaaaataccctttttcatagttcgctgaaacagagaaatctttttcctgaaaaaaacctcatccgatttagcagtttttgatcagagatttttgagtggggtttttttggtgtgttcttggtgtgtttgagaagatatgaagtcctttgtgaaacctgagagagactctttgttgagaacagttcgtattgttttcactgatcctgatgctactgatgattcctcttcctctagcgatgaatggttacctaaacctcgaaaggtaaagcgttttgttcatgagattactttcctccctcaggtctccgagagttctcaggatcgtagcaatgctgtcaaaacccctagaaggaaatctactaggcagtttaagtatcctgtgggagttaggccgaggccatcaggcaaatttgctgctgagattttgtacccattcgctaaaactaagaaatggttggg

SEQ ID NO: 36027 - DNA, 1807 bp, Arabidopsis thaliana landsberg
tattttgtaagttgggtcattcggtaatcttttggttctaacattgtagaaaggtacgagtcgagtctttttgggcagatgtcacaaactgatttccaaaaattttaaaagactcagtgttgtagcaacgatggcttggtttcatggctcttaagttctgtttcagtgctcttaatgtttgattcactttctccaataatgagtagctttgaggaatcaggcgtattcattcatgtctagcacgaacaagtcaactaagatacggtagaatttgcaatttcgatatttcgagtatatatactacgccaaaagactaaaagaatgatcaaatttgtatattataatatttgggtaaaatgtgaaactacgtgataatatgagggcatatttgaaagtttcccaaattaaatatgaaagcagctttcttagtccgatacgagatcgccgtttctagggctcttttggtgtccctctacctctcgcgcttgaatcctgtaatcgctaacacagttcgtcaaatttcaggtttctctcttttactccttacgattttgataaacttctcgagaattaagtttgtttgcttatagaaattgtttttaaccggctgatacatagattcgactttgtttctagcttgatcgtttttttttcaccagtgtcttccgaaattgatatcgattttcaccttttcttatctgggatggacgaaatttagttcctttccggtttaattttgagggagaccccatagattttgctccgctatttctagggttgcgattcaatttatgattaatagctggtttaagcgggcattgaggatttgttattgtttctgtatctatggacaaaaagtatcaagctttagcttgttgcttttcctaatgagcttaattcctctttcaggtttcccgggctcgtaggctctttctgtatctctcagcatttttcaattacataaaacatggcggagatacagccaaatggaagggcatatgagtcattattggaaaaggatctttcaatgaacattctttcttctgactattttaaagagctctatggattaaagacttatcatgaggtaattgatgaaatctacaaccaagttgatcatgtggagcccgggatgggtgggaattgccgtggtccttcaacagcgtattgtcttctctacaaattctttaccatgaaacttacagtgaagcagatgcatggactgttaaagcacacagattctccttatattagagcggtgagtgaatctcttaaccatcttttttgcattattgtcctgcataaagtatgagctaccgtgatgctataaccttgtctttttggttttggttttcttagtagaatcttaaaatatgtctttccatcttctggcttcttcttgattttcagtaagatctagaaatctaacagtgtgtgctgcttgttcctatacctgttcctcctgttacttgttaccaagctttgttcttattagtcaattttaacccgaaaaaggtaggtgttccttttgattgtcaaataattatagagcatattacagtcaggtaatagcattccttacctctgggttccatctgaaactattcttttctcatcccgtattgaaggtatgagcgtacacataattgttctcgtgttttcatagcagattttcacaaccacaatcaaagttgggatgtcattctttctttgagttgctgagagtttctcccaccaaaatatataagacctttctttgctaggagtattcgcatatcaaggtttgaggtgtcttttctattttagc

SEQ ID NO: 36028 - DNA, 1638 bp, Arabidopsis thaliana landsberg
  unsure (1)..(1638): unsure at all n locations
cataaacgagctatacgatcatagctaatatctgattcaacactctctcctttcaaaacaactttcaatatttgagctctctcctggcaatcaggcatcccgatctcaaatgactgaggaaaacgcctcaatatcgcttcatcgagctctgatggtctgttagttgcagcaagaaccatcaccctcgcattctctataaaaccaaaacatcaaacctcagactgtacatagttcacatggctaaacagaacaatgaggacaagaatttcaactcacggtctgtagtaaatccatcccataaagccataaactcggtcttcatattcgacattgcttcattatcagtcgaccgtcgctggccaagaaagctatccacctcatcgataaaaataatagcaggttggagtttatacgccaagctaaacacagcagacactgaagaaaacataaatcagtaacacaaccaatagacaggtaatgtaatctccaaatctacacctaccaagcttctgtgcatcaccaaaccacttgctcatcaaattagaaacctttacattaataaaaacagcttcagactctctcgcaatcgctttagcaagcatagtcttcccagttccaggaggaccatacaacaaaacacccttttgaggacccagtaacttcccataagcaaaaagctcaggtcttttcaatggtagaatcacaagctcatacaaagcttgcttaattgactccaatcctccaatagaaccaaattcaacatctatgtgtaatgggtttattacatcacacgcaatcacatcctgttttcacaataaacaattgaaaagattggattttgaatacgaattcaatcaattagagaactgtatagaatcaaaattacctcgtattgattggtttgaataagaggacgacccaaacgtttggcgatttctcttttgtgctcgagagactttttagcggcgtcacggttcgggtcaagttgacggagaccaacgtagagaaccaagctactcaatgcagcactagcgacgtaaagtatcaattgttctatgaaatttgaatcctttctccctgaagatctcttcatatctttggatttgggaatcagagaagattcaaaacgaaaccctaattcttgaagagcgttcgtttgggggtgaggatagggaaaggaagaagaaagctctaaactggaaattacaggaaaagaacagttggtggcattatcgtaatatcgttgagaattgtgtgcatattggtaattgttttggaactggcttaataggccttgtnnnnnnnnnnnnnnnnnnnnnnnnnnnnnnnnnnncttcgaaagcccaatttctaatattataagattttgtgaattctgtttttgttacaaaagtagcatttggaaaaagtcgactcctgaaaaatagtctctgtagtatatatttccttaattcctttatatatctattattcaatactcactatacaattatttatttctagataagatgcaagacatactatagctactacaagtgcaagagtgtttatcgagttatccttacacgtttcgttgtttcatctcccgtgcactctttttcgtactataatggaagtgaaagagtcattgaatggagt

SEQ ID NO: 36029 - DNA, 1460 bp, Arabidopsis thaliana landsberg
agccagccttgaaaacacctcggggtcgctgcaagtaaccttccgacccgaccttaggaacgcctcgggtgctctcaggaaaccaccccgaggcgaacctcagaagcacatcgggtaaacgatttagctcgcgcaaaatgagccgtctagctacaggccgacaagaggcacccgactcggaagaaacttcgtaccaaggccaaagcaccttaaacccgaggaaaagactcagacccgacgcaagatcaagataccatttccgaaaaccccggaaatgatattgggaaatctttaaggacattatcgatagggagaagatcccgcgaaaatctacagaagataaagaaaaatcaccaccgcctctaagataacaatgaatctcccaagaatatcgcgaggggcggttcaccaaaaccctatataaagtgcttcaagggaacaataaaggggacacgcacaaaaacgctctcaatttcaggctatcaaaaacgctctgattttgaaggcaaaacacttattttccatatttctaaacacttgtacgatcgaatcctcattatttcaataatataaccaagaacaccgtccgcggtaatcaaactgttgttctttgagaaactcacaaagattcgttctttgaagaaacccttagtacaatttctcttgtgcaagtttcgactctcacaatttggcgctagaaggaggggattgagatttctcttactcccagaacacagaaccaaccaaccaatccacaatggtcaacattcaaatccccggtaacacagttgacgtagagggaaacccgatccctccaaaccaaacagacgttcctgaagccaccgctcctgcgatcctagcagaattgaggagcatgatggctcaacttcagaagaaagtaaaagatcaagaacaggcaaatcggtctttggcgcaacaactcgaagcagctacctcccaaggacagatcaagactactcgtttcggcgcgcgcatcctcaagatcgacgactgcagcagatctctactcaacacgactcgtgtccacacgcctggcaatactgcaacgcccgtccaccgaccggcaccagaaatcagatgagatcgaaccgagccggcgatcttgggaaatcgggaaataaattgagcagaaggaaacaaaccgcagctccctcctccccgagcagaagttgccgaggccgatcagatcggggtctcggacgatgaagattcggaagagaacgttaggtgggctgaggaatacgccagagaacaggaaataagcgccatcaagctctccctagccaaggcagagaacgagatgaagctcgtaagatcccaaatgcataacgcagtctccgcggccccgaacatcgactgcattctggaagactcccacaacatgccattcacacataggatctccaacgcgataatctcagatccaagaaaactaagaa

SEQ ID NO: 36030 - DNA, 1369 bp, Arabidopsis thaliana landsberg
aatagccgacatgtgtcatgggatcattgtaagaagtaagaacaccgcatccaacacaataattaagcgaaagtatagtagaagggctcatatcaagtgtaacttggaaggtccgtcacctagggaaaggtatgaaagaaagaaccctaaatcaaaaaagggaaaaaaaaccattttattaaatgtatttctccttggatttcgatttgaattttttcctccatcccatgagagttttgttcacactcacctctcgaacctctctctttttaatcatcgcccacaaatattttaaattccagaaaaaaactcattcaaaacaaaatttcagattcatttttcgggaaagcatatacagaagaaaatcacatgaagatgaaggcgacttaagcgtataaatataagatgggtttagggttttgaagagcccattcttgatgggctgtattcggattatcaaaccggtttaggatctacttagtgagacccggtttgtcctatcgcaactttggataaggctattccatcatcctaacacaggcttctcttctgaaaagttcgtctcatcgtctcatcgtctcttcgtctctgtctctcttacacagctctctgaatttcggaatcggatttgatcggaaacttggaatgttcaataagtttggttcgacgtcggagactcttagcaaagcttcagctgggttgcttcggatcggcactgacgctcatctttatgatgatccggaagacgtcaacattgctccacttctcgatagcaagttcgaatctgagaaatgtgaagctcttaagcgtctccttgctcttatcgctcaaggctttgatgtctccaatttctttcctcaggtgtttgccttattttgtttgatccctttgatcctagaattgttgctccgattttgaaacaatttttggacgaattttaatggcaggtggtgaagaatgtggcgtcacagtcatcggaagtgaagaagcttgtttacttgtatttgctacaatatgcagaaaagtatgtgaattcaattcagcaaatgtctttttgtttgggcatctacatgattagcttctattgattgtgtaggcgtccaaatgaagcattgctatcgatcaactattttcaaaaggacttgggggatccaaatccattggttagggcttgggctcttcgtacaatggctgggattcgcttacatgttattgcacctcttgcacttgcagctgtgagtaaatgtgctagagatccagctgtttatgttcggagatgtgctgcaaacgctcttccgaagttgaatgataaacggctggaagaacatgcttctgcgattgaagaggtttgtcctgtcaatatccttag

SEQ ID NO: 36031 - DNA, 3613 bp, Arabidopsis thaliana landsberg
gattcaacgacggtgatgattcttcagccactactacgaataatgatgggacccgtaagacgaagactgatcggtctaggactttgatctctgagagaagaaggagagggcgtatgaaggataagctttatgcattgagatctcttgttcccaatattactaaggtaagtcacaacattttcaagatttggtaatgactaatgaaactgtaaatattgatgaagtatgtgtgtgttggcatttagatggataaagcatccattgttggagatgcagtgttgtatgttcaagaacttcagtcacaagcgaagaaactcaaatccgatatcgcgggtcttgaagcttctttaaactctactggagggaaccaagaacatgctcctgatgctcaaaagactcaaccttttcgcggtatcaatcctcctgcttccaaaaaaatcattcaggtaataacctaaaaaaaccaatcaatcttcttgaaacatcaaagtgtttaaagtttgtatgttttgttgtgttagatggatgttatacaagtggagagaaagggttttatgtgagattggtgtgtaacaaaggagaaggtgttgctccatctctttacaagtctttggagtctcttacaagtttccaagtgcagaactctaacgtaagctctccttctccggacacatacctcttaacatataccttagatgtaaatcaacttgtgcccttttactttgttttgtttccgagtataccgtttacttaccgagttttcttgtgtggtggaaacaggggacatgcttcgaacagagcttaaacttgcctaacctgaagctgtggatcactggatcacttttaaatcaaggttttgaattcatcaagtcatttacttgattctataacgcttgctctaacgtgagtcaaatccggttctgcactatattgattgtgtacctttcttacatgtttcacaacttccagggctctaatttctaatctagtaaaaatgtaaccgagattgttgattctctattgaataaacaccatgttatatagtaatttagcgacaaattgtatggttaaatgaagtaatatttatgttttgtttatagtctcaagtcttaagtttcttttgctttgatatatcacggtttgggtcattggctatattattgctttgttgttgcaagaccattcacatcttgattctatgtattgttctctgtttgattggtaaaagaataaagaattttaaccccgagaaagcagtacagacgacctatatggatcgccgactcaactctaggaacctaatttgtgctttggatattcataacatggtaaaacaaaaagattctaatattgttgctgttgcaagaccaagacagatgcccttgaaggaaactcctttgacgctataacatctccgagggctccaagttcctcgaactctgtccattcatttaatccttttgtaaccgcgctattcattccgctacttcttccaactataaacaaatcataatcatacgctattgatctaagtatcactgaagtctcagccccttctttgacgcttttttctatacatatccatgaatcattttcatttgaatcctcagtcttcattatctcttttatgtcatcgtaatccaacttctgcaccgagtcttcgctttcctcggtagtaagttgaggtatgaggtgtaagatggttacgcttgtctgcttgtttctcctcatacggctggtgaatgctaaggcttctttatcgtctttccctcccacaactattgcacacacctgaaatacaaaccacgagaccagtttagaacttgttaagatcacacatcggaagaaatgtgtaggtaccaacactagtatagaaaaaacatgggccaaatatactaatcgtcggtttgttttgagttggaagccagacgaccccaaaaattaaccatgagatctcttaattacaaaagaaaaaaaacaagtaccttgtaacatgagccgtgcatttgagattcccataaaggtttccggtagacgaagattccaacagagcaagacgctcttttcaagactttgtggttgagattctgcatggccttgtcgtcagagacaatggttgagcggtcaacagaccaagaacggtgaaaaggaagtacaacgagagctacattcttgtcaagggcaagccaacagaggtcctcgtgcatgtgctctaccaagctagcagatgtaaagatgtcaatggaaattgcctctttggttaaatgtctacgaaggcttaagaatgcagttatgacattgcgggagcaagagctattgagcaagacctaataaagagcatccgtccgtacaaataaagaaaagaggccgagtgttgtgtgtaagctacaaggtgttgggccgaacacattgagaagcctatagggagcttctagaatgagtgaaggcacacaaatatctcttgtagccgttgaagagaactcacgagtggtcttagcttcatggtcaaccaaggaccggtcactctcaccattaagaccaaggaatctcttctctcatgtctctttcattcgcatgttatgtgtaaacggctatgttccctttgtgtgtccttaaatacaatgtaaacacacaaaggtaactaaccaattctagtaatatgtttttgtcattctcactcataacaatgctctcttgttcttcatgattctcttacccttactcttactctttccaaactacaattccgcatattctttcacgaagcagctgaagaagctcttaaagtacatgaccttgagtgttgacccgacctataactaacgtcacatcaaaactctggcgtgacggtcaagatatcggcttagccccatatggtgagtctttgagagagttgcggaagctttcctttctcaagtttttcagcacgacaaaggttcgatcttttaggtacatcagagaggaagagaatgatttgatggtcaagaaactgaaggaagcggctctgaagaaatcttccgtagatttgagtcaaacacttttcggtctagttgggagtatcatattcagatccgcctttggacagcgtttcgacgagggcaatcatgtgaatgctgaaaagatcgaagacctcatgtttgaggtccagaaactcggagcactcagtaattctgatcttttccctggtggtttgggatggtttgttgactttgtgtcgggacataataagaaacttcacaaagtcttcgtcgaggttgatactctgctgaatcatattattgatgatcacttgaaaaactctatagaagaaataactcatgatcgtcctgatatcatcgactcgctcctagatatgatacgaaaacaagaacaaggggattctttcaagctcaccattgataatctcaaaggaattatccaagtaagcatagttcaaaacttttatcgatatgttccctaacattttcttgaacgcaaactttgatagtacattagtatgttaatattcataggatctatagataaacgtgagatcttctatactcgttgttaaaagaattcttaacaaatcttgagtcaaaatatgtcattgactattatgcgacgttcttga

SEQ ID NO: 36032 - DNA, 1439 bp, Arabidopsis thaliana landsberg
agataaacacgtgtaaactcaaataattttgtatcaaattatttactagtatatcataaatttactagtataatataatactgtatatgataatcatggctattaaaaacttgtgataatcattaaaatggcattttagagatctatgtatagttattattaaaaatatatttccttttaacattataacagctttgctaccacaaaacattatctaattctaaatttctaatcttcatttttcaactaactcaactaccaaacagtggaataaagtcaaaagcatgtgtaaataaataataactcgtaatttattttcttgggtgcttttcttttttgaccaaaacatatataaataaaactaacaaatgcaaaatatcctcgtatgacccactttatgaattctttataaccttttcaaattttattttaaatcactcgccgcgaatgacgaatgtcccctcctcaatcttcgcatgtttgctcgccatttaactacttctttacttatcataccaaaaaaaaaactacttcttaattctattaatacataaacgtcacgtcacacacacaataatcacatgatcactatcgctagaaatctgctcactcatatcacattaagctctcttcatcagatgggttctatggctctgaaacccattaaatggtaagtgctgtgtttggcataatcgaccacaatgttgaagctagagagggtaagctcttctttagcaagggcactcacatagatcgtcctaacaacaaagatgtcgctctatctccagctccagctgccggactagcccaagctaatggaagactcggaaatgggtctttcgggcctggttccggtatgattcctcaaaccaaagagtcatggccaagttcatccactacaacagacgaagagtttgagaaattgatggctacatttgacgaagaaaagaataccaagttacccgaggcattcgaggaagaagaagaatctgaagattcggaagatctcaatgagccaaaggataagtacaacaacaacaacaacaataatggatacacttacactactaacaattataatgacaatgggagaggttacggtaatgaagaagagaagcaggggatgagtgacacaagggttatggagaacggtaagtatttctacgacacaagaggtaggaattcagaaaacacccctagtcgcgggtatgagaatgctcgaggaaatgatcataccaacgagtttgaaactatggaggaatactacaagagcttggagggtagtcaagaagagtatgagccttagaaggaaattgtatttgagaaaacaaaacacttttttggagcaattaattatattgtgccatctccatttacttgtcttttatgaaaagtgaaagtaaaaacacttttaagttatacaaatcaaagctgtgagt

SEQ ID NO: 36033 - DNA, 1015 bp, Arabidopsis thaliana landsberg
  unsure (1)..(1015): unsure at all n locations
ggcacaaagtacaagtactaaatactcaaagtcagataataattttaataagtacaaactatatatatgcagtacaattattgagtatatataaacgagactgtggtgatttggggcattgtccaccagggtgttatatcccaattgaaatttgaaaatttaagtgtgtgagtgttacgacaaaaaaaagtgtgtgaattgtaggcgcggtgaaaaggtaaattaagattggaactagaaaaatagttgaatatcctttactaaaagttgtcaattccggttttagtaaaaaaaatttttaaaatagaaattttaatccaaaagacttcaaacacacatattcgcatatataacataagatatcattttttgtaaacagttaaaaagaaaaacacatgctttttttttttaatttagaaaaaaacatgttattatacaaaacagacgtttgcccacttttaatatgttatgaaaagaaaaatgattttcttgggtttggtcagagagattggttgtggtaagaatgggaatcttaattacaaagaattggattttgggtggacctaccacctaaaacgacgtcgcctccatctctggtttccaaatctctttctcctctccctttataagcttgcgttggccagtcgctcatctcgaaaacagagagaaaaagactaaaaacacagtttaagaagaaggagagatagagagagaagagaaagatagagagggagatggggtctcatatggtttggtttctatttcttgtatccttcttctctggggttcccagctccatctgagagcatggttcgccactacaagtttaacggtgagtttatatattcacagttccatttacagatcttatgctgattgcagcatataacatagtcgcaacttaactntatccctgcttacgtaaagaaacatacatattgggttgtggcttncgtagtggaacatantgcattatgtaatctttatattatgagcctttacttacaaagattac

SEQ ID NO: 36034 - DNA, 1408 bp, Arabidopsis thaliana landsberg
  unsure (1)..(1408): unsure at all n locations
atgacacgtgcattaaccagctgttagagatcttgtaggcagccacgtgttctttagatcccactgaatcattacgctcaatcgaaaacattctggtgttatgataactcatgagtcaccacgacaggaatctttgggccattgttaaattcaattattgttcaagcccatattgctattaggcccattatctgaagtgaagtggggagatgaagggaaagctttttcgtgtctattataaaaggtaaaagatgaaagcttcaaaattagagagtttacttacaaatatccaacaaaaaacatgactcgagaattaaaccaactcatatgaacatttacacatatatatgttcgcttatatccccttttccttctttcaggtgttctcttgccgtaaaggaaacttatttatcaccattgataccaaagatgcgtaccttgtgcatgttggggaacttggcaacaacgagaaccatcacagcgagtgtgttgaggaacagccatggatgtctgtaatctgttgtatgcgatgcaatcaagtacctgttttaaatgtgtcgttataaagtcagaaaacaagtacaaaagctaaagagctcaatcttaaaagttcatccagataaatgcagctcttgtttatacacattatcgcgtatacagagttctctagaactagtccgttacacatcaccggatttagatatgtgtattgagaaattagcatatttattaaccatatgagacacaaggatatatgcagctaaagaaaataatttgctaagaaaatatagattggaaatagacaagagtggtgagattttgaggaacaaggtgctgggacttacaagacaacaggaacaacggtgagaaatttgcgattacgtgtaagctgcttgccattatcaatctgttcccaccaagtcaatctattatnnnnnnnnnnnnnnnnnnnnnnnnnnnttcccttcttccaatggaaggaatgatacgtgacctagaaaacaaaaaaactcaaaaattcaaatctagaaaccaacaatttcgaaattggatcggaggagatcgggaataatacggtgaaatgagcgagatgaacaatggtccaagcgatgccaggagaacaatggaagacggagagaacgaggagccaagagaagaagaggatgagaatataagtagtccaaacaccaggatatgtgaaccactctgtgttccgattcacatccgtcgtcggaagtgctcttacgtacatcgtctttttcaccggagagatttggaagaagatcggagatgatgattgatgaatcgtcgttgagcaagttttctttcgtctttgttttttttttctctgctgcgttctttgggctctttctgggctttttattttctacatntttttaaaaaagaa

SEQ ID NO: 36035 - DNA, 795 bp, Arabidopsis thaliana landsberg
ctgtttatcttacctgtcatcccaacgctgctgtggattccagagagattaacactaagtgaataatctttgagactcatcagcgaaatcacctccctttccgctctacccacatgcttcttgaggaattccggatctttgaataaagtgtaccaccgtttgcaagtaggcttcaatttttgtagagatgtggcgggaactcttgagagtatttctgtttctaaatctcgtggaagatcggtaaacatccttgtttgtttgtcttgtggtttctgacctgattttacataagaaagaaagcaacagtatgttagatattaattagggctttaacactaacaacttggagaaagcagatacaaaagcaatgaaacaacgattaaaactcattatcacaactatggaggaaactggatcaaaactgaaccaaaaaccgaaacctaactagccgaataatatataatcgaagcattggagatcaaggcgatcagttaaaccctagaagacgatgatggaacacgaaatcgaacctaaacaggatcaaatatttagaacaatcgcagaacaaggattagatagaagaagagcttatacaatcgaagaagagtgaagatcaggcgaagaaaaagtgagaattcgtgtcttctcctgtgaaacaaagcaatgaagatttatttaggtataattttgatacacaagtaatgtacttatcagctaacactctaaatggttgggttgttgggaccaaaatttatctaacgggcgaaccaaagacaaattcgttgcgatcggagt

SEQ ID NO: 36036 - DNA, 516 bp, Arabidopsis thaliana landsberg
taatgtcagctctcatgaaggtaagcacattttttttattagacgattctaagggtacgggacacctcctccagtctattaggcgaggtatgttctcttggcctgagagttggctttcttgacgtcgtcttataggtggtggacgggttcagaaggtgcgcgacccaattctctctcgagcactaagtgaacctttcagtcgctcgttgagacctcatcaactagttaatgctcgtcgagacctttcttctttttgattctggaatgcttctttttcaggatagatagggccgacaagatcatcagggaagaagtcaaatcacatccgaattcaattgttcttttccaagaaccaaatgtgagaacctggaagcgtaaaccgggggagatgaagcggacaaatccaagcaaatcctcggattctattctatcgactgatctttccttctgatgtcgtctattctgtaggaatgagagctagagtctctatattcatcacttcctctctttccgaga

SEQ ID NO: 36037 - DNA, 2671 bp, Arabidopsis thaliana landsberg
  unsure (1)..(2671): unsure at all n locations
tgttacaagtcctattcatccacttcttcacttttttttttgttatcttactaaagcattggtgatgaatctgcagatggagtctgtgaaaccattggatgttgtttcttcaggaaaaggaaaactcagacgcacatttgctaaagtcatcaacatgaaaaagctaaccggtgttgttccagaaggtaacaacaaggttgaaagagtgaagaagagccaagaaaaggtgaagttggataaagatttagcaaagaatgctgcaaatctgtctgagtcctttgacaagctggaggaagagtatgagaaaagactggccatggaggctcttcttgcaaagctgtttgctacgatttcttcgataaaatctggttatgcgcagttgcagtatgctcagtctccttatgatccaaatgggattcagaaagcagataacttggtagtagcagagctgaagacattatcagagctgaaacagagtttcttgaagaaacagcttgatcctaatcctgatagaactcttgttcttgcggagattcaagagctaagaagcgtcttaaagacttatgagatcatggggaagaagctggagtgtcagttaaagctcaaagactctgagatcatatttctcaaagaaaagtttcaagaatccatgactcagaacaagttgatggagaagagattaaaccaaagtggccaactttgcaatccattggatcataatcttcatctatcggcggtaagttcgacccatttcgttacttatctgcaccacactgtcaaatccatccgaggattcgtcaagttgnnnnnnnnnnnnnnnnnnntcgcggcttgggacatcgatatggctgctgagttaattcagcctgatgtactctattacaagcaagaccacaagtgttttgccttggagcattatgtctgcaagataatgcttgaagcttttcaactaccttacttctcaaacgaatcatcgaagaagacgagcagagaagacaaagcaatgttctttgagagattcacagagcttagatcgatgaaaccaagagagtatttagcatctcggcctaaatcaagattggctaagttttgcagaactaagtatttgcagctcatacatccaaagatggagcaggcattcttcggacatttgcatcaaagaaaccaagtcactgcaggggagtttccagagacgagcttgtgcactgcgtttctcgaaatggcgaaaagggtttggcttttacattgccttgctttctccttcgatcctgaagcttcaatctttcaagtatctagaggttgcagattctccgaagtgtacatgaagagcgtgtcggaggaagcgtttttctcaccggagcaagaagaaagctcgtcggaaactgaaccgagggttgcgtttacggttgttcctgggtttagaattgggaaaacgacgatacaatgtgaggtctacctctcgcgttcatgtcaacgccgtcaggagcagatagattccggtgatgacgtctcaggggtattagggtaatttatcttggggaactttttgggggtaggaaaatatatgagagaaaatttgttgaccgttggattaagagaagaggcaagtatgtatgttgcttgttgagatttatggtttttatttttatctttgtcaatattagagcagaaagagagtcagaagcatctcttagctgttttccatcaaattattagatgttgtcactaccttatatcatatgtaaattattcgtaataattagtaactattgctattttcattattcgagttatgttgtagttgatagtataatatgatatcaatatcatagtagtgaatcaaagaagaatgtacatatgattaaagtgagtaattcttgtatgagtggaatggagatatcagatatcttctaaaagtgatttcgaatcatggactgtaaaaattttcttaatttttgactttttgatgaccaattcctctatttatttatttatttccacaaccgaccaaatattttcagataatatactctgatgggtccattgtattttgggccaaaaagcagtcctctattttatcaggatcagtgggaattgactcggttttgttctacttgtaatgggttatgacaaactgagaccaaaccagccattttacccctgcattcttattacaaaacggccaatgttatattgtcaactgaaatagttgagaaatacagtttacaaaaatttggcacctagaaagagattgaaacattctacaaagcgataaaactttactttatctttgaccggacaataaatgataggcatttcagaattttaggaaaaaaatgaaaaaatcaaaatgtgaacgttgatacaataagaaagtcggtgaacaaaaaaaagataatataaaagcataatatagacaatataaaaattggttcgaccatcccaaacactacggaggacccaaaatatgagccaagagacagcgatagcaagcttcaagaaattccaacagtcatggatcgagcagctacgaaaccacctgaaccacctccgctccgcccaaaaccatcaccggaactctgctaccggtgatgaggaacggttaagggaggctgtggacagagtgatggaacactttagagaatatcacagggccaagtgggctgcgacg

SEQ ID NO: 36038 - DNA, 1218 bp, Arabidopsis thaliana landsberg
acgtagcttactttaatcttgatcagctcaagtaaaacactgatgttttgttagctgctctttctagtttgatggcacatcggcctatagcacgaacagccttccgaacaaaatcaacatctacttccgtggcatattctttgaactccagaagaacctacattggaatggtctagaaaccatcatgatgtgcaccaaaacaaaataacttggacaaacggcagatgataaaagtgtagtaaggattacctggtctatgtttctgtcagaagcaagttttatcataatctctaacttctccatcttaacatatatcggatcattatacttgcagaagaacacctgcaataaaaccatgaagcattatcaacaaatataagaatatatcaattgcttatttcggagagtctacgagacaggatcaagctaccttgatttcatgggcaagaatagtgggtctcttttggacaataaggttaatgttacgaagtgcaacatactgtatctcaggttctgcagaaagcaatgtaactaggggaggagccatcttcttgcaaagatttcgaatcacatctgtgctagtaataagctccatctgctgaaggatcatctggaaagcaatgaaataaagaggactggcattagaaaattatgtaagggaatatagttgacacttcataaacaattttgactggcgaacaggtgacattccagagagaagtatatattttgaaagtgtctgcttaacagctgaaagcacaacagcgcagttggcatgttgcaaccttggtgttactctctaacaatattttcagtttcacggttatcagctgctttatacttcgataaagcatctagtataaaaacttgaccccacctgcgatgatcatggtcagtactaaaaatgaagctaccaaaagcttatccattactcattttatgcttctcttccccaaaggttatatactgggtcattatctacagataaaaccatcaatgacgaaaaattctaaactgctgtttgaaaatagttacaaagacaacggaatgatatgcaaacagaggccataccacatcaaacaagctatttcacaaccatcaacatcccctaaaccctgactggacaatggggccataaatactcaaaatcgaacagaatgcattgaaactactgaaatggagaggacttactcagtgcattcatttagagcagtaagg

SEQ ID NO: 36039 - DNA, 3026 bp, Arabidopsis thaliana landsberg
agctcatgctacagttgttctgtggtgcttggcagaccccaaaataagtttacgagaattgtaggataagttttagatcaaatcactttctaacatctcatgaattaatctagaccaagagaaaagaataacgtaatgtgcgtagcttcaagggtttgagaattgtttggtgaaaagcgcaggtttactttgggaagacaagagaaatggtttgcacattgcgtccaccagctgagattgtacaaatgagattgcctgacacctgacctgatgctcctccgatcacgctttatgtaagaaggtctcgatatttgtttgttttggttggtctgatcttaaacgcttctccgagtgttttatgtggatgtctcttactcccatgtttttctctgacttcaccatcatgtgaccatcttttcccataaatataacgaatgatgcagttttaaaagtcgtataaatattatggaaatgcttggttttctccaaaagtatataatagcagaatcagtggtggctgcgacatgttgtgaacttaggacctaaagcatcaaacctcatttagagatatcgcactgccttcgacatgcataccgaatggacaaagaaagccagaatccttgatgtaatcgccatatgagtccgtttagcgcctaggtgccatctacacggtcagtaactaataacaacctaatcaataactatacaaatatttttgtccaacatataaaaaaagatattaaaataaatttccttttaaccaaaatatcaggttcctttttcggctgtcttttttttattcttggtcgtgagagagatataaataaatatcgacgacgacggtactaatcgttgtgctaaataatttcattcgtcttcttttcttaactctgtaaaccaaaaactgaaaaatagagacaaaaagtctcctatcgacgacgaatacgaaagatctctctcttcagaagaatttaacgaaactcaactgtttcgaattcgatttgaatctcgacccgttacttagcaggaagaagatgaagcagcgcttcaccttcttcttcgttatcttctcttaataatccccaatggcttcatcatcatcccaacgacgctgcgtttttggtaactcactcttcttcttcttcttccattatcactctgtgaattctcttcgattttggattcaattggcttaaagttttcgactttcttcgtctattttagttgggaacattccttagggcgggggtgatgaacaacttagagaaatttgtggagaagttggacctgttgtctcgtttaggtcagttttatcgttcaattatgatttagggttttgataaaggaaacacttttcttcaaacaaacgaaacacagaagcctaaaaaactttgctttattggattcagattagttacggatagagaaactggtaaaccaaaaggctacggattttgtgagtataaagacgaagaaacagcattaagtgctcgtcgtaatcttcagagttatgaaatcaatggtcgtcaattaagagttgattttgctgagaatgacaaaggcactgacaaaacccgtgatcaggttactcctctctctctttcttctttcaatgttggatggtttttaactgttgtcaagaagttataactaaagatggtaaatttgggttttcagagtcaaggaggacctggtttgccatctactactactggtatgttttgttttcagtctctgatactttactgactgcaattgtgtttggatgaacacaaacttatcgttgttcttctttcttttggctgtttagtgacagagtctcaaaagcagattggagggccagtagattcaaatatgcatcagccagttggtctccaccttgctacaacagctgcatctgttatagcgggtgcgctaggtggtcctcaggtcggttcgcagtttacgcaaagtaatctgcaggttccagctagtgatcccctggctcttcatctagccaagatgtcaagaagtcagcttactgaaattatatcgtccattaaggtgtgaatcttgatatcgttttttctttcttttttttgggtgcattgttatactattggaagcgagttgtgtgatgtgattgtgttctctcaatgtcagttaatggctacacaaaataaggaacatgctagacagttgttggtttcaagacctcagttgctaaaagctgttttcctggtactcactcatcctcttattttgcaaatcatttttcattattgacaaatatttcttatgatacttacaccatatttgaacctttactttgtctacccttgtaggcgcaggtaatgcttgggattgtgagtccgcaagtggtaagttttccatcttatcgaacagttttgtgctacttccttctttatctatctgtcatgtcttaagaggactattgccattcttgaattgtgcagttacagtcgccaaatattgttcaggccccaagtcatatgacagggtcttcaattcaagatgcgcaattatctggtcaaaaccttttaccgccactggcacaaaggtcacagcagctaagtcgtgctccccatagtcagtatcctgtccagcaatcttctaaacaaccttttagtcagattccacaactagtagcacaaccaggtccttcttctgtgaatcctcctcctagatcccaagttaaagtcgaaaacgctccattccaacgccagcaagtggttccagcttccaccaacataggttatagtagtcagaattcagttccgaataatgctatccagccatttcaagtaccccaccaagcattaccaaattctgtgatgcaggtgagtttccacaatatttttatttgtttttttggattcctctgaacataacttctcatgtgtaatttacttacattacagcaaggtgggcaaacggtatcatttaattatggcaaaagaataaacgagggtcctcctcatcaatcaatgaacagaccatcaaagatgatgaaagtggaggatagg

SEQ ID NO: 36040 - DNA, 4545 bp, Arabidopsis thaliana landsberg
cacccgttttgttgtggaaaagggactaggctctcgcaatgggcaaaaaatgcaaaatccattatctggtgaggtctttgtcatgtttattgttatgtcatgtggcgtctcaacgtttagaggatattttgggagccagtaacgttcgagattcaaaattgtggatgagattttaacgattgaaacaaaagtactaaaaaatagtcgtttattagcacatgtactcttttttttgtttggacagctattagcacatgtactcttatatgtatgtatgtatataaaaacgtgaatagtgagtggaataagagaaagtagttaaaattcaaagcgataagagtaccattttgtttttattatattctattctatggacgcgattcctctgcgttgtttacctattcaaatgaagttctaagccaaaaaaaaaataagtcgatttgtttttatgttcataacaccccacgggctaactaatatggtccaaaacaatataacaacaacaaaataatcattcaaaaatctaaaaaaccagccttgtgtccatactccacccacatatataaggagagaaacaaaaagagcgtaagataaatcaaggagaagattaagaaagatggtggctgttcagttgtttacctggaagccattgattctaccttctcaagctttgacaagagatcgattagcttcttttcacaggtttttcttataattcaaatttctgataaaagttgcttgctttcatggtgggtgtgacttatccatcagatgatgattttgtgactgtcgaagattttggtttttggttctgttttccgatgaagctgattcatgtttgttttactgtataaaatgtagcagagtttaatgggttttgattagaaatgacaatggttcttaaatttgtggagtttctaatggaagctctgaatctgtgttttgggtttatgttcgaattgaatttgggactacaataagctaaaatgatacaatcaatgctcatttagtcggattgggtatttaatgcttacaagttgtgtatctctgaaagtttcatttttgcaggagcttgagtttaaagtcttcgcctttaggtgggattgagtcttttagatgcccaggtgaggtttgctatagtacagatgcaatctttagggtcttattgttaatcttcttcctatactacagggaccttcaaagtcaaatctcagaggacaggcgacacagaaccgtcttctagtgtcaacctgaatgatttcagttccatattccataaggttaagctaagccatgtccagtgtcatgtctttatctttctgtctttgaaggatgagtcttagctcattgtgtctattggtgatttgatgtctttcattgtggttgcttcttgtttagttatggagatgttatattccgtatgcttatgatataatcttcttattctgcagagtcttcagtataaagtggagacaggatgcatcccactgtatgcggtgttcaggatagcgcaaaagatatgtcaagagcttcctggcctcgttcagaactcagtgggggctggcttgccttttgcttgtgcatcgaactctctacctactcctctcaagttggatgtctcatttccttcttttcaagatatcagatggggtcttgcaaggtttctttacttgttcaatattcagcttgagaagaacattggcacgtatgtcctaaacccaattttcttatcagtatgctaattatgtttcttctatttctgtaagatatttgtatgtacaaatgttactagaagcattgttcttgagattagcattgttcatatgtagttaaattctatttttctttgtgactatgagatccgttctgatcacttgtcgttgctattttaggttccttgtggcgctcatgatagcatgtgtatcgtttgttatcattgggggactcctatttttcaaattccggtaattcaggtttggttaactcatcttatcgatttaaagcattcctatgatcgtcttaggcgtggttatatgatcagttgttctgaaactctataaaacacaattcgtggttttagtctgctgaagaaattgtagaaaatcaaaaacttctggtacatgtatattatgtattatatgaagacccttgtaaaaagacttaaactctaactgatgaatttccattgcatggtttcttacttatgcgtactttttttgcctttttgttgtgaaggaaagacctaccattagaagactgcctctgggaagcctgggcatgcctcatttcctcttctactcatttgaaggtcacgattttcttcttcaccaattcaaagatattatcccagatcaattacaacttacaagcctcacgatatttctatggagttcttgcaactaaatgcctatatgtttactaaaaactgcagcaaaagacacgcattgaaagagtcattggatttgtcctagccatttggggaatattgttttactctcggcttttaagcacaatgacagaacaatttcgggtaagttcttgagataaacactaatggtgagaaatggatgttaattggtacaatttcctaatcgttttgtttgggcagtatcatatgaaaaaagtgagggaaggggcacatatgcaagtcctagaatctgaccatatcatcatttgtggaataaacagtcatctgcctttcatactaaagcaactcaacagttatcaacagcatgctgtccgcttaggtaccaccacagctaggtaatttaaatttggtcacaccatgaatttaatttacccatttttgttgacttgggtaatcacttttccttgttatatgctttcaggaagcagacacttctgctcatgtctgatactccaaggaaagagatggacaagctagctgaggcgtacgccaaagattttgatcaacttgacatccttacaaagaggtaatatgcagacgtgaacctgaaattaagttatgccatatatattagttattgttcttgttggtttgcatatattttacaatgctgatttcattcttctatcagtgcagttgtagtcttaacatgacaaaaatcgttgaaagggctgccgcctgtatggcgcgcgccattatcatactaccaacgaaaggtgatcggtaagaattaactacttttcattatggtttagtttgtttggttctgaatgaaaacaaagtataaatattttctgaaacctgtcagtagtttgtaaaagagaaatcaattaagttaaacattgtttcaggtatgaagttgatacagacgcatttctttctgtattggcccttgaacctatacaaaagatggaatccatcccaaccattgtagaggtaagtgaagattgtgcagcaatggtttttatgtctttttagtgctgatttgtttcctatcttttgcttctgaatatgaatgcaggtatcaagctctaatatgtatgatcttctcaagtccatatcggggttgaaagtggagccggttgaaaattctacatccaaattgtttgtccaatgctcacgtcaaaaggacctgataaagatctacaggcacctactaaattactcaagtacggtgtgctttcagcttactttactgttatctgtgtagaatttttagttcatgtttgtagtcaagactaattaatacctagtctacttgttgcagaaaatgtatttaatctttgcagcttccccaatctagttgggacaaagtatagacaactaagactggggttccaggaggtaggattgactatcttgtgagcattgttatttcgttcttcgaatcagtaccttttgatctttgttactaattccattctctacatgtattcctgtcaggttgtggtctgtggccttttacgagatgggaaagtaaatttccacccaaatgataacgaagagctcatggaaaccgacaaactattgtttatcgcacctctcaattggaagaagaagcacccattatatacagacatgaaacttgagaacattacagtaccgactgatactcggaagcaagtgtttgagaaaaaaagatcacggctgtcgaagattataatgcgtcctcgtaagtccttatcaaaggtctgactcccaactgccccctacaatacttttgaaactgcgcctttgaaacttttgagacctctgattttcatttctatggtttacacagggatcagattccgtcagaggacccacagaatctatacttttacttggttggcgtggagacgttgtgcaaatgattgaggagtttgataactatcttggtccaggcagttcaatggtatgatctctctccgcttggctctgacttaatgagttactaatagttttccgtacacaggaaatattatcggatgtaccgttagaggacagaagaagagtgggcgatagtatagattcagttaaaatcaagaacatccaagtttcacataaggtaaatgtcattttcagtggcatgaacaagaagaggttcgaagtcattgtgtattaatgttttccaatct

SEQ ID NO: 36041 - DNA, 1353 bp, Arabidopsis thaliana landsberg
gttctccttgctcattggttcttttcttagcacgtttttaccttttacacacgccattgactgcaagcttcgctttaggtctggggcggggatttcagttgcctgttcgatctctttgtagcttagtcgatcagagttgttgaacaacataaggacacacatttggaaagtcgaaacgtttagttcatgcttctgaccctttccaaacactgctttgatatctgctgttcccatattcgtttgccaagacaatctcctaccggtgtgagtcccgaggtaatatgacctgaacttctcacacagaacagaaacttctgcaggtaggttacattgtatggttggctgtgtgggccaagaaccagttgtgagaacctgaacaacaagtgtaggtccttctgaaagctcgggatggctattataaaacccacgcattgtgtcctctgaagtcttcatgtcagtgaacatgccttccaattttgaagtgaactgatagccacattctgtctttagtttcactattaaactcctttctgcgtcatctgacacagttttgcctgagagaagccttttagccaaatgctgcttgtagtacttctcaaagacatctttctcttgtaaataacggaacagcatcatcactttatcaaggataacctcaacatccacatcggtgatacccttaagtcctttccgtagcttgtcatcaacaaacagggagataaactcaggagaacgagcattcaagttgatgaaatactcgaatgaagaattcagggcattctgaaaggttttatcattgccaaatgcggtgttgatgattttgtcatatttatcccgctcatccaatagacgttgtacaaattccaccggatcctttgacttttccggatcagtaaccagttgttttcccatctccctaagatgcgaagtcataacgtctctgacagtaacaagaccattagtaaccctgcgaaacaagttgtacattctacccaaatcctcatacttgtcattcagaagcatattaaccagacctgagttctccatgtgaaccagtctctgcatgtggttggcaatcatctctttctcaaccacactagtaatcttctcttcgctcttggcatctaagtagtgcgctaccctctctatctcttcagtaaggcgtttctctgatttcttcagatagtccccacaatcacaagattcaataaactcctgagactcaaccttataaaactcagaagacgcatccaaaaacggcttctcaaaatccttctgatacacagattcacccaaatccataaacatcttaatgacattcctcattaaccccctatcaataacttcacctat

SEQ ID NO: 36042 - DNA, 1586 bp, Arabidopsis thaliana landsberg
  unsure (1)..(1586): unsure at all n locations
attcaccattgttgttctgaaagtgttgtagcagtaacaaaaaatagctgcggcgataaacatatggcggatacagatgtgaatttctccagtagatgaaccaccccaaattatttaccaattaaccgattaaggactgaattcaaaaccggaagcgtatcgattgtgttggaatatccgggaaacggcccgagagacaaatacgtaataattcgaaatgaacctaattttagaccggtttagtcaagaatccgtatatgtcctctcgtgatgctgatattaacaactttacccttatatctgtttcagtccaaaacctcacaaaaagcaaaaaccctaatttacatggtcgtggcctgactaatccctaatttttccgagagcgtcgacgccgacaatcgccgacagagtttttgcttctcacgcgatagaaagaagatgaaggagacgagaaagctgaagaagagtaatctccctaaaggtaggcctaattttctcgcgtttatattcttacttaattgatttatgaggtttcattacagaaccgaaaagacctaactatggttgttgtgtatactaagattgtgttcttagaggtaacttatttgatttcgaaagttgagagctttaattggaatggccttgaacttaattacaaaggttaatcttgtgaagcagaagaagtaaattgcttatgcaaattattgtttgtctaattgacgtgacggataaaatcaattcagaagaaactgttgggaaaaaaattcagaggaagaagaatgagaaagtgagcaatgtcgaattaagcgaggatcctcaggctgcacagcttcaaggtgaaagttttggctttgatggatttagaagtgttttatagtgttttaagatgtgttatgatgttgagtatagtatcttgtttattattccttaccagctaaatcaagtgagaaacccaatagaaagaaaattcagaagggtaaggaaataaaaagctctccagctgatggtaagctgagtgggaagatgaagaagagaaaagagaaagtaggcaatgttgatataagcgaaccgattctggaaggtgaattcttttgtttttggcagatgaaatctattactgagctgttagattctggtattgagtttagtatctctggttcttgttacagctatttcaactgagaaagtaaaagaaaagaagggcaaaatgaacaagactaagaagaaaaggaaggccgaggaaataactagatcttcagtcgaagatctgaaaagagaaagtgagtagttcattaccatgttttggttgtcttatgttagttctctgaatcatttgcatgaggaactttagctagttttaagtctttatataatattttctttgagcagaatgtgaactttactgtctatctaactctgaatctgnggttcttatgaatgttatttatgtttgacatggctgtaatggaactgaaataagaaaccggtagttcagagctggtttaatgaagtagattgttttttgtaggcgagtctaaagactttagaactccatcatcttggtaaataaagaaaaattttttctt

SEQ ID NO: 36043 - DNA, 1289 bp, Arabidopsis thaliana landsberg
ccattcttaaattgagtccagatggagatatcatagattgtgtccatatgaaaaatcatgcaatttatgatcatcctttatttaaaaaacacaccattcagggtcaggttttttgttttttttgaatcagaattgttttagggcacaatgttatatgcattttgtttatggattattcatattttaattaaaaattacaccattcacctaatcattatcattatttgtacacttgtactagacgaaaaattgatgctaatactaaaattaatgaatccgtggaaaatgttttaactaaatacatttgggtttgccatttttatttaatctgttactttaattcaaacaattttgtgtggtagatgagaccgagttcttacccagaaggatggagcaataaagattcagataacgaaaaacataaaatggttcctcaactttggactttctatggacactgtccattgactagcatttcgatctaatgaacgagaagggaggatattttacgagctcaatcaatttacaggcctgggaataaagatccccacaatttccactaacataaaccaactcatcctactcctatcgtcagaacacatgcggtgcatatatgattcatcattattccttttatgagtatatatgttggtatagtacccaacatatttacatacttaatatacagtgtgccatacttaaagtgggagaatattctcctcgagctaaattttatggaacccaaacgcttataaatgtgtggaagccttttggacaacatagaaatgaatttagcttatcacaaatatggatgtcggctggaagttatagtactcaacttgaaaccattgaagctggttggcaggttttagtctttcttgcaatatttgcatgtttatatataaatatattctaattttcttatattttattcattgattggttattgattaggtgtgcactgtactttataacgatactaaccctagatactttgtctactggactgtgagttaacttccaaagcatagttaaattttatttgggtttttgatgacaaaaaatctcgtagctttgtttttgttatgtgtgttgtttgattacatgaaaacagaatgattgatatacacagcatggttgctataacaatctttgctccggctttgatgttgacgaccaagcatttgctctaggcgcggacgatcctgaagtttctatccgcgatggtctacaatactaaatgtttacaagtatatggaaggtgcatataagggctcttttttatcata

SEQ ID NO: 36044 - DNA, 1030 bp, Arabidopsis thaliana landsberg
ggagagcacgaagaagaaaagtttgttacgaagatcgttattctcattaatgaatctggactgcatacatgaattatttataccgtaccggtttacaattccagaaataataatactaaaccatactcaaatagtcctctttctcttattttacctacattgtctttaacgcttcttaagttctttcaactctttcttcttagtttccaattcatctcctataacttggttgctttctgtctgaaacaagaaaaatattcattcgacgtttccagtttctggctgagactagagatttccccttcaagctctatgatcatcatctttttcgattctgtttccaccgcagtagaattgcttagcagtgagtttctcccatgttttgcgaagcatgttaacctcgttttgcttctgctgcagcagcaaagatacagactttaatgaaccctccaattcatgcttcacttcacataagtcctggtctttctgttgtaaagcacaaatctctctctcgttctgcaattccctttcaccaatcatatgcgcaagaacgacatcctcaagctcccttctaagtgagtcttgttccaacaactctacctctctctgtagactttccaacatctcgtccttatccctcataagggattctttcttctctgaatcagacgatcttgcatggctgataacctttagcttatgcaccaactcattcttctcttgcttaatggcttctccaactccaacctgttcaagaagagaagcttctactcttttccgcaggttctggttttgctcgagttcagcttttagccttttagcaatagatttccagacccacaattggaattcaatctggaacacttcagaggttttatcagataattcagaatttgctatctctagagcctcagaaacgtcagcaagtttcctcttcgagtcgttttccacatctacaactttctcttgcaagagaagttgagttttggtagactcctcaagcatatccttgtaatgatcaagctcccgt

SEQ ID NO: 36045 - DNA, 2618 bp, Arabidopsis thaliana landsberg
  unsure (1)..(2618): unsure at all n locations
tctcggtgcagctcttctctatgggtttatattgccacttgtcgatctttcttacaagaaatctggtcagcgaatcgcgtatacgctcgcgctcgagttccagatggtcttatgctttgctgccacttgtgtctgcctcgtggggatgctagccgctggcgatttcaaggtaaaacatgctttgtttattttcaagaatagggtttgagaatcaataattgggatctttgactttcttgatccaaaagcaagataaagatttcatttttaagccttttaaaccaagagggtacctctggattgtttatggaaccctaaaaggaagatgtttgaattttgtttgggaagaaagagtatgctttttctaatcaagaattgggatctttgaatttcttgataggataatgtttcatttggcaggtgatagcaggagaagcaagagattttaagcttggagagtctttgtactatgtggtgattgtgttcacggccataatctggcaagcattttttgtgggagctattgggttgatcttctgtgcatcgtctctggtctctggaattatggtcagtgctctgcttccggtgacggtgatcttggccgtcatttgcttccaggagaagtttcaggcggggaaaggtgtcgctttggctctctccctctggggatcagtctcttatttctatggacaggttaaatccgaggagaagactaaggctcaggatacacaactgtctcagcttccagttactgattatgtagcttaaaagcacataacatgttacaatttatttttgttaatgatgtctgtaaaatctatgagctgtgaggtgctcattgaatcaaagacttgatctgaaatcttttaagcaaatgtccatccattatatggaacaatgtcattgtttatttcatttgacgaactggtccagtattacacttcacacgttttatctttaatacagaggttactgaaatgtaaaagaaactaatactagaaagccattgacgatggacagctacgagatgtcgagatctcagttccttgtactgtttttcaaccattctaaatacttgtcgctcccaccagtgatgggcaacgcaattacttctggcacactaaaggtaacaagtaaaccatatttattaacttagcttgtgtgattgctaaagaaaaggcaagacactcgcattactcatgtttttatatgcagaatacgtcatagaacaatgcttactcgtattcgtgatttgcattgacatgctcggttagaggttctagaagggattgccttgttttgattatcaggagctcctctgaatcactctgaacctgaagccaaagggtttgattatgtgcaatatattcagagatcagctagcaaaacagctcagtttcaagatgaacaatgttccaagcagaatatttatgttaagaaggagggataatcggtgttcaaaaaaaaaaaaaaaaagtacgagggttaatgatcatttgtaatattgatgagatcttataagtctttctaggggttcctaaaagctcacagatcnttgttcaactattatcaatggtagtcctcgagatcggattgagatcaaaatatactgaagaatgatgtttgatgtgcttctattgttccgtacttacctggccctcccagtcgtacaccgattcaatgcctgcatccaaattccaagcaaacaaacataaacatcttctagtgacagaactagtagtattcaatatcacaaaacaaaacatgccagcaaacaaagtagtaagttctatattcaatatcataaagcatgaacagatcacgaaattgctagaattagcttccagttctttcttgaattaacttcattctttttctgaatagcaaaaacattctgaccaaaaagtgattacgctagcagataaggttctacaaaatctcgaccgcagaaacccaattagacgatagaatctgtttactcaagttactgaaattcagactggaaacaaagaagtaagaggctaacacaagaaaaggaaagtaccaggcacaatgttcacacacgctgcaagcttttcctggacaatgctgttagccaacttcttccctgccaacgaaacaaatagtaaaaataaaagattaagaactcgcagaacatcatctaccactgagagagaggtcgatcggaatataaaaaataagagagccattagtgacatctcgatcagtaaatactctagcaagtatacaactaaataggtgattcgatcagtttcttaaacttaatgaatacaagttaacaaggagtttccttaagctactcctccaggttccaaatttgcctacaaaggtctcaaccagtaaaatcttggatacggcaacagaagaactagtactaaggaagtcatagagtcattggaaagagaagtctaagctaatagagatatatatacaggtatccaaaaaagggaaaatctttcatgttcaaaaccgataagaggaaaccaaagctccatagttgttatcattttctcaccatccagaaaaatgtgactactgtcaaaggacaatgcccaggttcctaaaaacacatgacattgagaattaaagcaaacacg

SEQ ID NO: 36046 - DNA, 452 bp, Arabidopsis thaliana landsberg
atctaaattgtgttcctgcccatttatcatgtttgattaaaggttttgacttttaggatttttattgattctctgaaaattttgaggtttatcttctgtaagatttgtctgtctcaggtgcattggatgatttcaaagatctcaatctttctcatcaaaggttactcctttttcctatgtgtttacctccatagtctcaaacttttttggatttgagtttagagactttcaattcccaagttagagatttctgtgttttagctctgaatcgtttttgggatgtgttgttgtagaaatcaaagggaagctcaagaggaggaggagaagaagaggaaagaagagacggttttattaccgagtggggttcaaggtcttggaatgggattaccagatatgagaagcaagaagagaggaaaacaaaaggtttccaaagaggatcatgttgctgaagc

SEQ ID NO: 36047 - DNA, 4832 bp, Arabidopsis thaliana landsberg
  unsure (1)..(4832): unsure at all n locations
aaaaaccaaattttgctaccttctaaaaaagaaagacttgcatcaccatatattttgctttagcaaaagatttagagttttttaaaaattacaaatgtttttttcaaaccaaaataaaataaaaaaaggtctttacgaaaaaaaagaaaaaaaaatcttctagtttgagtcaaactgagttccgagtcagacacgaacgcgtctaaaaacgttaaggaagcaaacgagaaagtgttaaataatggactcgcggattctcgtttgattgttgaatgacaaatattacccctgatctttccggaaatggtgattatatcccgttatcgtcaaataaagttgacattgccttttactttataatatataaaaaaacaccacaagtgaagtaaatctataattcgaacatcggatattgaagatcggtttgtgtgatagtttaataaaacagtccatttgatatctacgaataaaactttaaaatacatttaaaagtaactcgaaatggtgattatatcttgtgatcgtcaagaaagatgatcatgtcggatagtgctatcagtataatcagttaaatcacatgaattttttcataagaaaaagcttgtttcgaaatctataaattgttttttttttcttgtagaaatcaataagttatatttacacataacatgtgggttgatttatgagatgatatcatcaatcagatcaattatacggtagatttaccgtttggttaagtatatacaattaatgtttttgtaaattgtgttattaatccattttactttataattttctccgaatcaataatatctagatccccttttatttaatatattatccctttcaagtttaaaacaaaaaaattgtattaagatgttatataatgcaaacactaatcagaaccaaaagttatattcgtgatgtacccatcgtcataaatcataaaactaagatgatatacattcatgcatacaagatgacgtttcaaatgtccaaaaacctttcagtttgttttcatatatatctcgttttttctctgattaatatttcgtcttattttaaaagttatcaaggtatctgattcttgtaagaaattcttccatatcaagtatgcaaatcaaatatgcaatgttctgtatctatgcataacttaattcacaaattaaaggtttaatcaatcttcacacttttgagaaggcataattttttctttgtagagcttccaagcaagaacgagtatccctaagtcgttagagccaccattttggtacaacaagttgcatgctcacccgccgcctcttcggttaggccgattagtcgctttatgttattcctactttatgaaattcgttaaagtttcaagacttttaattactagttattgatttttttatttctataattatattgaccagttgttttgttagatgtagcgggagcatggtcgtattatattggttaagtctcagggttttgtctccggcttcatgaacaaacgccatgctagtcagtcgatttgacttcagcgcaattacaacccgcaaatagccacaaagtcaaacatatccaaaaatatgaaaaatgtaagttgaccacacaaaaaagctgtataccaatatttttattggttacaatacgtacgttgtcaaactcaacataccggttacctttgattttttgaatactatatcaagacacgtttgaataaattttcatttgaactcttcatagtatgaagttcatacacctaaaattttcaacggcaaagaccattggtattcaattttgatgttgtactattttcaaattaatttaaaacacaaaaaaagaagtacttttgatgttgataatgatatatgatgtaaatatgattgtaagcacaaatttgattcgtgaacgttgtactgtgtatagtgttgtttactgtgtattatgttcgggcccttgggctttgtttgtgtcttaaaaaatttagactatgaatgtatgatataagtccagagcccatgggacgttttcaatatttttctatcacaatttaaggtaggaaagaaatagcaaagtatgtatgcaactggctaaatcaaatttgaagaacgtttagtaagtcaaattatttgcaaactgcaaagtatgcgttgtaatggcctaaaattacaaaaatacttaatatctattataattactaatgtgaaaatttaatagaatcaatcagttaaaaattaaaagaaattattaaagaatgtcaaatttggtaaattcttggtttggcttgatttagaaaagagtttgataagccaacgatccttgtaaaccgtcttgatatgatccctgttgctttgccaccaaagatggcatccatgaaagagcttgctgagctcaagctcatttcctagtgtccttggcctctcttctttattattgatcccgaacttcgctctctctatagcttccattatatcttcccgtgccaccgcttctccgcctgaaaacaatcaagaaatcgctagtgtctgttaagccaaaaaccgcagcttcatcccaaaagatcaaacctgggaagcaaccagatcgaataactacttaaatcaagaaagggctgttaaaagatcacttaaagactgacctctacgagcagcaagcaatgcagcttcattgacaatattggcgagatcagcacctacaaatccgggagttaaagaagcaaccagatcacatatgagaaatgcatcttcttctaaaggaacgtctctcagatgtatggccaagattttccgacggccttcttggtctggttctgcaaccaaaacttttctagagaaccttccaggccgacaaagaaaaaagtctaacgcttctggtcggttagttgctgcaattacaatgactttcgtgtctgactcgaatccatccatctcagtaagcaactacaaaggaagtatatcagcaatggagtctacatggttaaaagggtactaaatgttgattctttacctggtttaacgtctggtcacgttcatcgttgaaactcctaccgcgttttcctccaaccgcatcaagctcatcaatgaatataatggaaggtgagtttttccttgctgcattgaaaagatctctgattcgcgctgcgcctcttccaacaaacaattcaacaaactcactagcggagacagagaaaaatggaactcccgcttctccagctacagcccgagccaacaaggttttaccggtccctggtggaccgaccaaaagcacacctctcggtaatcttgctcctagttttttgtagtttatacttccttgaagacatgagactatctacaaagaaaaacagaacacatggaggttggacttcaaacttaattctataaacgttgcatttacgtatctttttacctccacgagctcgtctttagcagaatcaacaccctcaacatcatcgaagccaacagtgggatttttagaccgtcgtttcttcgcagggctgttagatgctgagagttgccgataaagaagccacataagaggtgtcaaaggaatccacagagagatgattgttatcaaagtagttctcattgacatcaatgcggattgaggagctgaactataagtaatgcctttctctctcattaaactaagaagaaacttctcatcatgatcgacttttcttgtcacatacttccacacaggaggcaaagctcgaacctttcgcggagtatcgtctttcgtaacagcttctgtcactgtgccgccatcaatttggattgccggatcttctaaagtttcagacttgtgaacatcatcaacaacctcaacattctcatcagtgttgtaatagattcgacgtgagccttcttcgagcaaaacctttgaaacagaaccacctcgaagattcgtaacgaaatctgagtaaggaacaatggatggggacggaacagcagttaacctcaagaacaaataacacagtccaaagattaaagccacaccggtggacaagatcactcttttgagattctttttcaaaaaatatcgaaaatcttccattgatgctctgaaatcaaatctgccaagtctcattctcactaatcgtaatctaggtcgaagcctaagagaaaaccttcttctcttccctttgtttctaccattttcaccaatacgagtctccttatctccgtaatcaccagtcacaagtcgcttaatctcgctattacaagaaaatctattacgagaatcgccatgaactctaataacccctaatctggtttcaccaatttccataaacccaccaagtctcctgcaactaaacgattgagtcctgattctagagacacaaacattaagctcactactcctcgaagacacctttctattaaatttctccggagaataacctccattgaatctaaatcgattgctacaaagaacattgaaagtagccatggattctctatcctggaatccgaatcatgcgttgatcattcttgtgcaaaaatcctaagaaaaccgaccaagcgcaagagtagacgaacgtgtcatacaagtgaagaagattggaattagaaaggctttcgtcttcaagctgatgactctgttaaattgaaaggataagaagagttcgcaaaagctcttttttggttgacagataaaaaacaaaacacagaacaggaaaaactgtatgaataagcattgggcattataaatcgagtcatggcctcatgggccttttagctattgggctgtctttcattttgggcttattttaaaaaataggttactgatttttttggatgggtataantaatttgacgcctatatatatatatacccaa

SEQ ID NO: 36048 - DNA, 942 bp, Arabidopsis thaliana landsberg
aagcttcacattgctcctgaaattagctggcatcattggcgtttttacactttctatggatctcgcttttagctgctctcttgtggattgtggctgggtttcaatctctcaggaccagattatgtcaactttagtcgcaattaagcctttgcctcactcaagtgtgactttatgtgatgcagactctatgtcaggggaaccatacttggctacaaaaggtgcgcattgatacatgatttgctgatgttgttttccactttagtcgtttttgctctagctcccataaacagtgaatcttggctgataatactggttaatacactttttttatgacctcagtttagttgcttataggattcaaaagttagttcctgagaaagtagactcacttgtcttcgtccgatcttagattgttgaatttgggaatagggtatacaaaataaggagactatcttgattttgcttgttatagtcacgagctctacgtttaccaattggcaataaagttttagcgtatacacttaagcaaaacaatctaccatttagtgttgtttctgttttggatcttgtcagaatggtgtccttaaacacgttttgtgtgtaaatatgtacaggtcgaagtcaaaccagtatcccaacacgtcactagtccaagtcgagggagttaacaccactgaggaagtgtcatggtacaaaggtaaaaggatggcttacatctacaaagccaagaccaagaagaacggtagtcactaccgatgcatttggggcaaagtcacaaggcctcacggtaacagtggcgttgttcgagccaaattcacatcaaacttgcctcctaaatcaatggtaatccaaatcatttcagttatatatgtttgaaattggtgttatctctttcctagctcttctaatacagttggttgattgtttttttgcaaggatctt

SEQ ID NO: 36049 - DNA, 1121 bp, Arabidopsis thaliana landsberg
cgcaattcggttcaattcaattatccggtttacatacgcttttatctgattttttagagtaccaattccaatcaaatgccattagatgtttttttcctcaaatagttacattttactttttatatgtatgcacatgaacaaatcaattgaaatgttagatttgttcattgtaaatgtttaggtcttcggataatgatgcttagttttagcaatatatggaagatgatacaactctgtaccgaacctaaaacttctcaagctcataaatacaaaaaccaaaaccagaagtcaatttcaataacctagttcgtttcaatatgtacatggtagacgatcaccaaacacaaagccaaacaaaaccctagctttaagaacacgaaacaacactcatatcgctaactattttttttctggacggcgggaatcactgaatcggaatcagacttggaacataaacatagctacaaataaacgggtcatcgtactcaaactgtccatagcttgctgtctcaatttgttttatgatcccactttcatcaatttcgtaaaacgtgatgataacatacgacttatcatccacgtctacacttccctcacaccacacccttatatttctgcgcttaccaatggagtatcccggacaagccatacaatagtggatatgtaacgctggaagatcaggagtagtgacattgaaatattggctaaacgaaacaaccttatcactcaacttgtttgtcatccaaacctcaatcccctgtgattcttcaccttgtagtaacaaagagagtctatctccatcgaaacagcctaatcgagtcaccaaagtataaggacagacgcatatctccttgaatgtttcagtggagaaatcaaaccttataatagtaaagtcttccttcttcttagcaatccagtacatcttacccttcacagacacaccgttgttgcacctaatatctatatcccagtcaaacttagcaacaagagttttccatgaatcaaacttgaattcatagatctcacaggtttggattctgaaacaattattccttaggccaaacgacccaagaaagccttcaaagattttggtagtttattcacgaagaataacatttggt

SEQ ID NO: 36050 - DNA, 2987 bp, Arabidopsis thaliana landsberg
attgccatttgagtttaaatttagagtttcgattcaaaatttaatttaaactaaaacaattaatttatgtatagaagaagatagaaactttacattggggagaagcgtgacgtgaaggaagtgaagtagacgacaccagtagtgggatcaacgtcaagaccgtcaagaaacttgaaaggctttccgtcaacactgtcggtgatcttcgtagccaaaccaccggcgggagaaataacgtgaagacccaacggagcatcggcgacgtaaagatcacctgttttctcgttgaatgctattcctgctggtcgaccacagcgtccggctaaagccgttccaatagtaccatcgcaccatgaagagttcctaaagtattcaaaccaaaaaacattttaagaacaagagaaacaaataaccatgaacttataagagttcccatgtagtataaaaatgtttttgattagtacaacaacaaaattatatgttagtatccataggtatcatgtgtatcttagtttttgactctttttcacgtggaggcatgtgtgtgtgtgaacgccgagatgcgttttggtcacctaaaccggtatatgacagattgctaacgtaagccgataaaaacaaggaactaaaaaaggttgcttttcgtccactcgtccctacatgaattcttttacgggtggacaaaattgagtaagtatcatccattatttgtaatatacaacacatgtaacaagatttcacatgtgaaattttaatcaagttacatgataagtagcttagaggagtttttagattatttccttaagaaaccataaaatcatcatctcgtaacttcaaatagtccaaaagagaatcggattaaaatgcggatatgatatattttttgtaaaaataagaaggctatatcatctctgatcagtcataaatcataattccataatattgtagccataaagaaacgagtgttaataaacgaatgccatttagattccaatttcaaaacccccagaagaagcataatcatcaaaaagttatgatcttagaaaagaacaagacttacgaggattcagtgatctgggcaaagtcaacataacccgtctcggggaggtacttgaggattttaccaccggagacaccggtatagaaccctttaccggtggaatcaaaagcgaaagcttcgggacctgacctagtttccggcaccggaagtttctggaaagaagcgtcatcggagaaaaccggcgatgaaagagagagaagaagaagaagagaaatcatggagcaaaacgacgtcataccgtttctttattgctcaattattctcaaatgagactttcttgtactttgtagtcgttacgaatatttataggtttgattatttaacttttctttttcttttttgattaatttttaagaaggtttcttattttgtaaattaagttgatggcacacgttatgctcgtcggattattttattagtgaagagattagagttgtttctcggggtttcttgacagattaagttgcccatggaacaaaaagtcaaatagttgcaatccacgtacattgctgatttttggggtagacgtacgactgtcaacgcaagagcgcaaacgcatggtctaaaaatttatgtacttgtgtctaagattgattagaagtaggtaaacttttttttgataaagtagaagtaggtatttagatatcagaaaatatatacaagtgtaattccaaggagcagttgattacaaataaataaaatacatatacttttgagaaataccctagaatatttgcttggatattaaaaaaaaaaggaaatttaagatttttgtgatattgaaaggaccaaatggatactgttaataaatcaaccggtcgcatagtcgcattcaatgatcttagtcttgttgatcaaatattgacgatccatgcgtttatcatcaaacatcaattgcacattgtaaacacaaacgtaaaacgtcaataatatggaatgatttatgtttactgtttgcgtttacaatttacaactactatgtggttaagaataaattgcgtatataaacacacaattttttttaatttttttttgggtgcaaaatacacaggatttcaaagcaatgtttctagtctttcaaaattccgatgtattattacattctagcatatagaccataataaacagaagatataatattatggtctatatgttgggtaaataaaatgcaaatgcacaaaaagaatcataagcttatccgatttttgacctcccaatatatcattatttttcaataaatataaagatggacgtacatattggttgctatcactatcagacttgatggatagctaataaattggtcaccaaagatccgtagccacctttttttggcggggctggcataacctgaaacgatttggtttcgctatttttatgttaaccagtactttatcttaattgtttatcgtagttgtggcctttatattttgcattttaaatactgagcttccaagttaaatgttagtgttttgtgcttatacattgtgagaacttcaaattaagaagttttttttaacttttttttgttgcaaaccgtatgattattttgatttgttaagaaaataaaaggtactacaaagaaaaggggaatatgttatcatcaattaacgttgttgtttcttggtggttcatgtccatgatgatggcttgattttatgcttaatggcgaaatcaaatttaaacacggaaaataactaccacgtgactcaaatgttttccccattaaggccattacgtgttactttatcattaaaattcaaaatggtaaactacaaagccaaattggcgtaaggataatagaacttgctcacagctccacataatttccttcagatccgaagtcttaatcgttagaatcagaggtttttctccattacgatttaccttcagttttgtttggatattcgaaatgattaattatcta

SEQ ID NO: 36051 - DNA, 11223 bp, Arabidopsis thaliana landsberg
  unsure (1)..(11223): unsure at all n locations
agttccacaaagcataagaaaataagtgcaacaagttccaaaaaaattaacaaatagtctgaaataaagcaataacaaagttagaaaacaaagcaagatagggaggttggctaatcctcatgctctgagccggaggtgggtgcgggagagcgatgacggcgacgagtgggagcaacacaaccgcagcgagagagtgtagctatggcgttccagacactcttaaagatgtcgatgacgttctgctgaaagacctgtggctccatcgggataggaggaggagaaggcagatgatatgggagagctgaagaggaagagccaactcgaggacccccagcagggtcgataaacttatcctcagtctgagttggtgcggatcctgaagctgaacctctctatctcctagagcgtggcgcgaaatgcagaagggaaggatcgagatgaaaactaatctcctcatgctctcctataatctctgaaagcgcagggcaaggtaactaaatcatatgttgccatgtatcatctctgaagcaccacagtaggttgcctttaagccagtgagagttctttaggttagtcttatccatagtgaaacacgtggggttgacttcttcgccctcaaagctgatgcggaaatgctcaaatatgggagtgagaagactgctaactctctcagatttgtgtcctctacctgtaaagggcttggtcttgagagaaaccaagtgatgagcgaacacagcaccaaagttgacattacggtcaacctgctcaaatccaaggctgtcaggaaagaagtcatgaagagcatgatagagcaataacaactcagagagtctcatcttgccaggatccatcttgcacaacagtgtgctactaatcagcctaaccaaatatcgcagaacaggagggcggatctctgagtgaactacgtccttggaatcatagattccattaccaaacctgctccagaaaatctgagaatccttaaactgaccaggcaaggaaactccagtgagatcattgtcaaacccatatatgtcacacaaatctcgcagtggtaaactgtatcggacaccgcaaatgaagaagataagagctccttcgtgagcgttgcgtttcctttcatgcaaataagaaaccctaacagaggccatgaattatctaaccagctcagggtacaaatcgtaatgcctacaacagatggttcccaaacctatatcatctagcagtcctaaaaaagatttctctatctgcaaacgctgcatcaaaccgaaatccgcaaaccgattaggcaaaatttctacactcatccaggcattatagaatatagtatcataatcatcccaatctggagaaaaagggcgattgatatagtcacctttagtgaattccctgttgacatctttcttccaaaccctttcagaaggaattctctcttttgaaagctttggccatggaaattgataaacaggaggttgaggagctacgccttgtggttgcggttgggaggggcggagaccggcggcggtggagaagctccagcgttggtgagcggtggcgaaggaggaggaaggtccaacgctcttcctcgccttctttttctgccctgtcatcttgcagatcgatggaattgacatttgaggaagatagaggatgaaattttgatgagtttagagcctgaaatcacaagaaacagtgaagaatcgaagaatctagagggaaaagtgtgatttcggcggttttgaaaaaaatctgaaatgaagaagatgaagtttaggttaaaatgacttaccttgtcgatcgacaccattgcgtttttggttaacactggtttttttttcttttaatcaataaaaatcctataaaataaaaaatcctaagttaaaaatcaaatgaatgaaatgatgaaaaagagaaatacttactagtgggttgcctcccactaagcgcttgtttatagtcaatagcttgactctgcacttgcttaatcaacaggtgagtccagaagatccaaaggcttttctactggaatctcggcttcagccaatagtgtttgactctctttccattcatggcaaatggttttccattgttgtttttgagaatgactgttccatatggcctaaccgagtggattgtgtagggacctgaccaaggagaagataattttccaggaaatattgtcaagctagaatcataaagaagtacctggtcattaggctcaaaggtccgaatgaggatcttcttgtcgtggtaagctttagtgtgttccttgtagagcttcgagttgtcataggcatgaattcgtatatcatcaagctcatttaactgaataagtctcctttctccagcagatttgatgtcgaaattcatcatcttgactccccaagctgctttgtgctctaattccactggaagatgataagctttaccatatagaagatgaaaaggtgtggttccaagtggagttttgaaagctgtcctgtaagcccacaatgcatcatctaacttgtaggaccactcctttttcgccttactcactgttttctcaagaatctctttgattttgcctgttggaaacttcaacttggccactcgtttgtggatggtagggagtagcaacccgatgcggaactccatactgtaaagcaattttgcaagaatcttgttaatgaaatgcttacctccgtcactaatgactatgctggcactccaaaacaagggaagatgatagacttgaagagtttcatgacaaccgctgaatcgttcttcggattagctatagtttctacccatttggagacataatccacaactactaggatgtagagattcttgttggaaggtgggaaaggtcccatgaaatctataccccaacaatcgaagacttcaagttcgaggataaatttctgaggcatctcattacgcttgctgatctttccctttctctgtcaagggtcgcattgcgatatgaacttctgagcatccttaaacattgtaggccaccaaaagcctgcttgaaaaactttggatgttgtcttgaatgttgcaaaattaccaccatatgcggagccatggcaatgcagcaggatgccttctacttcatcttctgggacgcatctcctgtagatcttatctttacaaagagtgtagaaataaggttcatcccaatagtaatggtgtatgtctctgaaaaacttcttcctttcataactggtcaagttgggaggctccacttcgaatgccaaatagttgacgtgatcagcataccatggagatcttccctcaacagcgttcagttggtggaactctttcctgttgtagctcccactaaagaatctacaaccatgagttgctcttctggcattgagtcgtctattggaatgggttcttcaattctcatccttgacagatggtcagtgcaccattttcaatgcctttcttgtctactatttccatgtcaaactcttgcaacagaagtatccatctcaaaagtcttggcttagtatccatcttggctaacagatgcctcaaagctgcatggtctgtatagacaatgaccttggatccaaccacatagcttctaaacttcttaaatgcgaatacaacagctggaagctccttctcagttgttgcatatcttccctgagcgtcatccaacgttcggctggcgtaatatatgacatgaagcttcttgtctattttctggcctaaaacagctcnnnnnnnnnnnnnnnnnnnatcacacatgatttcaaatggatagtcccaattaggcgctcgaacaaccgagcagataccaaagcgtccttgatagtttgaaaggatttgaggcagtcatcatcgaattcaaatttggtttccttgcacaatagtgtggttaacggtctggctatcttggagaagtctttaatgaatcttctatagaatccagcatgaccaaggaagcttctgatnnnnnnnnnnnnnnnnnnnnnnnnnnnnnnnnnnnnnncttcaacttttcctttgtcaacctctatacccttctctgatatcttgtgacccaatactatgccttcctttaccatgaaatgacacttttcccaattgagaacaagatttgtctcttcgcacctggtcaataccctgccaagattcaacaaacatgaggagaatgaggggccatagaccaaaaaatcgtccatgaaaacctccaccatcgtctcgattaagtctgaaaatatagaggtcatacacctctgaaatgttgcaggagcattgcataaaccaaatgacattctcttataggaaaatgttccataaggacatgtgaaagtggttttctcttgatcattagggtgaattggtatttggaagaaaccactatagccatcaagaaagcaatagtatggatgattagctaagcgttcaagtatttgatcaatgaatggtaacggagaatgatctttcctagatgcagcatttcgctttctataatcaatacacatcctatgtctagttatagttctagtcgggatcaattcatttttttcatttttaacaacagtcattccaccttttttagggacgcaatgcactcgagaaatccaggtactgtcagagatagggtatatgacaccaacatcaagcagtttcaaaatttctattttcacgacttctttcaagttaggatttaacctcctctgtggttcaatgctagaataggattcgtttcaagatggatcctatgattacataaattaggtgaaattcccttaatgtcagataatgaataaccaattgctctcctatactttctaagttcagaaaatagcaggttaacttcatcatcatttaactcagtattaatgatcacatggtaagtagagtttgaaccaaggaatgcgtacctcaaaccttgaggaagtggtttgagatcaaccttcgttgccttgaattcagaccagtcatctgaagttggaatgatcagctccacaatgtcgctgatggatgcggtcgagtgatttatgtcctcgagtgagcaagttgaacctgtgttgacccttcttcattcatagccattacctctgttgttgccccattcaatttctcaaagggttctgattcttccatcgctttatgtgagtctaaaagcttctggtagcccaaagtctccaaatgcagaaacccatcttcaccattcttggtcaaagcattattaaggtgatcttcttctacaaactcttccagtaactcatcagctaactaatccatctcttcgatccaaaagagttgcccttctatagtaggcttcttcattacatctttgacgtcaaaggtcatcctaaagtctttaccaaggtttagatcgatcttccatttcttgacattaatcatagctcatgtagttgctaagaaatgtcttccgaaaaccaaagggtctttgggctcctcatccatctccaggactacaaagtcagagggtatctctacaactccaatcctgattggtaggttttcaagaaaaccgtgagggatcctttctgatctgtcagctaggataggggatatgttgcaagatttgtattgattgaaccccaatctttttgcaacggagagtggcatgagactgactgatgctcctaaatcacataggcatctcttgaatgcaatggacctaaagagcatggtagagtgaatgaaccaggatcactaagcttctttggaatgatcttcttctctctcatagcactgcattcatgactcaatactaccatcccttgcacttctagagcgtcaacaagaggtatccgcaactcaacctccttgatgttcttggcaaacatagctccatacttatctgccaatactttcttatgatggccaggaaatgaaagctgtggtttgtaaggaggagggacaaagaccttttctttgttcttgacagcaactggttttagagcagttggtgatgtcgctgggaaggttggtcgagtaacgtggttgagtggttgctcgagtggatgctcgagtggatgctcgagtggtttgtcagctcgatttttaccaagactgaaatcctccccatcttgaccttcactatcctcagtgactgtctttggttcctctctacttggaagtgcttttccactttgtagagtgatagcgtgagcatattcttatggattctgaattgctttgcctggaagttggcttatctgttttggagtagaggaagatgcagaatgtccttctaagtatctgactttggtattcagtgtttccaccttgacattcaaatcattgtagctacagttcagcttattatgtaactcagatatcttctttgccatctccatggagccagaggtttctccgtgaagcagctgttgtagcatttgtttcatgtcagcgtcaggagcagccggaccttggttttgctgaggtgcaaatccagcaaatccagttggtggttgctgcaaatccagccttcttcaacatctttgttctggaaattcccattgctggcggtatccagaagcattcagatgcgtggtagaacttctctgtaaagagtgctgagcagagacgctttagtgaagccatgatgagggcattggttggtgtaacccttgaaacgatcccatgcttcacagaagctttcaccagtcttctgtgaaaaaccagaaatctcatttctgagtcttgcagttctggcgttgaagatgaactttgatagaaaagccttcttacaatcatcctaggtggtgattgagtcaaggggcagattcttctcccagatgtgggctttgtcgcccaaggagaatggaaacaaacggagcttgaatccgtcttcacagacaccattgatttttgttaggttgtagagcctatcgaattcatcaaggtggtcgagcgggtcctccacaggcagaccatgaaatttgttcccctgaatcatcgatatgagaccactcctaatctcaaagttgttgttctggatagcaggaggtgcaattcctttccgctgacgctgatcacgtggtgcatctccagcaccaatgttggcagggccattttgttgattctgttcgtgagccatttcgagtggttactgaggtataaggttgactgtgtttctcctttctctgagttcgcgagctaggcggtcgatgttatcgttgaaaaggaggttctcgttgcctgttgatcgagtttgaatatagcagaggtgtacctcagtcgagaagacaacaagaaaaatatacagttagtaactgaaatgaaaaatgaaaaagaacttgatctaagcaagtctgaaatctcaaatgtaacaaacaaatacacaattggcaacggcgccaaattgataataggttttttgctcaattaatccaaaagcactatcatgtcgttgtagtacttttaggtgtcaatccaaatgggtgtgatgcagacagatgagataagatcataagttgctaagtcaagccaagcagaatttggttggttttctaacagtcctagtgttgatgcagaaaacagtaaaaagtcacagaaatgactgatatactcgatcgcagggtcgactgccacaagggaccctgtaatcgagtacaacaggatgacaaagagtgaaaatgcagaaatggacaagtttactctatcacgcagtctcactgttagtagactgatgtgatcgagtagaatggttgaaaacagaaaaatactaaaattcaatagcaactgaatgaagcaggtaagtaaacagagaaatcaattggatgagaaattcctaaggatggggtaaattaatattgtggttgtaatacccctgacgaatgactggcattcagacgaaagttcgcaaacgtaaaagtgcgatcgtgactttgaaattttttcgtaaagtgatcacccaaagtgatcatagattaaaggaggcttatcgaagaagttcaagagcaaccgggattgagttgagatttatcggctatttctaagagtcaagaagttaaggatcggctattaccggcattagacagttaggctatagaggacattggtagttcaatcatgaggacatgatcgaacaaaatcaataatgacgacaatgtggttgacatgctatcgacgaagttattgttcatttgatcgaaggacccgatcaaaccatcaacgataaaaattaaggttttaaaaagggattttattttaggcaatttggtcgagggaaatatcaaggctaccaaagaaaaaataaaggaagtactgaagaccagtttttattggagaaaactagatttttgccgagaaaaatatttttggactggaacaagctattggtgatcaagtggagtggtaatcaaaattatcaaggtttattggagtggttaaatagagtaagtggccgaggacatgccacattacttaaatttttggctgtatagtcgtttgcgggattttgcggccatgtcgtggaggtgcttgtggtggaaggagctccgtcgcaagcttggcgtgtgttggcacacgtttaggataaggataggatcaagagtggacaaagacgagtttagataagggtaagcttgaaatcagataaggataaggttttagataatgtttatccgccacctcgtgcttccgttgcttgctccccacgttttcccacccctataaatcgctcagctcgccatttgctctctaaaccacgaaaaatcacatgtagactagttaggttgtgaagcttctcggagaagccgtggtcgagagttgagttagtcagataataggtaagtagttccgcccttagtctttattctcattagaatatttttctaagttttattttttgtcggcggcttagatccatcatttgtaacgcacccagaccgtactagaactcggccagtccgatacggcccggagacgccacaatggaaatgagttctcattaagtagccgaggttcaagaacacatccctacccttagcccactcaagatctccaattttcccacctgggatccatttaggcttgccaaccctcacttcacccaaatgttgtgtcgactcggactaagtcttatcagtttgaaacccgtacaatataaaataaataccgatttaattactaaagagtgataaaaatacaagggaaaattacaacataaacattgtttttatggccaaggcatgaggcccaaaagtacactattctaaaatacatactttgagttttacaaaagaacactgaaaaactactccgggttccctagcgttcaccactccctctaatcccttctaaggttacctgcaaaacaagtagaatcatgagtaatctagcattactcaatgagttcgggttcgcaaaggaaatgttagtctaaccccacccataatccccacaaacataacataaacaattagagtacgcatagaaggtagtaaacaacacataaaacaatcaagaaatataacgttttcttaaagttttactagggcccaatgcattgccttcctccacacaccgtgaacacccgagttataaccacaatggcacataaccgaaacatcaccttggctataccgtcgtgtaaacgaccccgaccctttggtagctagcccagtctcttcgggtcctttgatccccatgaggcctgttgcatctcgtcaagcaaacctcacgaaagaacggaatcacaaggcaaggcctgctacatcccacttgaccgtagcatgcttatggatcaacttggataactttcacaagctccacacgctacgatactcaatcaacactatgaaacatgtggttcattctccacacacataatcatagtgttctcatactttgactatcaaatactagcgagcggtgtctagacaacgcaaccatccctctcaatcgaatggtgcttcttgtaatacaaccactcctttagggcaaatggtgattcagtcgcaaactctcctagctattcgataagacaacctcaacaaactcaaagataacatcaacaaaactaagagaagggaaaatcgagaacatgcaagaaagaaatcaaacatgcaagaaccaaaactggaactcacaatcactggcgaatcctcctaacttggtcgacggtctctaactcgggatctctctctctctctcagattatcctaagggtttggacgatatcttgctcgaacgctctcgctctctctctctctttgtctctcgggtttttctaaaggttcggatgatctctctctctttctctctatttgggcagcgattcgatgtaaagttctctaagggttcagctaaaggggtgaggtcctgtttacaggctaagggtgcgagtttaaggggtaagagacgaaacttgggctccacttcagcttaaggacaaaacttggtcaccaagttggctcacccgaatggatacagctccaagttttccttgtttataaatagacaatccgcgtctctcacctaatgcgcattttcttttttcctcctcttgcccttcattcgcctcctaggtcaatgcgcggggtgctacattgtcccaaattccctaagaattggatgggctggcctcattgtcgtctccttcttcagtatcgaacaattgaggatattttacctgcaatttttcttcatcttcccatgttattacccgtcggttttgctttccctagaacactttaatttgaggaattaaccgctgcttgaacttttgaatacggcgttcttcgatttcgagtggcccctctggataagtgaggttggtcttcaattcgggtatcggttctgaaataacaacattgggatttggtatatgcttctttaattgagacacatgaaacaccttatgaagtcgcatgatttctatcatgtccaacttataagcaacctctccaactcgactcacaatttgataagggccaatataacgaaccgcaagcttccctatctttccaaatcgatattttgcctcttgagttgtgacctttaggtagagcatatctccttcttggaactccacttctcgtatctttcgatctgcgtactttttttgttggtcttgcgccttcttcatgctttcgcatatgaactggattttctctactgcctcatcgactattcattggtcgaatttggttctttctcctaccttcgtccagcataatggagttctacacggttttccatacatggcctcgaacggtgacatatcaatactagaat

SEQ ID NO: 36052 - DNA, 1449 bp, Arabidopsis thaliana landsberg
aattcctaaatgaacattttagtgtttgaacctccaaattttctcacaatttatatttaggaatttttatcttctattatatagaacttatttatattttgataaaattgatttctgagaatccaccactgtttaagacatttttcatgctccatagtctatatcatgttcccgcaatatcctccaatgcgcagcatgattcatgtactaaataagagtttttcaatttttagcttagggagaaggaatgaaaaaacaaggaacaaaaagtcttgtcaaagtaaactaatactgacatcccaaattagtctttgtttgtgtcacaatcctcacttgacttagtcctcaggcccgttgccgtttccacctcatttatgcttatcgctctctctttatatctctttgtttaaatcaattcctcttatttcttctcaacacaaaccaaaaacataaaacacgttgttcatagatctcaaacaaatcatgtactatcccctcagttctagtttgatgttcttcatcctcttctccttattctaccatcttccttgtgaatcaagtaagtgtgagagtctgtttcaatgtgggaacatcaccgccagtttttttttctggggaggggatcgtcacaaacattgcggtcatccattgctagagcttcgctgcgaccaaaacaagagtacctctttattcatctcagaccaagagttctttgttctccatgtcgatcaaacatcttacagtcttacactcgccagaccagaccttttacattccttttgctcccttacattcaccaacacaaccttaccaccagaaattttcgaactttctccggcctacaagagcgtcacattctaccactgttacccggttcttcctgacctttcgaattatacatgtcctgttataggtccaatctcagtgtctggaaaccctgaagatcacgaaacctgctttcccaattttgccgcaaacgttcccacgagtttcgtcacgaaagagaaaaaattgaatatagccaatttggaaagtgttttggaaaagggctttgaggtgaacatgaatgtcatcatgaaagcttgtcaagcatgttcatactctaatgaatcctgtggcttcgatgaaaactttccattcgaagtcaaatgcaaaccacaccattcaccaactggtaagtttcttatccatcactatcatttcctatcaattttctttgacgtattagacataacttattagtgagcttagaaagacggtgatgcaagatatataacataacttgtttgatatattttttttccgatttggcattaatttagcgtttagtcgccaatctatttcactaattgattaacaatgttttaaatcaatttatgtatctctatatattgcctttttgtttaacttccaagagtttggatatgaccggaccgtccatcaacttta

SEQ ID NO: 36053 - DNA, 863 bp, Arabidopsis thaliana landsberg
  unsure (1)..(863): unsure at all n locations
atcatccactagactaaattagacggttggatcaaaggttgagtaattgacattacgattgtacctatttttgatgcattagtattatgttgcatcaccgatattatatttctagttgttggagttctatctagtgactacatcaaattgatgtacactcaatatctatctagtaccaccgtgcatatgtccctaatgatagagaagcgttcaaagttgtcagggaaacagggtcggtcttatanaanactaactanttttaagtcggctantctttcttccttatatttcatataaataggtgcaggngtgcttggcgttaaatatacaacatgtggctgaaaatatattacctcctacatggacatttctaggatctcctacacaaggggggggtcatatanttgcagcacaactatttgagcaaatgtgtactattgtggattcatatagttcttaaaaccaacatgcataatattctttattaataaataaccttcaaataacacaactttaatttacagtcaattagaagtgttgatgatttatttttagatattagacattcaggtatcaaattcaaacacctctctaactgatccaaatgatcaaatttaagctaaaattgtagctactgatcagaaaaatagaagcaacatttgttgaatagaaaaaaatagaagcaacatctgttttaaaaaacacattgcttcaaaataataggaaagtacaaaatattagatttaactaaagatattttaaattaattaaaaaagatatttggattatatgataataaatccaataaaaaataataaaatccagaatacagaaaaaaattgcaagaggggaagcagaagaag

SEQ ID NO: 36054 - DNA, 1916 bp, Arabidopsis thaliana landsberg
  unsure (1)..(1916): unsure at all n locations
gaaaggcacgtccatcactatatgaatgttcaccatctcttttaattacattcaagtaattagccgagtattaagcacattcaccatctcttaatttcagggtttaccgagattccagcaagagaacttagaccacaacaagattctctatgagaaggtcaatgcaatggcagagaagaaaagctgtactcctgcacaattagctttggcatgggttcatcaccaaggaaatgatgtctgcccaatcccaggaacctctaagatcaaaaaccttaatcagaacataggagctttatctgtgaaactcagtatcgaagagatggccgagcttgacgccatgggacatcccgattctgtgaaaggggaaaggtcagccacctatatagttacttacaagaattctgaaactccaccactgtcttcttggacttcataaaccatctgtaatagttttactctgccatcgtgctgagctatgttctgaactacttttcatcatcgtctttaagctacattattgtttgtctgtttctgtctgaaattaatgaaactttttaaaagtaaatctctaataaggactgaagattctgcaaacattataacaatgaattgagaaaggtgacaatgcgtatatacaatgatttgtgtcacatcacgacttaaaccatgaagataacgtatacgtacctagaggatgataaattattaccttaactagaacttgtgttacacataaccggcctctgaataccactcaaaagaactgtcactatactaatttaagcctcaacaagaagattacagcaaaagacttttgagttctatcaacctatgccgtcttctacgaattgcaaggaatcctatgatcgaattacggccaaagcattttgttcgtatcaaagagttttaccttggctttagaaggagtctaattcattcttctctgccaaatgacccgagggcaaaaggattgtaccaatactgattgttgaatctcatgttctgaagcggtgtctgcagttgataaacattgccatgtcgtccacggaaatactgccacgtaccaggttcttgtactatttactttagtatcggtcaaaatccggatttccccatcaacttcttggctcttgcttcaggtggatgcttggtggaatgttgtacgatattggctgtgagacagggaaacaatccactaaacatcaggcatggccagcttccaagagaaatcctcaagagatcaataaaactaaaaaacattaatggtttctatgttcatatatatatcttaatatgtttcactttttgggtcaagaagctctaattatttgaggtcacatggcgaacttttcaggattagctattttgacatatgtagcaaaatatattacctgagttgtactcgacaatagattgcttgcaagatcatcattaattgaaaccggtagagccggcatccgactcatgattccaggcatctccttcatgctgcagaagaaactaagaatttagcaattgaaggtttaaattatagaaaggaagacagatgagatgtctcaattgtgaaaattgaattagtattagatccacatactcagtcaaaatggcgctgatattgtttcttgcctgatgaaagagactgatgttatcctgcagctgtatgcactaagttagcatatctatgtgcgaattactttgcaaaaggaaacagtatcaaattattttctaaagaataactgagcatgtaggaaatctggtatacaatgtttgatcaaacttgtatgacagtttcagtctgtcaatcttctcgcacaactagccacaaaggattgcaagtataaattaccttgcacgcagagaggttgtaagaaatctgactaaaagcttgagcattntgctgtagaagatccattact

SEQ ID NO: 36055 - DNA, 921 bp, Arabidopsis thaliana landsberg
gtgctatacgttgattacaatcggattctattgatgatgattttgtaacaagcttgcttacattctttgttgtagcaattgttcactttcttataaattcagcttctgttcatcaacatacttgtaaacaggataacccgtatgcaataaaacagacaaactttgttctgatccaaatgtgcactctttattgttatgtcatacctttattggtgtagattctagggatctagaaatcgaaagaaaaatctgttaactcttgttaaaatggatactcacttaagtcacctgcattgcaattcaacattcatgaagccctataaagccaaacaaccttaaaaaatacttggaaatttttgtatagagaaactaaccagggcatcacagctctgatctcgtgctctagattcagtcacatcttttaaattttccaccaactgtgaatccaagacatttacaaggacgatatatcacacccccaaggagaataaattgattcatcaactttttgtttcttgattcttaccggatagagatgagaagctaacgtctgatgttgcagcggagtctgcacagattgttgttgctgcgttgtatgggcattgtggcttctgcatctcttgtttttgattaaactgtaaaatcgaaatatatgttcttgcggattctcttgctctcgaatttcctaggatatttgtttgaaggaaaaatcaaggactcatgatcatataacaaaataagaacaaagtcaatttcttcatatataccccttcctctagatcttcctcataacttttccacgtaatatgtcttttcttgaattaaactctacaagaccattcacgtgtaaatttcaatatgttcagaaaaattaatttctactcaactaactttcataataatgtaatttggtttttgccc

SEQ ID NO: 36056 - DNA, 222 bp, Arabidopsis thaliana landsberg
cgtcttactttactcataagcattgataattagacatcttagctcatacattcactaaatctaaacttataattgttattatctttgacagatacagtaccatgtaataaaattttgaaagtaaacaatcatctatactattttccattttaggtaccccagtttatcaacaagattttttttaatatctgaatatctgctctgataaatctgtatggttta

SEQ ID NO: 36057 - DNA, 2291 bp, Arabidopsis thaliana landsberg
atgctgcacctttgaagcttgttgttgagaagtattcttaggctttggagaatcagctggcagcgtctactgatcaaaatatatatctcgcaggtaaaggcctatttgttaccaattgaatacttacatcaaatcaggcgatgtgcaatatgtgttatgcaggtgttcgatggatataataaccatgtggcagaagggaccaatgttctgatatgtattgagggctatcgtattgaagactggatgggcatcaaccgtaaggtgtgagaagcttattttagtcaagaataggaatctctgtttgacttactgagtatatagtatatcgtattctcgccattgtaccactatctggatgacgcagtttgtttcttaaatgataggttgatagtcgtggctgcattaatctatctggcattcttaaggtcacagaaggctatgggaaatctggtaatgtgatcctttcaatttctatatttttccggtgacattcctttttgatgatttgctgattgtctagcgtctttgtttctctacagtatcactctctgtaatgtctggtaatgaagttatcttctgtaaagagtcacaaattgatgaacgacagctaagacttgtaaccgaggtaaagattattttggcgcagtttggttttgtttcttgccaccaagcttttgtcaggaacttgtctctctactgacttctgatcctgaaattgtttgtgttgatcagctgcccgactgctgtgctgctggttcaaatcttacaaaccttattttcaaagtgacggattcagatggtgctatggatactcgtatccatcatgatgaaaaatctggatgtttccatacaatgagcattgaaactgattcaagcagcgatgagagtgcaatcagatatgcctttgtccatggttcctgcaaagttcctactctttccctacctgagagcgagggtgtcctttctttcaaggttttccattctagatttcccgagcttcatctgagcttaaaggtagtaatttgtggactgggttatcttacaatatgttctcaccatgagtagaaaatgcaggttgttgataacatgtcctcttaatttacagattcagctaacgcctgctcaaacatttgaaagagatgagatagggtgttctacaccttattcgaggatgagtttaacacctcaatcaaagatggcttcaactacaaattcacctgtggcttcaactgaacaaactccatgttcacagtttagagtcttggccattaaggcatcgccatcgactctcagtagccaaacaggcctgatagatatggcacagttcactgaggtatgtccatcaccatttaagccacaattgttgatctttacgtttcatttatgtcttagtttggtttctagaatgatcgaactttggttttccgagttaacatttcatttgaatgttcctgcagagcttaaaggaaaaactcattatatacagtgaacacagagtggaaatagatgagcgcctaaaatgtttggaagctgaacaaaaccaggctaaggaagagttgcgtaccttgcaaggttaactgttatcttggtttagatcatatattgtttatgttttctatactcatttgcagaagtttgataactatattgggggttgaagttgcattgatgctacacatttttgttgtttactgtgccctgtatttggtgtctacaacatagcccgcatctttaattctgaaaacactttaagcttaattttagagtttcacaaaatcgttattagaacatagtcttacttccacaattttctaagcaaagaatggtgagtgatagcacaaaccggcaatttttaactgttcatgttgcctttatctcagcttctctggaacctcttggtgctacgttcccagaatgcctatccaccaaagaatcaatgatgaaacagattgaagagaagcatcatattactgcagcatcggttttctgttgtttgtacagaaaggcaccgcctccaaagtctctgtttctgtcaaagaaaggagtgtttggccttgtagctcttcttggttcagtttcctccacctcccttagcaggtgacatcaactaatatgaagttcattgctcatgttgggctcaaaacttctgtatctgaagttatttggtatgcagggtgttgtctgaatatttgggagaagactgataggttacgggtgccgttggctggtgtgagaagaagggtgagctcaaatggaaggaaaggcagagctcgtgagaagtttttgaggaa

SEQ ID NO: 36058 - DNA, 894 bp, Arabidopsis thaliana landsberg
agaatcttaaactggtgttgaaccatagaaacgaataagtataaactgccgaaatatcccaacattatcaactagacaagacctacaaaagtaatcaaccgaagaaagcaaatcagtaacgcggtattgcacaaatacatacccttcacctacaactggctatctaagagactaagattacatataggtgtttgttgtcaatctcatctaaacaatctttctagcttgacttctactgtgatggtaaatgctaagtaaagtgatcaacaagcaaatatatatgaaaagatgaactatgaaatgctgaaatagcccaacaacatcaactatacaagaccaagtaaagtaatcagccaaacaaagcaaatcagtgaagtggcattgcacaaatacattcccttactatagatcatattcatagcacatgtaagcaaactgatttatactggtattgtgaatcctctaaatactgagccagcaaagcaaattcataagaaaagatggaaactcaccagtggtgatagtccgaaatcgctcttgaccagctgtatcccaaatctgaagcttgatacgtttaccgtcaagctcaatcgttcttatcttaaagtcaatgctacatcaaagcaaaatagagaaacaagactctgtaaaaacagaatcaaaaacaaacatcacagaattcaatttatctccataagcaaagagaaaacacaaacccaatggtggtaatgaagctagtggtgaaagatccatcagagaaacgtagtagaagacaacttttaccaacacctgcaacaacaaaaaaaaaacgttaggttacagagatctctcaatacaaacaccgatccacacaacgatctaatcacaaacaaaatcacagtggaatagatcgat

SEQ ID NO: 36059 - DNA, 6063 bp, Arabidopsis thaliana landsberg
ccctcgctcttcttcctccctctttgcccaaacactagggtttcactgacgctctcgtagaagtctctgattttttttactttccctctttcttctactttgggtttctaattgtagatttcacggcggagatgaagaagcactttacgttaccaagaaacgctatcttacgcgacggcggagagccacactcgccaaaccctagtatctcgaaatcgaagcctccacgcaaattaagatccgccaaagaaaatgctccacctctagatcggaacacgtcgacgcctgaccataggtcgatgagaatgaagaatccgttgcctccgcgtccgccgccgtctaatcctcttaaacggaaacttagtgcggagactgcgacggaatctgggttttcagactcaggtgtcaaggtaatttcacccttttctcagaaattaggtattatcgagacaaaatttctaattaagtaatgttgaatcatatctttgaattcaccccaattgaaagattgtgtagttgctagaattggttaggttgctaattggagatggtttgtgtactttctaaactggcttacgtttctcataggagacggtgtagagtgacttggtgaaggcttaggttgttatagaacatagctcaattgtgaaattccgtactcatttataatgaggaagagaaggtgatcagattgagccaattttcaggttatagttagaatgaagcctctaaacaaaggggaggaacggtgatatgatagtagaaaagatgtccaaagattccctcacagttagtggacaaactttcacattcgactcaattgcaaatccggagtcgacacaggcaagatatctgtttgcatgattcttgatattattatgctatgtcattgtatgattccgaatctctaactttgtcttttgtttcttcctcaggaacaaatgtttcagcttgtgggagcccctcttgttgaaaattgtctatctggatttaacagttctgtatttgcttatggacaggtagtttttattttctaaagtcttcctttgaggcagggttccatttattggattgtttgattgtaacttattgatttaactgatcatgaaattatttctctcagactggtagtggaaaaacatataccatgtggggtcctgcaaatggattgttggaagagcacctctgcggtgaccaaagaggtttgaccccacgtgtctttgaacgattgtttgcccgaatcaaagaggtgatgcctggttttgttcaattcgtggttttgaccttgttcaattattagcacattcagaagaagattcttcttgtttctttttttggattgcaggaacaagtcaagcatgctgaaaggcaactcaattaccaatgtcggtgctcattactcgaggtttagtgactggctgcattacataagtttggatggtgtttgaaggtttcattttatagagtttgatatataatttcattcttcttccttttcagatttacaacgagcaaataacagacctactggacccaagccagaaaaacctgatggtaaaatgaactttcaaatttaacttggtttatattctgtaggaaaacatggggttcatcgtttttcgttaatgtgtcaccagattagagaagatgtcaagtcaggtgtttatgttgaaaatctgactgaggaatacgtaaaaaacttgacagacgtgtcacagcttctgatcaaggtttgttatttttttggtttctcactgcagtactgcaccttaaatcatgtttgctttgcaatatttcttaagtacttaatcaaacttgctgctctaaaagtacacaaaatacaatttccggtatcatatctttgtaattctattaagttttaatgaagcaatgtgaaaacttgtttttgttagaaagaagagattgccacagattatatagaatgctgctactggggtttaacgttgatgttctgttagtgatgctgtgtgaatcaaatgatctcacaaagcttacattttatagtgatagttaagagaaattattgttccttagttggcaatatatatgaaacggtcaacatattttctctcctgataaaaataatatttgatagctatacttgtgtctgaaactggtgtagggtttgggaaatagaaggactggtgcaacgagtgtaaacacagaaagttcaaggtcacattgcgtatttacttgcgttgttgaatctcggtgcaaggtaagctactcttctacattaaatttttcatatactggctttttgagattttttcatttgtttttaagaaaatatatagagtagtatgaatgtatgatggaatatacgtctgacttctttagaatgtactttttgcagaatgttgcagatggcttaagcagctttaagacaagccgaataaaccttgttgatctggctggttctgaacgacaaaaatcaactggggcagccggagaacgtctgaaggaagctgggaacatcaatcgatcgctctctcagctggggtatgattcagagtagtctctcttgttatttttggatctcagttagcatggaattttcgttaattttatactgcaggatgcactaaagaactgacacttagcttctgctgttcttgtgtcttctagtttttgatactgcggcaggcactagaaatctagtttttgattataaaagaactgaaaatttgggataatggaaaataatttgaaatatggtggtagtagcttatgaggatcttgtgtcttttgagcagtgctttttgatatttaattttagaacaactatctctccatgtgttgttgtctgatgattgtcttatcaaagtggagttattgtatatcctttacctttttgctgaggatctaaaaatactttgggcttcccagaagttcatatttatttgtttgaagtcttcagacctcaaaaatggcaattatttgtctgctgattgtcttatcaaagtggatttattgtatatcctttacccttttgctgaggatatacaaattttgcttggtaaaaagaaaaagatttgcttggtttgttcaccagtcctgttattggcaggatgtttaccacaagatgaaattatcaactacatgtttaccatataaatttgttacgtgcaggaacttgattaacatcctcgcagagatttctcaaacagggaagccaaggcatataccttacagggattccagattaacatttttattgcaagagtctcttggtgggaatgcaaagttagcaatggtttgtgcagtttctccttctcaaaggtaacgcaggacccctatttccacttcagcaattattttatctccatcttctagaatataaagtatatacgaaaactgcagttgcaggagtgaaaccttcagcaccttgagatttgctcagcgtgcaaaggcaatacagaataaggctgttgtcaatgaagtgatgcaggatgatgtaaatttcttgcgtggagtgatacaccagctgagggtacggattcttttacatatttcataagatagaaatataaatatgaatatggcttttaatggataaattgtgcaggatgaactacaaaggatgaagaatgatggaaataatccaaccaatccaaatgttgcttattccactgcatggaatgcacgtagaagtttgaatttattaagaagcttcggtctgggtcatccaaggtccttaccttatgaagataatgatggtgatattgagatggaaattgatgaggctgctgttgaaaggctttgtgttcaagtgggtttgcaatcatctttagcttctgaggggatcaatcacgatatgaacagagtaaagagtatacattcatctgatggccaatctatagaaaagcggcttcctgaggactcagatgttgccatggaggatgcttgttgccatactgagaaccatgaaccagaaaccgtggataatatgagaactgagacagagactggcatcagagaaaatcagatcaagacacactcgcaaactttagatcacgagtccagtttccagcctctttcagtcaaggatgctctttgttcttcactgaacaagtcagaggatgtgtcatcatgccctgacttagttccgcaagacgttacttcagcaaatgtattgatagctgatggagtagatgatccagagcacttagtaaattctgcatctcccagtctttgtatagatccagttggtgcgactcctgtattaaaatctcccacactgagcgtctctcctacgattagaaatagcaggaaaagcttgaagacatcagaattgtcaacagcatcacaaaaagatagtgaaggagaaaatttagttacagaagctgcggacccatctccggctacatccaaaaagatgaataactgttctagtgctttgtctacgcagaagagcaaagtttttcctgtacggactgagcggttggcatctagcctccacaaaggaattaaacttcttgagtcgtattgccagagtacagctcaaagacgatcgacgtacaggttttccttcaaagctccagatagtgagccttcgacctctataagtaaggctgatgcaggtgtgcagaccattcccggagctgatgcaatatcagaggagaatacaaaagagtttatgtgcagtaaatgcaaatgcagagaacaatttgatgcccagcaaatgggtgacatgccaaatcttcagttagtacctgttgacaactcggaagtggcagaaaaatccaagaaccaagttcccaaagtaagaattgtgacttttttctaacatagatttagatagttattcacagtcttattttgtttccacatttctataattggttcctccaactgatcgagctttacactttacaggcagtagaaaaggttctagcaggttctatcaggagggaaatggctctggaagagttctgcactaaacaagcctctgagataacccaacttaaccgactggtatgatacttgcgtctttttctgtttttaatctcccttagtaactgtatcctcaaacataaattggtccaaaccgtgtaataggtacaacaatacaaacatgagagagagtgcaatgccatcataggacaaacaagggaggacaaaattattcgccttgaaagccttatggatggcgtattatctaaagagggatttccttgatgaagaatttgcttctcttctccatgaacataaggtaattgtggcttctcgttttgtaaaagggtatttgattgcattacccttttactgacatgtaatgttgcagcttctaaaggacatgtatcagaatcaccctgaagtgcttaagacgaagattgagttggaaagaacgcaagaagaggtcgagaatttcaagaacttttatggtgacatgggagaacgggaagtgttattggaagagattcaggatttgaagttgcagctgcaatgttacattgacccttctcttaaatcagctcggaaaacgtgtaccctgcttaagctttcataccaagctcccccagttaacgctattcctgagtcacaggacgagagtcttgagaagacattagaacaggaaagacttcgttggacagaggcagagaccaaatggatttctctctccgaggaattaagaactgagcttgaagccagtaaggcgctgattaataagcagaaacatgaacttgaaattgagaaaagatgcggggaggagttgaaagaagcaatgcagatggccatggaagggcatgcacggatgcttgaacaatatgcagacctggaagagaagcatatgcaattgcttgcaagacatagaaggattcaagacggaatagatgatgtcaaaaaggcagctgcaagagctggagtcagaggagcagagtccagattcataaatgcacttgcagcagaaatttcagccttaaaggtagaaaaagagaaggagagacaatacctgagggatgagaacaaaagtctacaaacacaactaagagatacagctgaagccatacaagcagctggagagttacttgtcggctt

SEQ ID NO: 36060 - DNA, 1016 bp, Arabidopsis thaliana landsberg
ccccttcctctttactccttggccttctcgacggcgacttcctcagcagccgcaacttcagtctgtttctcctccaacgcctcagtcttcttctcctccggagtttcagtcacttcttcagctttcttctcctcctccacaactgttggagtttcagtgatcactgctgccttctcttcttcatcctcatttgtcttctctgcatcttccacaaacacttcttccgggtgttgattcacctccgtctcaacgatctctactgctactgaagtcacgtgttcaacctgtaagcgaaaacacacttattaaacgaaaaaatgcatgccgtttaaacggcgaatagtccatatcacttgatagacatagatttctagatacatgatatatatatatattaacaacgaatatgaaccatagatacaggtttatagtttgacaaaataaaaataaagagaatatatacctcaacggtagccatttcgaaggaaaatatagtgtatgtgatgcttttttgtattaagagatttgatcaagatgagaggtatttatagtagaagcaaaccgtttacaataatgttttttcaaactaaatatctattaagataaaattattagttttttgaaagaaccatgatgatgattattgcacatgaacgaaccttttttttgtttatatataaaaacaattgtactattttacacctcatgcccacatagtatggggtgactggagagggctttagagggtagctgttactttatataagctgtaaagacttatactgtgattgttattcttaaaaaaataaagctatgacttaaaaaaaaatatagttttacgaatttttactttaaaataagttgtaaagttatatacatactgtaaatcttattttaggaattttttcatatttttaaaaagtacaaaataaaatattgttcttgttattcctcagctcttgtgaaaaatcattacttaatcttcattaatcgattgcttaggtcttattaatcat

SEQ ID NO: 36061 - DNA, 1638 bp, Arabidopsis thaliana landsberg
  unsure (1)..(1638): unsure at all n locations
taaatgccagtaatcataaatatgaaagtttgcgaactctatctatttgattgccatatcaccacaaaagaaaatgaaacgtctcattctacattagttaacaaaaagtttagcataactaattgagggaaaatgaaaagtcttctattgtgttaaatcttccattgatatcactttttactacctttttaaaactttaaagattacaaaatcatgctaaagtatcaaacactattttacaacttatcatatgacattttctcttttcatatttgtgtctaatggtaaattgataacatcaagattttttatgtaatgaacctttgagacattagacataccaaaaagttcaaaatacgagactctctagctatatggaaaaagagaaatttaaagtgtttgattaaattactagcatatcatgatgtggttggaacaaagaattgtttgtttaatatcaagttagacaagttttaaaccacaagagaaacataattacatgatattgtatcaatatattctatattggtgntgtatgtattcatgatagtgaaatattaggatcgtaggtatataaataatcagacttatatatggaaaacatcaaaattgatagttttgagtcataagataaatgctaattatagaattatgaatgaataaaacatatctgactttattaattacgtaataacataaatgtttatgagataaaagcaaaaaaaactctaatcatatttttcaacaatttttaaaaacaaaaacccacgcgtaggtttacaatttttaaactatgtgtcaaccatattgtttacaaaaaactatgtgtcaaccatattattattcttataaaattacaaattattattttagtttacaaggaacacttttctgtcataattaccacaatggaaataccttctataaacacttcttctattttggttaaaataaacaactttcactcaactacactttcaaatcagtcttagtggtgaactgtataccttcacattatactctacctttggaatgaattagacactaaataaaattcaattcaccgatattaaaaaactactagattttgacccgcacatacgtgcggggtttcatattttaagaaatatattcgaatacatttttagtgaaagatattgtagtgtataaattataatgtgcatacaaaaatgtatagtgttatttatgatacaataactaaatttttttattaatttatattatttatatttcatttgtattttgcatagtaaatcgaatgttagatttgtttcgatttgcggaataatatagagatatttggaaaatctgtgtatttttgttagtttgatgtatatacaaattaattgtttttgtttgaaatttgatcaattagatgatataatgtgaaatttactcagcggtacaccgttggtcaattttttgtaactaaaaattcgaattttaagttatagttgttttgtaaatattgtttcttttgtttagtgtttaagattgtataattgtgttaaaatcgttaattctacgatttcactcgtatattatcaacccgtatgaatatcaacccaaactccttccaccaaattacttcattctgtaagattaaagaatattttt

SEQ ID NO: 36062 - DNA, 2520 bp, Arabidopsis thaliana landsberg
ttatatcttagaactctctactatacatgttctgtatgtaaagaataaccgtattgaggccaccgttgatcgtcgccttgctccgttttacgaagaccgattcgttgaaaatgagtggaagacgatcacctctttcttggtccgtaagtcaactgacttagtcagagcaacaaagcatgaatacggcatactgtttatggatcggaccgtcgtcgttcatgccccaccgagatcaccaccagttccagatttcgatttcactcccttcgacttcattttggataaatctgcttacaagaacgttttagtcggtgaggaggaataactctgatgcttcatttattacatctttgtcgtgagagtcttcaagaaggttatatcgcccaacgtcttcgaactcggccttatcttggcagattacgaggtaatttccgtcaaatcattatgtgtatttctcgttcattcgcttaacttgtatattaaactgtctactatcatgttctgtagggatccaattcccgtattgaggccactgttgattgccgccttgctccgttttacgaagaccgattcgttgaaaatgagtggaagacgatcacctctttcttggtccgtaaggcaattgactcagtcaaagcaacaaagcatgaatacggcatactgtttatggatcggaccgtcgtcgttcaggccccaccgagatcaccaccagttccagatttcgatttcactcccttcgactacattttggagaaatctgtttacaagaacgttttagtcggtgaggaggaataactccgatgcttcatttattacatttttgaaattttttgattattatctttgtttctccatcatctagatgtcgttggagcgttggttgatgttggcggattgactacagactattacggtctcaaaatgagtttcaagataaacgatagatagtaagtgttcttttcatttgttttatttacaatgtcactctaaacgctaactgtccttatttctaacgtagcaatgaagtcttggagtgcaaagcccacaatcaacaggcggagtacttggatggttactttcagagtttgggtaaggaaaattttgttgtcgcactcagcttttggcgtttcaccgaattgtctaacccgaagcttgagagccatggtgctatttcaaaggtggttgccaatccggacagagcagaagttgcggatatctcgatggtggttttttagctagagggaatgaaccattattctccgttttaatataatataagactacatttcaattaagttttctttcccagttgttgttgttgtttccataagaaccaaactacatttcagtcgttgttgtttcttgtttccgtttaaattttaatctaatttgttgttttatgtacgtgccttgttttattgttcaaatcctctcgcaatatacgtatagtttctggtgtacgctatcgtgtacgtatattagttttggtgccttcaacatcaaaaactgttagatttatacttatgttgtgtacacaatttcccaatgtacgataaaccaagtttaatgtactatatagtgtacgtacacgaagacatctagtaatacttaaagtggtaattcattcaaaagccagaaacataaaaaagtacaggcagtttatataaagggaaattcataagataagataaataaactggaacgattcaaaaaacataattttttaaacgaagcatacacatgtgttgcaaaatatgtgtgcatccgtcataccaaaagactcgagagtagagccgagtagagtagcttagaccttagcagctttgcttctagtagaatatagcaatctccctggcgtaccagtagaaaaaacaaaccctgcagccatgatggaacgtgcattgccctacgcaactcggcgggtggacaaacctccaagacctttcccagcggcgagcattttcagtgtgaagctggttgatgtgatacatcaccatctctgcaaccgcgtggccagcttcaagggtgggtgtcatttcccagaacttttcgctgatagggaggaaatcaagtgattaccggtacacgtaaggaacaaaccggttgcgaagcaagcaaagggatcagataagcgaccgttgtcatgactgaaaggccctgagctactgtcacgaagttgctcgcttggcgaacacctttcaaggtaaaccgccgggatggatccacgttctacaagcacctcgaagtacggccggaagggagaccccggttggcgtagcgacgcccacgtcatgagttcatcgagctgcaagagtgtcgaggtcgcaactgtagactctgaccttagcgtctcgacgggagtctggtcgacggcgcatggcgtgcaccggatgatgatgccggcaggcaattggacccctactttctgtgagaaacataaggatttcaaaagactattacgttgtacagctcagctaacacatgaaagcaacagagagtgtttgcataatgaggacttac

SEQ ID NO: 36063 - DNA, 2375 bp, Arabidopsis thaliana landsberg
  unsure (1)..(2375): unsure at all n locations
aacgccgagcgactagagggcgacatcggcgttttggaggcaatgccgagcaactgaacgctatatcaacgttttagaggcaacgccgagtgattgggaagcaacatcagcattttagaggtaatgccgagcgactgaagggcgacgtcagcattttttagaggtaatgccgagcgactgaacacgaaatcggtgttttggaggcaatgccgagtgatagcaggccgcgcgagccactttaaggatgatagccgagtgatgaggtggcgcaccggggttctggagataactaccgggtgaccacgtggcacgctggggttttagaaataaccgccgggtgctgactgggcacttttgaaaaggtatctggctcaagaatacccttaagaatcgcgcttacagccgcctttacattccgtgccctagttctagcgtttacgcatctaaatcttctctgccactcgcctcctgctctgtatcgccggcaagaagcaagatggcgcccaagaggaagaccacgaactcgtctgctgcagtgatccccgccatcgatcccaacagtcagttacccttcgcaggtaaccatatgtctgtaatttctgaagttgagcttctccgccttgtctccatcggggttctccgtccacgggaactctgttcttggcgttcttggcgtgggactactgttccgacagaggatacccatgagtccgttgtttacgcccctttccttctccgcggccttggccttcccatctctccctttttccgcggcctccttgatttctaccatattaacttgacccatttgaaccccaattcaattctgcaaatctccattttcgttcatttatgtgaggcatttcttggcgtgctgccacatttcggtttgtggaaatacttgtatcattgtcgccctgggatggccgggggacaacatcagttggtcgggggcgccacttggaaatgcgtcgcgggaggaaactgaatactcgagatcccctcaaggacagtattagggatggcgcctagagtgttcatagttgagaattatggaattctctcacctctcggtcgggaaggcagccggatgtccgcaccccaagctggaccgagtctcccacagatcaggaggtagctgaggcaggtgtgttgctagctgaagttggactgctgaaagagaggggtctaactgctgaagctgtggttactgactttgttttcaagaatattcagccactgaaagaaagggcctatccagcttatctgtatcgagggctagccgactcaactcgggttaccaacaggagaattccttctgcagacttggtgagccgacttgaaatgatcctcaggggcaaagtgtcaaatgttggtgctccagtggcgtactcggcctggaacttgcctcctcccaaagccttcacccttttcgtgtcgaatccacccgttactgatggcagtttgggccttagagtgcgaccctctgctgaagaagttagtgctttggttgcctcgctcggggagattcctgatgacgaacggcaggtccattttgaggtgcccctgaaccctagtgatgcggagataagtgctatgcttgatttgctggctgaggactcttctgacgctgttcctgctggggcattggtagtggcgcccctcccagaggctgatacaactttagatactcagaagcctgctagtactcgcccgaggcgcccttgccgagccaatcaacctgatccttctgctgatgagtagaaaaagaaatagcatngactccggcnnnnnnnnnnnnnnnnnnnggacgttggtacctcggttcctgatgctgaagaagtgcctgcgactgaatttactgacgctgaccccaatgggtgtacccaaactgctactgatcccaatggggtgctccatctattgccgaacccaatgggggtgctgcttgtgttgtcactgtggaagatgaggaggaagaaaatgaagctcctttaactcggaaaaacagtcggcagttcatcgccagcggtggaagtagtggagttccttctcctgctttgtctaccctcatcggtctgcaagaactgtctctggccaactttgattaaactcttgaggatatggtcccagaggacttgttatcagagccagtggatgatgatgcaacggaggtttgcgctgtcgtgcctgatgctgggttgaggtcatcccgtgcctcgtcgaccttagagcgcgatctcgagggtcgggatgctgacttggattgtcctggtcccatggaagtggctaaaggctcgtcaaccttagaggtggttactgcggagagcctggacctgcaagaatggtgctggggatcctctagagacgtgcag

SEQ ID NO: 36064 - DNA, 641 bp, Arabidopsis thaliana landsberg
tcgactctcgaggagatgttatgttcaagttttagtggcagtaacaccaggggtgttacaacgatgagggcttgggtcgacggcggcggctctccggctgcgcggggaaagctacgctgagcacgggctgcagggaaccagagggggagagagtaaattgaagcgcgtcccgagttgcagacactgaggcgggactcaccgaggcaaagggcacgacgaggcctcaacagtggtggcagaatgggcgcgcggacacggtgaacggcaacggtcttccagctcggggaagagacagtgccgactgggctggaagtggcttttcctttttctagggattttctaaatgtctttttattttctctataggaattcaaatcaaattcaaccacaattcaaattcaaataattcaagcatctgcatcaaatgaaaagaataatctagtctcagcatgatgcaaacatttacatataccctaagttttgatattctcaagaaaataatacatctcccacataattaacccaaaattctattaaaaaagtagaaaagaaacactatagaagtgagaaaagaagtaacacttaaattttctaggtatttaaagaagaaattttacccccccccctcagagggttacagt

SEQ ID NO: 36065 - DNA, 1395 bp, Arabidopsis thaliana landsberg
attctgggttgccttgttttcggtccacactcaaattaggtttaatttcaattctttcgaggtttcagctaggagctttagcggcagtgaacgatgctcggtcataggatctcaagattggggtctactattgttaaacagctcgcaagaggtactatctcctttaaatcgatgctctttgatgcgtttgctatattggtattgatgaagtttctaatctcacttcgatttcgaactgcgtatgcgtagtagagtctttcatgggttttgataacacattacagaagagctcacacattgtctgcttgatataactttgcgccttaagattttgttgctcttttttattttggcagagggatatttatcaacatatgggacacggaatctacaccggtcttatggccactacttgccgtctttggttaatccagagcttgttctcgagttatatactctgctacaggcgataattctattatttcttgatgcatagacactcattaaaacttagaaaaggatgctttgttagatatcattctattatctggctaatagaagcttgttaataataaatcttcaagagtctcgttaaatgatcgcagaagaacggaatgtagcttttctgcgcttgtttggtgttagatggatcagttagtaacgattctaatgtgtccagttgtatacttgtattgattcaattttgaataagagttgagtcaggcatcaatactaagtcgtaagaaaaagcttaaagatttcatagctgagaaattgggtggtttatactttatagttaatggatgaaagaacagttgtcactcataggttctgttttgtttccccattgatggttgaatctttctcatttcatcttttcgatagccagtggtaccaaggcaagctaggacttctcaggaagcctggtttttgaagagccaaaagttttgtacttcttcaacattttcctcttagaatggtgatgatgaaactgagaagtaagttactatgtcagcaaattctcaattctttcatatgaagaatgtgcacacacagaagtattcatccagcattgaagcaatatttcctgatagtttatcataattttgatgttttcaggataaccataatctttgttgataaggacggagaggaaattcctgttaaagtaccaattggaatgtcagtgctcgaagctgctcatgaaaatgatatagaccttgaaggtgcacacttctcttccatttccttctcgtttcaattgcttattctcatagctttagatgggttctaacatttagattgatcctttgtcgaatcgaaaattcatggattgctttacttgatctccaggggcttgtgaggcttctttagcgtgtacaacgtgtcatgtga

SEQ ID NO: 36066 - DNA, 914 bp, Arabidopsis thaliana landsberg
  unsure (1)..(914): unsure at all n locations
ctattttggtttaaacgaatatgtaaggaatgtttttttgtgtgttttgcatattcttagggattggataaataaaagtggtatagacgttacatatattacgcttgatttctttggaataaaatggttnnnnnnnnnnnnnnnnnnnnnnnnccctttttttttgtaaacccaatatcatttcggatggcccaacagattgatctgatattaataacatgtaataaaagggaagggttaaaatcaccggaaatttcgtacacatatacttggtaaacaaattattgatggaaaaaaaaaacaattaataaatccagtggcagccaccgtaaataaatcccaactccaggatttatttcacaaagtggctgcaaaaatgtatatatagatatatatatttttttttttttttttgtatatatcaatatatttgatcatgatatgcgtagaacgcgggagttaattctctttgtgtattcgaaatcaattcccacaatttattttgagctcgtttataaaaatcttctgataatgaatcatactgttataacatataagggtcattttatattctatagagaatcatgcatttattatctgtatccccataggaactatgaaagtgaacgttgaaccaaattatggtggaaatgtgacgagagcttccttcttgtccgtgtggagacttttatactatgtccaacaaactttcatgttcttatacagtgtattttcccataatgtatatatgaaaaatggacctacccatgaatcgaactaaacaattcactaatacatgcaaatgataataggtcacagacgttcacgctaattatattactacaaattaatagtccgtaggtcaccacatctaatgtatatcacatcatcatgttctattatatatgtgacat

SEQ ID NO: 36067 - DNA, 5525 bp, Arabidopsis thaliana landsberg
ctgcagaaaagggagtatcgatgatgcattgatagagttgagatatatctcaagctgatgtgatggagaagaaaggctttcaagctgatgcttttacttataacgcggtttgctaagtaaatcaaaacgatatggtgaggcaaagcactggttgttcacgatgattgatagaagtgagcgtaaaacggttgaccatactaatctgattgatatttactgcaaaatagagaacttcaaagaggcaaagaagctacttgaagagatggccatctgagggagaacaacaacctaatgttgtcacttaaaatgtgatgatcaatgcgtactgcaagcaagggaaagtaaaggaagctcggaaactaaggacggacttggaagacaaaaggatggttctctttgacgaatggggctcaaagggtttggttcaaaacgttgtaacatacaccgcaatgatctcatcgggtttgtccaaggctggaaaatcgaacgaatcatttggattctaggaaaggttaaaaaaatagtaaatagggtttatacagcacgtgttcaaagtctgcattcagctgggactacagtcgtcacagtgataactgtttgagctggtcattctgttgaggagatatggttgatggtttattggaatcagaatcgttggtttggggctgtgaccattgatttcaacttgtcaagaaagtaaagttggtctcttttttgcaacctcgggttaaaagtcaaaaagagcttctctccaatctatcttccttcttcaaccttgatctccaaggttgggaaatcgtttttttaatcctattgtcgattaaaaatcatatctttttatggatatctgagaccgaagaagatataataatatgtataaataagaagcaacgagactaatcaaccgaaacaacaacaaaagaaaatgagttttcttggagcagggagactcgcgggaaaagaagctgcctactttttccaagaatccaaacacgccgttaatcgtctcgccgagaaatctccggccactggcaaaaagcttccatcttctccgccggatccaccggaaattcaacctgacgttcttccggagattctacgccattctcttccttccaaaatatatggtcgtcctcctgatccttcgtctctctcccaattctccaaatgggctcttgaatctgacccgaacgcaacagtttctatatcccctgatgtcttgaatcctctcagaggttatgtgtctctgccacaagtcactttcggccgtagaaggttcaaattagggttttatactctgtttcacttgatgagtatttcaaaattttggatttgttgttaatttgtgtcgatttttattgcagatgggatttaccggaatctgagaattcggttttggcgtcaacagctaatgaattgaggagagacagatacggcactcctgtaaatcttgagaaattgaaagctgctggtgaagggcttcaacatagtatgatcacttctcttcttttgtttatctgcaaatcaaatctttttgaacgtggataattggatttatggatacagttacctacagaggaacatgactagatttgggttgtttgctagagatagaaggattgctatctttacgtgttctgttttcacttccttgcttttgttaatgttgatcatgtaaattgcttgcccaaacttgtctattttaccttgttagggactgcaatggcagtaattctgaaaggtttcagcttactagagaaaactttggtttgtttggttatgaaagccaagattttccgtggctgagggttcatgagtgtctaatgtaacaactgctttctggttgtctctttttgactctgatgacaaataatctaagtatctctctcacagcctagaaattgttgataatattgcttagattgagattctgttattgtcttttgtcttttaatgttaattgatgtcgtgaagtgttcggaaagtttgcctaatctcgagccctctgatttttctggtttctgcagttggaaaagcatttgcagccgctactattatcatctttggttcagccactttggtttttggaacggcagcctcgaaacttgacatgcgtaatgtaagattgcatatgtttccattttcttacttaaatcatttagattagcatttctaagcattattgactgatcttgaatgccatcatcgccttacttggttttattgtatgattttcgttctgttaggctgatgacataagaacgaaaggcaaagatctttttcagccaaaactggagtcgatgaaggaacaagtagagcccttaagaacttgggtaatgttttacaaagatacttgcatcttctcaactgaagtggatcataatcattaatagactaacccgaaaagaccataaatttcaggctgaaaacatgtcgaagaagtggcatattgagaatgaaggtggtaatactatcaaggagaaaccaatcttgaaggagctttcgaaaattctgggacctaaatcttaaaaggccaagacctttggttaatgtgtaaccatgtggatagagaaagtcaaagaagaagttctatatgtttgtaagattcaataagatcttaggtaaattatcatattgtgctgtaagaactaagaagtttcaatgttgctgtataaaggttgtatcgagtgatttaagttttgtataataaagtttttatgagtttcaatatcaatgtttcctattgtgtaagcaaaataaaatgtttcacttctgattggacatggattggtgggttaaatatacagaataggaagttacagtcaaaattgtgaacgttataataagtaagggttgtttatgtaaattttggcttcagtagagttctcttcttctttttgtaattaggtctcttagacggtgaggttaacgatgagtaatcaaagaaagagatcaaacgatgaaagagaagaagaggacgacgaagatgcggaaggtatcggcgagtgggagagagcttatgttgacgaccgatcctgggaggagttgcaagaggatgagtctggacttttacggccaattgataacagtgccatttaccatgctcagtatcgccgccgtcttcgtatgctctccgccgctgctgctggtactcgtatccaaaagggacttattcgatatctctacatcgtcattgacttctctcgggtaaatatttttctttgcaatccgccgctgctgctgctgattttgtgatttttagcttcaatgccgtttcctttgagtttgatggcgtgaaattgagcttatgttgctttcatcagagcttatataaaagagaaactatgcactttgggtcactgataagtaactttaatgtaatcgtcgttctagttttggagatctctgctctttagtcttctcaataggttctataattggctctgtattgtttgcaatgataatcttactctaagtgggtttgtagagcttaaggatgtgatccttattcagattctttattgaaggcaacattatgatttgggttcaaatttctctagttccaaggtatgcaaagtcttacactttggactgttttgtcgtgtctaggcagctgcggaaatggatttcagaccaagccggatggctataatggccaaacatgtcgaagctttcattagagagttctttgaccagaatcctctgagtcaaattgggttggtctctataaaaaatggagttgcgcatacattaacagatcttggtggtagtcctgagactcacatcaaagcgttgatggggaagttggaagctttgggtgactcctctttgcagaacgctctggaacttgtacatgagcatctcaaccaggttccatcttatggtcaccgcgaggttctgatattgtactcagctttatgcacatgtgatccaggcgatatcatggagaccattcaaaaatgcaagaaatccaaattaagatgttctgtaattgggctctctgcagaaatgttcatatgtaaacacctctgccaggaaactggcggattgtattcagttgcagtggacgaggtgagtttagctaccttctacttacacttggacctttgaaaaacttgttttgtatggtataacattgtgctttgtgtgtatttgtcttttcacgcaggtgcatctaaaggatcttctgcttgaacatgcgcctccacctccggcaatagcagaatttgcaattgcaaatttgatcaagatgggtttcccacaaagagctgctgagggttcaatggcgatttgttcgtgtcataaggaagttaagattggagctggttacatgtgcccaagatgcaaagctcgggtatgtgacctccctacggaatgcactatctgcggtctaacacttgtttcttcgccgcatttggcgagatcataccatcatctcttcccgattgctccatttgatgaggtgcctgcactttcaagtctgaatgataatcggagaaaattgggaaagagttgttttggttgccaacagagcctaattggtgcaggtaactacttgaacaccattttatagagtcttaatactgttggttgaataaccatttggtcactagaccagtagttgaacttaagatacggttcacccttgtcatagtatatacaaaggaaccgatccattcactcaaatataaaggctcattggtgcttttgttttttgcttagggaataaacccgtcccatgcgtaacatgtcgtaaatgcaagcactatttctgtctggactgtgacatatacatccacgagagcttacacaactgtcctggctgtgagagcattcaccgtcccaaatcagtttctttgatggaagaatgagagaatgaatgtgttcacactttcaattataaatcacaattgagatgatgagaggaagcaattttttttgtgatataggatgttgtaattggtcttatgtccttaaccaaaatctttcttcttttgtggactctattgctctctcacaattgatccaaaacaaaccgactcaaattttcagagatagcattcttaattgtttgattttctatttaacttgggcttgaaatttcttcactcatgagaaaacgaacagtagtaataaagaattatttcggtggtaaacaaaaggagacgagtcatcagttgtttgttgatactgtcatgacaaggtcgcaactacttccctaaatatctctctgtttgttagaagcttttatattagatctaagtgaaacaattcttagtgattgtcataagtaaacaacgtacttaatctttgagaaaagtccctaacaccaccatgaaggaagaagatactaacgtcactaggttctgcaaggcaacgtctgcgtgtaaagatgcagcattctactatcttgaaggattcgactggaatctcgaagacgccatctctggtttcctcggtgatcaacttcctccgctcaaaataagagcgactccacggagggtgaatgaatggcgagagcgatc

SEQ ID NO: 36068 - DNA, 824 bp, Arabidopsis thaliana landsberg
tttctcgctttctcgctgcctaatgggactagccgggcaacgggagttacttcgcccgttcgctctgtctctctctgtttcgcgtgcccagttccccagccgccgagccgttgccccgcgcgtcctcttttctctccctgcgctgtgtgcctgccttgtcagcgcgcctgtcgtggaccggcgagtgcgcactcgcccacgttgccggatttctcgaccacgacgcccacccactcgcccagctctctttttagagccccaccagtgccccacacacacccctcacctcatttcgcgcagctctgccctctctcgcgctctgcccacaccgccagacgccgccggagacccatgcccgcgttcccgatcatctagctcaccggagaccgcgccaagcctccccgagctctgccccaaggtgagactcccgcccccgtgcttgttttaccttattcgcgtctgcgtttagccaatttggcctcgccggcgtgtggccgcgcctgctcgttgcgcccgcacggtgtccggccatcccaacctcatccagtgcccgagctttggcctagggtgttccctatcacagctgattaccacctcttgcggccgggattcctcactggagttactccggcccgctcgagacctcctccccgccgttctaccctctctgccctcagactcgtggcctcttccccgccattgagttcgccgtggcgttctctccctctctgcccaactccagcgacctcagaacctcccctactcacgcctgcctcaactccagcgacctcaccgccgcggagaggagcagtggcgcctgcaac

SEQ ID NO: 36069 - DNA, 2603 bp, Arabidopsis thaliana landsberg
gacaacccgtgagttttaggtttccgaagatgggatagaaaaaggaagtgagaagaggcataagaggataattatgaagcagtccccgatgattgctgccattgttactcaaagtgggaaggtaaatgaaaccagagtattattgtctcaagaatctgcgaatatgatcatgatgtatgatctataatatggttaagttttttacttaaaatataatatatcttctcgaagaacgtaaaaagaagggaatcaagtcttattttaactataaattgactatcgttggacacttgtgattatatctcgaccaaagtcctaagctgctttcaaagcagtagcagataaaagaattatcatgattatagaaggagacactcgtccaaagaaatcaggcagagagctaagaagctgcaaatatcacgactgaaagtgcattcgaagaagaggatcacaagttttattgaaaatgtgatccatactgcttaagcctaagaaagataacaaacttttatcaagtggtctaatattgggaaattcatggagagtaacattgcataaaataacttctttaacaataactcatggagaaatcagcatcccaagaagacatcatactctttcagaagctatcaataagcaaatccatgagaaaactaatatgcccctaattgacaagctcctaataatttacaaaagaccaaaactttctagttcaattcgcagtttctgataacccattgacgaagaacagcctacattaaagcagacataagaaacgatacggaattgaaccaataaaacctgaaaatttaccaatttcaaggatggccaacggaagaaaaaagaattaacgataatgaatcgatcaacgactttaccggaagaaagcaaacgagaaactggtgggtttctttgctctcagaggatacaagaacaattttctcacaaaaaaagattcacactgaagagagaaagagacgacaagacaaggacacttttaactttttcttatttcaggacaaatccaacagtagaccacaataattacggtttcgtattgtaaaccgtgaaaataaaataaaaaccaaacttgaaccgtttggtcatgaaaggttggaattacaataataaaaacaataattaggattcatggaaattacaaacttggaatctgctggttagaaatgaaaggttgggttcgaggaacaagaatgcactcaaggggatgagccatggtcaagttgagtcctccaacctcatccattttgaccttgtctcctttgatgctcaagtcaaaacactgcaccattgttccaattgcagttcctatgaaaatagtagctaggtttgatcctggacagcctctccttccacttccaaaagcaatgtgcttcagtgctcttctctcctcctcttgccttagaaacctctctggcttaaactcatcaggatcttcccaagtagtaggatctctcatcacagcataagcattaactacaagtgttgtcttttccgctatgtagaaccctttcatctcacaacttctttggaacgtccttaccatgagaggcaatggcgggtgcaatcttagcccttctttgactacagattgtaaataaggtagctttggtagatccttttcttgaatcaaccttgtttctcctacaaccgaatcaatttcttctctcaatctcttaagaacgttacggttgttcatgatctcggccattgtccactgtattgtttgcacagaggtatcagtggctccaatgaaaaggtcctatgattgaacaaacaattatatgtcatacaactctatatcatttctcgacaaaaattcacataatatgagaggaacatttaccacgaaaaaagccttgatgtgattcttagtgatcttgtactctgcattttcgtctccataagctgccaacaacacgtccaacataaccgtaccttgatccttctccggtttctctctatgttccacaagaactttctctagcagcacatcaaatttgttggaaacgcccatgatatccttcttgaatagtgagattccaagtttctgaagctgtctgcgcaacaaaactgccaagaacatctttttcatcaagccaatcgactcggtaactaatccccttagtttctctgtctcaccattctcctctgaaaaactccttcccatgctcatcttgcacaaaatgttgttcatgagattcattgcttctttaccaatctcaacgctctccttcttccttgctttatcgagcagattcctgcaaaaccgctttatgtcatctgcacggatgtctcgtgactgctcttgtgcctgcggtccgagaagcttcatgacagtaagcttcttcatgaacttccagtaatctccgtaaggagcagtgacgaaactggaagatccaaacacgagggactcatcaaccgcggtgacaccgcgagaggagatgttcacgtcttgtgtcctgaagatctcgtaggccactgaggccgaggaaacgaggatgatgggaacattaaaaatccggagatagaggagaggtccatacctggaggagagtttctgtaatgacttgtgggttagagtg

SEQ ID NO: 36070 - DNA, 883 bp, Arabidopsis thaliana landsberg
gaattaaagttttaataatttgcaggaggtaaattgacgaaccagacctctaaaaagagagctagtggacctaaatgtcccgttaccggcaagcgtattcagggtgtaagtattcttcagattcatattctctccgatttgagtctaaagttacatactttgtttgattttggattgacccatttgattgttttgaggctattgtattgattgatgcaaatgtagtagtttaggtttggtttgtttgtgcttattgacggtcttgtgctggttagatgaattcaacatcagtaataactttatcataagctaaatatagtgccgctttgtctttttcaagttttctccttttgtatgtaaggaatcacttttatacttggtggcataaatcttcaaacatcttgtaaattgttcatagtttggtttacagtaatcttaaagttgatggagtcgcttcagccattttccttcagcatctaatttatatctctttggttgtttagattcctcacttgaggccaactgagtacaagaggtcacgtttatcaagaaacaggaggaccgtgaaccgcgcttatggtggggttttgtctggttctgatgattgggaaaggttcagccttgagctaaatattggatttgctttgtgccttcgtaaccaaagacaaatcttaatggttgttcttgtgtgttacagaaccattcgtgctttccttgtggaggagcaaatcattgataagaagggttcgaagcttcaaaatgcacatgaaaagggtgctgacaagagacctagaccctataagttattaagaaatatgggtctgttctagcgatcgtactggatgcagagaaaaacattgtgtactcatcaaaaaaatgaagc

SEQ ID NO: 36071 - DNA, 2756 bp, Arabidopsis thaliana landsberg
ctaaatgagaatgcaagaactttagtatagtgtcttgcgaatagagaacatttaggcttaaaagaatcaatgatttgttcttgcagcaaggagaactccaggtactgcaccgtcaaacaatatccaaggaagcaacacaagacagagtaatgtctgcatacattgtcagcaacgaggacatgcttccacgaattgtccctcacgggttccagcatctcaaaattctcgtcctactgcaacaaatccgagaaacggtactgatccttgtataatagtttagcaaacaaagatcatcgattagcttttgctagtatgtactatatactagtcaaaattcaagcaaattgtccagaccaagtcttccttattgacatgtaatttatattctagtattgttggttataatgcagatgaaagtacagtatcatgtaacacttgtggatcacaatgtgttcttcgtacagccaacacagaagctaacaggggaagacaattcttctcatgtccaacacaaggctgcagtttctttgcgtaagagtctggttttaccccaatttcttcgcataatccatttttttttccttttacatcactcaacacatcagttttttgtttgcactgcttgtaaacagatgggaagatagcataaacaacagtagtgggaatgcaacaacagggtctaatagcggcgggagcggtagacgtggcagccgtggtcgtggccgtggaggtagaggcggccaaagcagtggaggacgacgcggctctggaacaagctttgtctctgcaactggagagccagtgagtggtataaggtgcttctcatgtggcgatccttcacattttgctaacgcttgtcctaatcgtaatacctctaacggtaactatttctaagtctacttactacgaactttgactatgtatgtagcatgattaattagtgctactaacttaatttgggtttttgtattttattttattttattttatgaccactttttctctggaattcatcctaatttgcgtagatcactgttagctggatattttaaatataatatttcacgtgctattctgaatcactgaatagtttccacctattttatttataaatcttgaatagtcgtttttaatttttagttatgttcttagtgagctaatgtggatccatatttcatcattttttttgtattgtctcataattcataattcatacatcaactatatcactatgtatatgccattgatcttgagtctagacatggtcaagtaatagatattaacaaaatgcttaagctacaaagtttagtcctccgaatttgtttttagagatggtcaagtaatagatattaacaactgttaataacacaaaacacagtcgttttgctctgtaagaaaacgacacaacaaccggaataaacgccgttttgttgtttaaaaacggcacaccaattttcagtccattttgaacataaaagatttaaaattctcaaatcgaaattgagataacagaggatccggcgagcttctccggcgtaggattcgggtcattttcttcggcaactatgaaagggaaaaaaagagagagagaggtgattactgattaggccgtctcctgtggaacaagaacgcgtttcttcttacattcctcatcgaaggagttgttgtagccacttgaggtacttttcatactaatcttggaatttgtatagcttggttcggtatattgaacagtcaattaggtatcttgctgtgaatgatcaagtgggtacttatcattgcctcttcttagtagtctcattacaagactgaagtttggtctcaaaattgacaagcttctcgaagcatttgtccttggactataacttatagtcgagcttgttgtcccttctccagttgttatcttggttgtcgtctgtatatagaagattaaaacaactgttttgcttggagtataattgatactttacaatagaataataatgcacgaaattgaggtcgtgagagaatgaggaaagccaagttctcatgccatgtcggccatttctatcttgttgattttagtacctattgtctattttggcttcaaagctacaaaaaggaccatcatctttaagccctgcagctctcactttgactaaaacacggcttactttatttgctgcttcaaagacaaaacgaaaatcgggttgccttcctacttgaaataaacaaaagcaaagctgataggcttctgaaactaatattaattgacaggccagtactaatagaagactttttgaatgaacaaatttcaaacttcaaagctttcaatgatcaaaaaactaatcatagcttgaccatttcctttttatattgttttcctggaaagaagaaaaaaaggtctgcacctcttctattctctctttttcctttcctgaaaccagtttcaaaggttgttttcttgcctagaattttcatagctatgtgtcttggatccagatccatagtttagtagggcctgtattcttctttcaaatatgcttgttatgctacatgatttgagttttttggatggttttatggtatgtagtctttaagagatgtacaaagtgaggtttttgcagacatgattacatcttgtttgatgtcttctaatgaagatttaagggcttctgtgtatgcatgaatggtaaaggaaatgatgaagcttgctgcttttttcatatctcttcttcttatccttctgatctctgagacaacagggttgaacttag

SEQ ID NO: 36072 - DNA, 337 bp, Arabidopsis thaliana landsberg
tatcatggactacggtcttatcatcttcgttggattttctatcgtaagagctttgctgtacgttgcaaaggccctccacttgcaaattgggaaggataccaaactcggttatgtttagagacatagaacagttccctgcctccgaggagatgcttggttatatcattattcaattaggctctccagtctttttttgccaatagcacttacgtccgtgaacggatcttgaggtggattcgtgatgaacctgaagccatcgagttctttctacttgatctctatggagactctaattttacttttgcatttcagtctacaatgtgaccaaaaaaatata

SEQ ID NO: 36073 - DNA, 570 bp, Arabidopsis thaliana landsberg
aatccgatcattcaccgagaaatattctattttatatatttatgtgaagctcttcaattgaagaaagaggatgaagacaatcgtcaaatgcttgactttggtttcagttcttcttcacgacagctcaaggtgatgatcatttttttattttactcttctacctaatcatatcactgcgaatcttttccaaagtttcgctctttattctctcaatgtgctttttcctgagttgttgttgaactagggttcttctgggtactagtaactgttttgctgattttctgagctgcttttggctatagaatttcagttttcaaaccaaaccttgtcgatttcaaatcaatcctagtcggcagtagatctgatctgtctcaattgggctagattttacagtgtatcaattcaccactagttcaaagttcatcagtgcttacacaagtttacttttttttttgtatgtgttcatgatttagctaatgatcaagatacttgagatataataatacaccttaatctaatgcatacgggtctacaaattctactaggaagatcggctctttgatgggatgg

SEQ ID NO: 36074 - DNA, 1173 bp, Arabidopsis thaliana landsberg
  unsure (1)..(1173): unsure at all n locations
tgttttttgtgatttttgcgccacggctagtccacgtgacccaatggcattcccttttatacttcttggtaataaggttgatattgatggaggaaatagccgagtggtaagttactattagtcttaagcttttaaatctgaatagtccatttcctttgtttgctatatatttcctttctttgtgttcaggtatctgagaagaaggctagagaatggtgtgctgaaaagggaaacatagtctatttcgagacatcggctaaagaagattacaatgtcgatgactccttcttgtgcatcacaaaacttgcccttgcaaatgaacgcgaccaagatatgtaagtgttattagtctttctttatgtgatcctctcactttgtgaatctcctccatatgatggatccttattaaactcaagatggaaaaccagaatctctcaattcaaattttcatataatctttttttgcaactcggtgctacagatatttccagccagatactggttcggtgcctgagcaaagaggaggttgtgcttgctgaatgctgaagaaacatttcttactctcttgattatgcattactngttggtgtgtctataatcttaatgctgagaaggaccaataaaacttgtattgttccctaagtaaggttttgttacctttctggttcttcatctttgacatttggtggttcacgatttgtatgtaacaacagttcaagtgtacatgtaatgggttggttctgtcttctttatgtaatgggaaactaatgatgagtccggttcagccgcgctaaaccgaatccggttcggtttgaaatatcagttagcaatttggcggtgacgtggcgcttccttccccacttgtttcgctccttagaattcagttgaatctctcgaatcgtcgtcgtcaatcttttcgatttctcttcctctcgtctctctctctgttaacaatggcgacgactagtttagtgaccggactaaaagtggtattaccggttatgttctgtctgatgctagcgactcttgtctacaccatcatcaccgatggccttcctttacctgatcgtcaagatgtcttcacaccgtaaaacccatttctctatttctctctttcttcattntcacacagagacagagacacacagatatgtgtttattcatgttagtttc

SEQ ID NO: 36075 - DNA, 852 bp, Arabidopsis thaliana landsberg
accgacgagagaaggtttgataacgaaaaatctgtggcagcttggatagtgtacaaggcattacttcaattgagattatttgaagcagagaaaacaaacatatttgatagaattgttcataagattcgatcgtccattgaggtaataatttaaaggcaatgactatgaaagtagtatctgaaccctctgaaacccgaactttatcttcaagttatactaattttggtccataagggccaagatgacacatggctcctagcttaatggctcacaccaagccctacccttttatatttccttcaatctacactcaagttcagcaatacaaataatgcggcttcaagacgtaacagatcatcccatgctacactatttgggagattggttcaagtaagcttggtaaagtgaacctccgattaatccattttttaagagcctcagtaatagttggtaacaacattgtagggaatgcaaccatcttcagtgggattggaaacatccagcggttacagtgggatggctggaataccaaatgaccaacagatggtcgaagctaaatatccggctttactattcaagcaacacttagcagcatacgttgagaaaacatatggaatgatccgagacaaattaaagaaagagataaatccattactaaatctctgtatccatgttagtacatcattcatcaagttaatatggaactcatcttaaagttttgctaatcgcgtatgttaataatgtgttatatgtgagatgtaacaggcaccaagaccaacaagagccaaaaccttgcgagatgaataaaaaagcatccacttgaccacaattgccaagcaacaagcatcatat

SEQ ID NO: 36076 - DNA, 1447 bp, Arabidopsis thaliana landsberg
ttccaggcgatcttcaactactgaaagaaaaggtttaaaataaaacttatgtgattgttacaagtcttctggatacagacgttatgttgcataggttaatgatcttattttacggggtgagataaagacggtttaatagattatttgattcgtgaaacctatgcatagttcttgtgaatgacaaagcagttccacatatggagtacctttggctgataatacttatgcatatgtttcgttttctgttttttatgtgaacttagcgtaaaagatggcagaagcctatcttacggcgtttacaggtttgtattatttatttccatttgaaacgatcaaggcctatgttggaaaggcatcttacctcgattatttagttaatgttttgcttcattgtttggaacagcctcccccaccggttaatgacaccaatccctataatgtgtttaggccaagggagaaagttcacagactccacacaagaagggtaggctgtcttttttatgcatgtgcgacattttttctattaaaatccaactggagaaagaaaaatagtgataaggctttacttcatcttcagatgcagaggagataaaacaatgtgcagtcattggcatagcttcgacaggtgagtgaggcacctgaacctttatggttctttaatttcctggaacctgagcaatatacgctgacagcgccttcttttagtttctctatggacaacattgattgttatggttgataatgatctgatcctgattcttctatggatatctattggattctgaatacatgggatatgttattatcaggttagactccatctaggtcaagcacatagcattttggaggctctcattcaggtgctctatatgacagatgtagagtttatcttatcaagcagctagcattctccaatgttgctaatttgatgatacccattccgtacagagaagacacgcacaggtgtgtcatggacagtgaggttagccttcagagaatccaactccaatacagggtacttacttctacttcctctaaaactctatgttctgtctttttatcagttttacgggtctaaaattttttttttttttggcagcatgaaacagagctcttggaagatagcttggctatgcctggatttcaacccactacaacatcatacaaatttggctcaagcgatgatgaactgatggactctgatgatcacaccagtactcgtgtacgtacaagacctgcggttattcctagttctcgtttcaccaacttaaatctgaatgcatctcatcccggaggcatcaaacaagaagttagaagaccacagtcacagcatggatggcttcacagactggtaaaaccttctcttacaacacctaagctctctctagctactataatcaatcatttaagcaaacctgtaatgattttgttccttaggatcctaatg

SEQ ID NO: 36077 - DNA, 1085 bp, Arabidopsis thaliana landsberg
tcaggagccaacactctaacaacgttttctcaccggcgtcaataaccgcagtgttcaccatgatggctctctggccccggcagttctttgatctccgatcaaatcctctccttcctcggatcttcttctatcgatgagctcaactccgtcttccgcgtcattactactgtcttcgctgacggtagtaatataggcggcccaacgatcaaagtggcaaatggcgcttggatcgatcaatctttctcgattgattcgtcttccaagaatctctttgagaattttttcaaagctgatttggcttcactcttcagtggatttcaaaccaaatgtactaatactctgtttgctctgtttttgacaaatttgaaatagtctagtatcttttatttattggaaaaaatggttttagcttttggttttggtgatgaatgtttttattttatatttaaggctgaagaagtgcctatcaatgtgaactcgtgggcttcacgtcacactaatggtcttataaaagatcttcttcctcatggatccgttacaagcgaaacaatttggatttatggaaccgcatgtacttcaagggagcttgggaagaaaaatttgaaaaatcaatgacgaaagaccgagactttcaccttatcaatgggacatcagtttctgtgtctctcatgaccagctataaggaccaatacatagaggcttatgatggtttcaaggtcctacgccttccttaccgacgaggccgtgatgacaccaaccgcaaattctcaatgtatttctatctccctgacaagaaagatggattggatgatctcttgaagagaatggcatctacacctggattcttggatagtcacattccgagatacaaagttgaacttgaggaatttagaattccaaagtttaagatcgaattcggtttttctgctacaagcgttttgaatcaagtgggagtactgcattcagtgtcaatgtaccataaagcttgtgtcgagatcgatgaagaaggtgctgaaactgcggctgcaactgctgatgtagaagatgacggttgtgctcttgatatggagccacctcctaagaag

SEQ ID NO: 36078 - DNA, 1040 bp, Arabidopsis thaliana landsberg
ccaaaaacgacctcaacaccgcgacgctaacggaaactacttgtctcatggcgtctacaaccaccacaagatgttcttcttgctcaccattattcactgatgatgatgaacataaccctacattaatgttctttaaagatccaagaagcttcttaacttctttcctcatgtttttcctaaacccgacatatcccgagacgtcgacatctttccttctcctaacacaagactgaagaccaagaacatgctcatgagtctcaaccatgagatccctcgagacgttgcatatatccattagcctcaacgatccatcaagcatttcctccataaactctcccttcactttcttcttcttcttcttcttctcatcactaaacgacaacaccctttgcgtcgaacccatcttcagaagatcttccgaacagtcgtacagatcctccaaccccgataaaccggagtgaaccgactcagacgacgtcattgtcgacgtgttcatagtgataagaaatttgtcgagcgactcctcgatcgctgctgtgctaggatgagatcttgatggtaagcttatagatcttacatggttcttgatcatcatcatcaccatattggtttgagttttgttgtttctctatactgattttattcaacgagctctatttataacataaaagtttgtaacatcaaccaacaaaacttcaacaaaaataaggtatataatattttaaatttgtccgattgttatgggcaaaatgtgtgattcttagttgtcattataatttttaaagtcgattgtcaaattctgcgtaataatttggccacatagttgatgagtcatcgactattatgcttccggtttcgccacatatttaatagatagtcgattactctaaaattaaaataatgtcaacggtctatgaattgtctcggtaggtaaagaaatgcagatcttcctcaaccatattatgcctcgtcctgtcatacctatattgtctgattagcctcaacatcttgtgttgtgacacgttggaaatagtcgaatc

SEQ ID NO: 36079 - DNA, 849 bp, Arabidopsis thaliana landsberg
accgttagcgagcttgggtgccggttttagtatcattccttaggttgtagtgtttgtaatcaaaataaattttctcaagaacaaaactaaaattttctgggaatatgaagaagaaaaggaagaaatgaagaggaagagaagaaaacgatgaagaattaaatttaaggtaaaatagacttttaacaggctaaaaatacttaggcttataagcccaattgaaatgtgtactttttataatttttggcccaaaatgtgcctaaatttataatagccccataatttctaatattcatttgtgacagtttaagacaaaaataattattgtagtggagcaaaaaagatgtaattgtgccgacagtgatagtcattgtggttcaacgacagttttttagttagtaattgtgccggataagtgatagttataagtcattaactatgaagttttgaaactatagtttcgtcgtaattagtaacgaacttgagacttggtatctgtcacggtttagagatgataatttcactatgtaatagtgacgaaatcgctactcgatttgttttcgcaatatatgtgatgctttagggacagaaaaaagttgttacgattgtattgtaaccatttaaaaatcgtcacacattttagtaatatttttatcgtaacaaaatatttattattttgataaaatatttggtcttattaaaattattttcatgtaagctgtatatatagaaaataaatggaattaattttttttggaaaaagaaataaataaatagaattgttgcaatgggacgatgaaaataaaatacaaatttcgaatttctgaaaatcaaggatttaaacttacgatt

SEQ ID NO: 36080 - DNA, 898 bp, Arabidopsis thaliana landsberg
cgctactacactctttgggacgaacttggattcacttcggatcaggtgcagaagctcatcttcgagatgtgcttcactttcactcgctgcaccaaacccgtctctcttgttccgccggtgtattatgctgacatggttgcttttagaggaaggatgtaccacgaggcaagctctcgtgagaagaactttaagcagccgcggggagcgtcaacctcttctgctttgcttgcctcttccatatcttctcttacaattgaggaccaagcgattttccagcttgatgcagagcttgagaatgttatggtcttcgtctgagaagagagtgagtctcttttgtgttttgggtctcaagctgaacttaaacctatattcgaaatcggaacgccccaataacgcagttttaactccttttttctggtagaaaggagtttgtgcgtgaatctaattgggtttttcgtagtgtgtttctttctttttggttttggtgtgttgaaacgaatttgtaatctcttttgagcaaaaactacgtcttcttctttttttggtattattgtatttcagactctgcattcagtaattatttcatattttgctaattttgtttctgagttttgttaaaatgctttagatctcggagattagaattacatgttcagtgtgtgtctgaaatttagtaagtgcattaaccatgatcatgttcggtcgctactgaagtatgataagctctgtatcattcaattacttcatcattccttccacttttgccccttgtggactaccacagatgttacaagacaaaacataatctgtaaattgctaatctctgaacctaagacaataatatgaaacatttatttttattcccaatcgttttataaagattctgttgcttgcacaa

SEQ ID NO: 36081 - DNA, 686 bp, Arabidopsis thaliana landsberg
  unsure (1)..(686): unsure at all n locations
gaacccagagctattcacgtggagctctatcactggtcattcttaattctctggagttcacaaatttatgcaagaaaataaaaaanaattgattttgaccgcctccgagtctttttacaactttttaattcgaattttgttaacattaactgataatcttgctgcataatataaccaccactaaatttacggtttactatcagaaatctgttttattctatattaaattaaattccaagatctttattttcctttacttgacacaatcgtttaattatttgtcattttattttcttaatttttaacctaaattaattaaaaaaaagatgacttgacccttatttcattatttgtatcatattaattggtcggtcgtcggtgttatattttcaccggctagtcggtaaagataatgtgcttatatttggtgacaaggattcactaactttgatctttggtgcaattgaagatcagccatatgtatttcaaccttatattatcccccaaatcattccaacttttcttttataaacattcgtggccttcatttttccactctgttgttttctcatacttttaataatttcttttgcccatttgtcaatatcattcgaagaactcagaaacaactaactcttcattcttgattctcccacttaaacgacggcgtttttgcttaacgttta

SEQ ID NO: 36082 - DNA, 1736 bp, Arabidopsis thaliana landsberg
gaatttgcattcccgttctctaagtattttcattgtcaatatacatttaagttttcgagaaaaataattctttaaaagatgatatacaaaccatgtatatttttgatcgctatctaatttgtttagcgacaaacatatttggtatttgtagctcataccaaaaaaaaaattggtattaactacatatatgtataaacttattgattaaaaacatatatatgtttatcaaaaacatctttcagggctacaatttcaactaaaagtagtaaggtaatgtggctaattggtcatggggacgatccaaatttcctattttaaagaaaaaaggtaatcgggtgatgttggtttaatagaatgttagtttgtcaaagagaacatgtgaaagctggtctaatttttttttcttatatatgtggagaagacatgagaacatgtcactctatctttggaagagacaaattagtaattcaattagagaaattggtttaactaactcaatttagcaataaagagccatgacaaaaataagagccgtaaccaaattatgtgaatatgatttcagcacgtgatgtggacttttgagtttgacacttattgggaatcctttcatatctagtgatttattatcactacgtcacccacgttatgaaaataaataatcttatactggtatacattaatacatacgtcaataagaaccaaaatttgattttccttcttgacggttatatctttagccaaaaggagcggtgcttccaagatctacaaagacacctagtgacaaagatgccatcggttcgacgaagatgctccgattatgcccttgctgcatacggtggggccctcatgaaaacatgtcttaaatgctacggttgcttggtttgagcaattgattttgccaaaattccttctagtgagtggtgtggatgatcaatacttgtcggtatcgcaaggttttacctcccggcttatagtcccctttgcctttgtggtagagtttgtaacctttggggttactatgaatgcgatcaagcaagaagtagtgaagcttgtacttgtatgtcgatctcttatgtgctctttctttgatttgtatcttatctatcattcgtttaaccattttttggtaacctttttggcaattgttgcctttttttctttgcatttcctttgttatggatgtattttcttctcttgtattagaagttgttgtgactctttaatctaatgaaagtcatatgtttgcccaaaaaaaaaaaaaagaaccaaaattttataaaagtgccgttacatgatgagttagaatttctattgcatgaaattaatcctaatctgagcccacataatttagcactcaataccccctttattacttttaatttgggttggttatcccatcccatcaattaagagtattggttatctcgattttgatcgcttaatcgatagttatatacttatatgttaagaaattaagaatctcattatatgtcctttgtcataagatcgaacatatgaagaaaatagaaggacgagataatttgtttgattttgaaaagttgaaaagtttcagaaagtgtatatttttggtccttgcaaaatacttatttgttgttcatatggactttatggtttataactctctctttggtgttttttaaaggagtattccggccgaaactaaactaacctcctgaacgaatgtagattgtggagtagctatttcattacaaatt

SEQ ID NO: 36083 - DNA, 1333 bp, Arabidopsis thaliana landsberg
gaagcaaccatgacgagaaactattctgtttttgccagtctttaggacgtctctgccatctaacaagcaacacgacaacccctaagaaagcggttagcgccatcacaaacccaatacccgcaatagcaagcttcttagatgacataccaccgatcggtcctttgtatttcccatcaactccaaaaagtccatctaaactcccagcagcattgttcagcttcatgatctctaaaccgttaagtatcgcattcggtttacccgactgaagattcggagtcggaccaacctgaaccaagatcgaaccattggtgatcgtagacgcattaagcacgaaatccgcgtaatacgctgtacctaaagcgctggttagtgaggagaggtcaagtgcagagattgcagagagcttgttgatgaaaacattgaagataaggtcgttaagcgatttgcttacaatgtcacaaaaatgtaacctaatgaagtaatcatgaccaaaatcaacactcattctccatgagagattgaaattaggttgcgaggtttgtgcatcggccatttcctccgcggtggcgtaaaccggattaggagcgatcaacgccgtagctccaccgtctggataagtaatcgtactaggatcaacagtgacatttctcgaaccttcagggaacgtattgtaaggtttatcagagagccaagtgcgtgagagaggatctatcttcggagaaatcaaatctcctccgatatttatccgatgaaggatctcaagagagaagctacttaagcctttgaagtcaggagcttgaggaacagaggaagcagagtccggaacaagctcgtccggaacagagacgatttcaacggcgttgataaaagcggtggagcctttatgtggtttgaaataaagagagagtttctctgcggcgtagattagatattctttgaagacgatagaagaagtatctccggcggagaaatcgtgtaagaggacggtggtgtcggtggtgacggagaagacggagtttgttagattgtagagaggatgattgagaggataaaaatggagacggatccagtgacgaccaggtcgtgaaatgtagaaggagtaagttgattttccggcgaagattctagcggttaagtataagggaagggtactggcattagagtcggatgatcggaattgagtcgacggaggttttgatgtcttcatctgtttgaagaaacgcgacggattgttgatcggatttgaaattacgaccgtcggagagttttgtttcatcggaggagccacaatcgatgaggtagttatcagctggagtgaatgaagaactggatt

SEQ ID NO: 36084 - DNA, 1672 bp, Arabidopsis thaliana landsberg
ctctgattctttatttggtgttttcttgaagcttctgtataaggctaaattgaaagtctttgcagtttgattttatagctgctatttgattgatgcacctaaaactacatacaagtttccacatttttacttttagttaatgattgaacagagcttcttcaagctttgtgtgctgatatggtgtgttactgcttgtgtttaacttctggtttatcttttttttccatgtcctgcagcatccagagactcatctaatttgttagcacatgaagctgcatttgcattgggtcagatgcaagatgctgaagccattcctgctcttgagtcggttcttaatgatatgtctttgcatccaatagtacgacatgagttgagtataagttgatccttattttctctgtatcagtataagctttttgattctttcatatcactgattcgctgttaatatattattacaggcagcagaagcccttggagctattggtttgccgggtcctgttaacattttaaagaaaagcttgagatcgaaaccagctcaggaggttcgggaaacatgtgaattagctctcaaaaggattgaagacatgagtaacgttgatgccgagaaccagtcatcaacgacagagaaatcacctttcatgtctgttgacccagcaggcccagctgcgtctttctcttctgttcaccaactcaggttcttccactcttgaccacctcaacattctctagattatttaatattttgtagcacgttattgattaagatcatcgaactacaggcaagttctcctggatgaaacaaaaggcatgtatgagagatatgctgcactgttcgctctaaggaatattgtggagaggaagctgtttctgccatagttgattctttgagtgctagtagtgcccttctacgtcacgaggtttgtcaactttcctgtattatgttcatgaacttgaatgtgtctgtttttgttaaaatcttgtaccttgaatctttgctttattgctctcgaaccttaaatctgtataagtgctgccttgtaattgatgcaatttttcttaggttgcttatgtcttgggtcagttgcaaagtaaaactgctttagctactctaagcaaagtacttagagatgtgaatgagcacccaatggttagacatgaggctgcagaagcgcttggttctattgctggtatcttccctaaaatgcttagtttgagattacaacaatctactgtcttagtctttagtctttacttactcttcacattgctcggcccttttcagatgaacagagcattgctttgctagaagaattctcaaaggaccctgagccaattgttgcacaaagctgtgaagtagcattgagtatgttggaatttgaaaattccgggaaatcgtttgaggtaaaaacacattgatcccaaactcttacacttatatatatctaataaatctgtaatgaccccatatcgaaacatttttgcagttttttttcacgcaagacccgcttgttcactaagaatctcaatcattcttcgtcaaacatttaccgacaaaggaaagcaaacattttatacagagagagaagaaactgctactttaacatgtctttatgtacgattataaataactctattcatatgtttaaggttaagattacattgtcttatg

SEQ ID NO: 36085 - DNA, 1787 bp, Arabidopsis thaliana landsberg
tcacccattcaaggctagaataatggaagaacataacaaaagcggatattatgcaaagcaagagaaacgtttatgtgtttttcattgaagataataaaatggatttccagtatttcattaataaaataataaaaaaacagtatgcccacatgcagttcaattttgagaagaaaacaactgatctacatgctacgataaaaacaccactattttgttgtgtttataatttgttctgttttttttttcttttctttctttcttaattttttttgaaaatatgcaaaattgcattatttaataaaagtttacccatttcaaaattttaaaaatggcttgtatttttattaaagatgcttattagcttgtacaatattgttcaatacataaattatctacttttgttttagttttaacattttctattattatattttatctaaaacaataaaaaaattaattataacaatatcatataaatatttgtacatttagtagcatttaaatatatgttgaagaataaggtatggtattggaaggttttaatatagtctattattattttattataaatttacaatacaaaattcaaaataaagcaaatcagatttataaaactaatataatgttcagattaaaaaggtttcaataaaatatatgtttgttatatatttgatctccgaaaagttatcgatgtcaccattcaacatatattttgaagcgttcaaaccacttgatccgctttatttctgcttaaaacacctaatcctcttaatccgctttaattctgcttgaaacaccttatccgcttgatccgctccaccaaatacgctttgtccattcggagctttcgcttggttattaattacatgctttcaaattttagccatagatatgacatctatcttgtcacataaatcttcctaagtacacggtttccaattaatgtaccgaaacgcttcatgtcacctacgtaaataagctttaggagcgctaaagaataatccaaatacaccatacttaccataatagttggagatatttcgctcaaggtgtactgcacatgctccatgatgagctttcagataaatcacactgaggcctttatatatagaagaatgtatgtctaatacaatcattaaatcttcagtgtcttgaacaatgtcagctaatttatcaaagaaccacgctcatgaagcatcagtctcaccatcaacaacaccaagagctattgaaaatatttggaagttcccgccttgagcacatgtaatgaggatacatcctttgtaacgtcctactagctgtgttccatctacgacagttacctttctcatatacttcagaccttttatagaagccctgagagatacaaatacatacttaaagtgttgtttactatcagcttcaggtgcagagtgtaggtgagttattgtacctggattagctaatttaagaagatacaaataggtagccaaaaacctgtaactttttatatcatcctccttacattttccactgcaacatctttagctctccaagcggtagaatatgacatccgaacattgagatcatttaggagcaactgtggtaaaccgacagctcttggacccccttgtgtagaactgtatctgctcttcactacctctgcaagaagcttataactagcatatttattataattcatgcgagtgtcgatgtcacacgtatgggtggtatcatactatgtgatttgaaacattctgaattcttgacgacttgagcagtcaaatgtcatggacatgtatcatcaa

SEQ ID NO: 36086 - DNA, 1492 bp, Arabidopsis thaliana landsberg
atttaagtacaaaagcagccgagggagagattattcgtcatcatcaattgtattttcatttgttttcaccagaaaacacactagtgtcagccatccaacagatacctcaagctacagaaagcttagggcgaaagactaaaacaccttctcttctccaatgggaccaccggctagtcccctctgtccattgccatgaaacataccaccaccgcagataaataatcaaatgagttccgccccaaagcctccatcaccagctctcgcgcacatcttgggggatcgtagtggcggtttaagccacgcctaacaatgctaaccgctttttggctcgtcaagacatcccaaatcccatcgcacccaatcacaagaaactcatcgtcttcaggcagagttatctgcttgatttctggttccgagatcagtggagattgagagccgtgtggcagttttaaatcccagtcgcccagagctcgggttacagctaggacttcatttaggtaaccgtcattagtgatgaaaccgccggattcctccactcttcttctctcaagtagattaatcggtttatggtcttcagacatgtctatcgctctgcctttcctgcatagaaccgctctgcagtctccggcatttgcaaccattaagagtctgcaaaagacaagaacataagtatcccatgagaaaatcacagttaaaccccaaagacaacaacagaaagagtaatcaaaagtataaaaccatagccaatattgctcatgtcacaggttatatacttacaatctagtatatgtaagagctctcttaagatcctaacaatagatttatttacctttgtgcacatcttcgtatatgcgcaagagatctcttaagattctaaagatagattgagaactaaacaaaactgaatgaaacacgtaccttccacaaataagagcagtcagagcggtggtaccacaagaatcgctgatactgcaatcctctgccaaagctatatcagcttgaagaaacgcatttctcaatgaagtctcaacttcttccacataaacactactcacttccgatgtctgtggaaactgctcatcttcaaagaaaaacctaatggcattttcccgtacgtatgctgctgcttctggtcctccatgcccgtcaaaaacctaagcagaggaaagtcaagtcagaatgtatacttaaaagagcatcagattataaggaagcaacgatacataccgcatagaaagcactaggcttcggcaactcaaaaagggaaccaacttgagaagataaatcgtctatgcgaatgtgttcatcttccatgtttctctttggcccaatatcagcaaagcttccagaccggatggtcggaatataatccaagacactaggatcgcaatcaccctctggaaagatatcagcctgctaaataaaaggtatacacggatgctcaattgagtatagcaacaaataaaacacaagcagtgaagacaagacagtt

SEQ ID NO: 36087 - DNA, 3213 bp, Arabidopsis thaliana landsberg
gagattgcagtaactctgtcttgccaaaggctctgtcgtttctttgttttgttaaagtagaatgttaccaccaagtagaacttttgtagtttagtattagctttttttctttcttttggtaaaagatccatccttttcattacaaagaaactattaaccagtcttaatctcaaacacactcaaacgattctgttaaagaagtcatcttttaaggatacatagctaatctatcttcactcatatatgatcatcataaagtttgggtggactcttcatgttttggagccatggagtgtgaagaatctgaaggctctctcgtaggactcgatactgaaggttttcttgtaggacttgaatttgatgggtttattgtaggacttgaatctggtgtggccatatgagatgtttggttgggactagtggaacccgatgatgattgcgtgattgaggttatcacgctaggtagattctctggagaagcatgcatgttgactcttatcctggtggggatgttcacatactcatcgggtttcgtcaaggatctcttcctggaaaatcagagcaaaaacgaatggccatgattcttttcttctctaatgctaataactaaagcagatgctcatgcttcggtttgagttacctgaagaagctcttcgataacatcctccatggtgataactcctacaacctcctcattggtaggaaaatcaggtatgggagtattctcaatgtccaaaatgcagaacgaacagcctctatgtcgcttcttagctggagcagccaatagacttgttttccctgacccttgctgctcctcaccgttctcactcttgccggattttgcatctccggtttcaattttgaatactacaattccaaagaaaattaggctaacatgtgttctcatgtttatttatggaacgtcgctaagttatgccgagacacaccttccttctccgatacctcaaactgagcttttggtttcctacaactgtccttaaaaagttcgtctttcgttttcttgttttttctgcgctcaataccattttcacttgtttcgggagattgctcctgctcgtcaagatccttgtaaacaactgctatgtgactgtgacccttctggaactcgtttaagatatcatatagtggcatggtctcagagacactggaggaaataaatagtataaacatgaactctgtgtatgcattaaatcctcgtcgtaaagaaagaaagttagctttagagagtcatttaccgtggaatttttctcatggacatttttctcagaggaacttcctttctggcatcaactgccaatagatttttaacctgcatcagcaaaaggggacattacatgctgtgaagctagacaatacaaaaacaaagtccatatgaaagataggtaccagaatgagcccaattatatgtgtgggatttctgaaataaactggaactctgctatgaccaactgacataattgtatttaaagtttccctgtattgtcgatgaaagcagattataaggtcaaaatatttaagtaaactgaataagagtaaatagaagatgatggaagcaaaacaaaaaaaaaagaacccacaaattaagaggtgtatcaagctcaagggaaaatgcattcgatatgggagtcattgcatcttttgccgtcttttcagttaattcaagtgcacctgtgatgattgaagtctcatcggttgttagatctccacctttcccagcctagtaaacaagaattatatacaaaagtctgtcagaaaagttggctctaagagacacaacggttcagcgacacatctggaactatttattatggaggacaacacagcttcagttttccattccaaggtcatagcaaacatcactagctgcatacctcatttccatggaagttcacaaatgtctttagctctgctcttcgtaagagaacaccatgtcccttacccaacatccaatcaagaacctgaagcaacaatgtttaccaaaacagagaaacatcaagatttaaccgagcatttcaatcaagccagaaaagggattacacaagctgatttttcaaaacagaaaatctgactctctaccttactgattggatatgaaattgggaagaacagttcaagaagaacacgaacaaaaggagccattatcgctccaaccttaagcccgtatcgagtacaaactgcttgtggcattatctgcagatactcaacagcagagaaactataatcacaaactgtaaaaatggaaaacaaaagtatatcaaaactataggtaacagatgtaaaacctctccaaacaccagtataagagtcactgaaagaagaatagctaaccaaggaggcacaattttatccaaaaatattggtaaagcctacaataaaaagagatcatcaacaccattatatatacaagtctctgcttcaaatacatagaaaccaaaaaatcaagtatcacctccatagccatagagtttccgatcaaaagtgtacatagcaacagatgctgattcttcactactggaaatatcttacctaacaatcaaatacacatgttcttcaattgctatgcacaattaaaaatcataaaatcagctaaacaacagaatcttcaaaattcaacagaatcgtcatcaagttgaagcactcaccggcgttgattcgatcttgaggacggccagatttgatgagaacttcgaggtcgactaaaccgagagacatgagaccaagagttaaaccagccatcaagccagcgaacgctacaagagctatgattatcacgacgtagagcgagaacgtggttccgcagcacggaatatccgatgacatagttttagagttaccggaatctgagaatttgtttccggcggaaattgttggggagaattcggcgagagagatgagtttagagtgactctttgatgttttagtgcgtatctaattcagacgatcatcttttatcaaacgcattaatttcgactttccttattgggtatttatttaatattgtttttgagatctaaccggaataaatgtccggtcgaattttaccaatctggttgtggtggaccaaattttttattttggtacccctacttccattctcatcgagtgagctagtaagattcaaatactacatagttattttggtaccctaacttccattcatatattctcttacgtcattccaagtgcatatat

SEQ ID NO: 36088 - DNA, 926 bp, Arabidopsis thaliana landsberg
  unsure (1)..(926): unsure at all n locations
ggttgtcccttcctattcaggacctccgggatcatttttaccaagtccttgggatatgatgggaactgatgcagttgaacatcatggaaactcttcagttatcacaagccaagtccactcttcacaagatcagtttgatctcactgacagaaattcatnnnnnnnnnnnnnnnnnnnnnnntcaaactttgcagctcctgaaacacagacattaagtcttcataacatcatcaccactgacaagagaccttccagattcagagacaatgatcaatcatgttgttgccaaagaaaggagaaagctcttgaagatacaacattttgtcaaccaccaccaccacaaatgatccaacaagatttggatttcctgagtaagtctgtgcctgcggttccttcaactcccaacccggtgttgcggctgatgggaaaggatttgatggttattaaccaaagagaagagccttcactcagcgaatcaagtccagacccagcctctcagtttgtggatctttataagacacagcaagcgtctccgtctgttaatcatgttcatcctcctcacagcggaaatggttatttggacaccaatacaagcttctacaacatcccatgaaagttcagaccgagaactctacttctctccaagatactaaataatattccatggcatttcagatcaaagtccaggcattttccttaagcttgagatcttgagaagctagacacctcaagatctcatgtttctctataataaagaggttgagaatctcaaaaaggctgctttagaaagacaatggtgagactgagataaattctctcctcataggatgatatatatgagaactccactacggtaaaaggacccccacttttgttttaagttttaaggatgaaaacttataattataatgttatgaaagcgaatt

SEQ ID NO: 36089 - DNA, 1965 bp, Arabidopsis thaliana landsberg
aaaataacagaaacatattaaaataaaaatagagtaatttctcgatcgatagctcgctctgctggttctctgttggttctctgttggcatacttcgcacgctcttcacaagcaagccacacgtgcatcttcatatttgttttcctcaaaagagaaatcgtaaaccatacaaaaagaaaatgaaacaaggaacaaaaaatttactcggagtcggtgtccatattctccatgcctttcaatcctctccgtttctgctgctgcatttacaattcaatatataatcagtttccattcctgttaatcaatactcagttgaaaaaacaagactaaaaatgcaggttttgactgaataaaaatagtatattcaactgatcacataaataaacaaaggatcaaatgattttcacaattttgttaaaaaaacagagtgacaccaccacttgggtttattttatgtcaaatagtattactttgcaaacaatattttaaacaataacagtacattattctctacattaggtggaatagtaggtcccatgtcttgtccattttgtgaattccattaaaatacattttttatatgttataaataatattaaggtccacccaatgttgtctacaactcaccaccttctcttccacatattttcacataaaaatattatgttaattatatatagattcatttataatcacattccatcttttgttcttcttctattatactaatcttacttattttaagaagagtcttttatctcttttgtcattatcacacaactaagaactgaaaaaagggttaagtaaagttaattaccttcttcacatttttcttctccctaacttcataacggttcttggtcaaatcagataaccacatccctggaaaacaaaactgtacaataatacattaatcaaaacatattttcatttatgattttttttttgtttttaactctgtgagataaaaataagtactttttttttaatgaattttacctgaagggctttatcaatgttcttagctcgcttcttaggtctatgaggaagcttgcaacctttcatagccaaaaaatcttcttccttctctttatttgacaaagctatatacaactttggccacacatgcttctttgtttctttcacaggttccttaataattttcccactctcatctattcccatcgaaccccttgttgtataatacctatcttccttctcgggccacgccatacacgatctccgcacattgactaaagaatcagtgatcctatcaccgcagaaacataacaatatcttacatataaaaaaacttgaaaaatatcactttttcccccaataatacttacttgttaggacggttaagatgtcgagaaggtgagcctctctcagaagagacagcacgagaaatgagtttacgtttagtcaaacaatcagttgatttgccattggcaaggctttgatctttcttcactttcatacatctaactcttttcctctcaccccattgcaacacaaaatctgcctctgtggttccacttcctctttgtccctttacctcctccattacacaacactcactttctttctcttaaccttaaacaaccaacaaagaaacataaactcagacattgaaaactcttccagaaatagaccaaacaaatctagaacaaccactaagaaacttctgtttacaaaaggggaaaaagttctgtttacaaatcatactcgtttctgatttctaacaaatactgaaacaaaaccacagattaagatagacaaatcaggactaatttgtagagacaagacacactaacctcaagatctgcaactttaactcagcgacttatcttccagaatcaccctacaaagcagcaatatccaaaaacaatattaaaaaaatcagaaaaaaaatagactaaaatctataaatcagatagtgtttacagcagaatcgattcttcaa

SEQ ID NO: 36090 - DNA, 2031 bp, Arabidopsis thaliana landsberg
acatgtgttttttatttgttcacgtgattagccacgatttttttttcttttttctttcttttttctttctaagtatgttgcgtccactctatgatctcaggtttgaataaaatataaagttctaatgaactggccaattaagttatatcatttatacatggaatatttatagtttccattggtaatttttttgttttagtggagtgctaattttaaaatattaaacaaacgataatctggaaacatacaagcaagtcggtgatctcatttctatggttttttcccccaccaaatccacaatttgatatctagctagtctcttaaaatagtattgtaatgccattaggccacatataaaaaaacgtaaccaaacgcagcaacaactgtgtaaaacatttttttttttttaaattaacaaataaattttagactttgttatataacttttttttgttgccaacctttgttatataacttttacattggtcttaatattcaaaactaaacccaaaaaaaaactaaaatcaaaatctgttcgacctggcctctgcggcgccatagatacatttatgatttatcatgacaaaaaaaagtactgtttttttccactaaatttaatcatatttagttactagtcagtagtcaccaacgaagtccctgcgaagacatcataaaaagaagtcaccaacgaaaagctaaggttgggaaaaaacgacagaaagtagattcgttaaatatggtggaaaaaatagattttgtaaagaagttttatagttcaatttcaatttggatccgacttctgtgggagtcactctcacattgtcagtgaattattataccatgcttacatattatgcgattgaggtcccaaaacaaacatataacgcgaatctgaatttataaaagtatatcctattacatagtgtattgttgctttcgtactttatgccttcattttataaataaatgcgaattgagatgcaaacaagaacatatcgccaaatcatgttaaagaaaaaacatctcgccaatctctaatttattcacaataagattaacggtctataaccacaccatttttaaaaaactgactactaaaccacccacattttcatttttttgtataactatacaaactatcatttaaacagttttagttaaataaaagttaactcaattttgagttgatggatattatactccctaagtttcacaaagaatgtaattttcacattttatatttgtttcacaaaaaatgttgttttatatttccaacgcaaaatataattgtgaataaaaaatctattttgactctatttttttaatatattaacaagagagatcatttttttagtgtattaataaggagtattgtagaatttttactagttttcatttatgtataaaagtgtagaatgacattattgtgaaaactactaaaagttctactaccttgaggagaaaaaaaaaaggagtatgaactacctctcataaaatatgaattatcttgtgaacaaagctaattacttaacatatatatatatatattcaaatgcaaaataaagcatttaattagtaactaatgcaaatcatttatttattattatttttgtcggacagatatgcaaatcatttatttatatgtacatttttggtaattttataatttattttctcatgtgttataacattatttatatgaccatttactgtgaaaatttgaccggcggctaaaagacggaacaaaggaaaatgagtcatctctatattttttgcatctcataactagctagttgaacgtaaaagtcttctaattttgtttttgacgtaaaagtgttttaagtacatggacaaccactagataatcacacattcacgcttctactaaaatattaatctattggttaaaaaaaaagatataacaatcaatttttttttgataaaatgtgatacgaatacattattatttatttgtcattgactcatcatgtgttgttggaacttgtaagagacttgtgctctttgagagta

SEQ ID NO: 36091 - DNA, 1149 bp, Arabidopsis thaliana landsberg
gtgagatttaaacaagctgacaacacaggagataaggactcgcaatctatcattctgagatggtttaggtgtaggcttctcaaatgacccctagttgaatggaaaaagatagtatcactcagaagatgaaatacagatgttaatttgaacaccaactattcaagtaacaaaactggtaaacccattttctctatctagttgtttcagagagcacaaatcgcattaatgtaacaggtttggtacataaattttcacacgtatatatttgataatcaagcaaatacccagtaaaaccatggttaaaagttagtggagtaagacaggatcttgtcagcaaagatgtagtaggttcagctgaggaagaaatagaaccaagtttgagggatctgcaaagcataaaacgaaacctgagagatgattacatagatacatagaccaaggtccaccaaaataagataacccggaaagagaaaatcttacctgagttcttttccagcccgatggatcattacgcacacaactccattatcaacatatctagcagacgttgtcaggtcgatgtggcagtaacataagcggtccattgcacatttattgaacatggtgcagcacacagctgcgtgcatcatagactttgtatcaagcatcggaaaagacctgaataatcaaattaaacagagtaacatgagaaaccactaaagatggcatatcctaaaattccaactcttcctaaaattgaacacaaatcacaatggattcagcagcgcaaatgtgtcaagttttcacgaacaaagcataatttgagaatcatcaactttatcgtctctagattcaataaagtttcgagaaattttccgatttggttgttaccttaatggtaagttctggagggagggaccaggaattggaattgtgaacagaagctcgcttacggaagcaacgcttagtggaatcgagaagaagcgacgcgagtttgagagtacgatcgacgagacgatcctgaactgattcatcaacggaagcggaggcgagagctttaataaggactcgatcgaaggaattgctaatggagatcggagaggaatctggaaacgaaaggaacgatgagataatcaaatcgggtgggtatgatttgagcctggacaacac

SEQ ID NO: 36092 - DNA, 1642 bp, Arabidopsis thaliana landsberg
gctctgctcgtccagccatgtagtttttactacagaaaaaattcacaccataatttcaacttgtcaattataaaagtgtgagtaaacaagtggcagttataaagaagataatgctcaaagattgctcacctaggtgaattagtagccaatgaagtccatgtaactccagaagaaggaacaagctcatctccaatagagagaaagcctttaccagtatgacttaagcaatgcacaatcacattcttcgttatccccaaggactttagctgagttgagaggcctactttccctcttccaaggccaagtattcccgctgttggaggaggaggatgtggaccaggattctgctgatcatacccacatctaaaagaaaatttgattcaaaaattaggaacttgtacaaccgcaaatttagtgtttttcttttctaatgtgtgaaaaaaggtagaataaaactaacccaaatgtcaaacgaagattcataatggagccatttgcgagttttagaggaacctcatcagttacaagtgcaccaatagatgatgcatgatcggagtatccgatttcatagtcacattgatcctcagggtcagcacaaggtctgtcctgggcaaggtcaagaccagaacacaagatgtgtgaacaaggcaaagtgttgtgattgggcttgtactgcttagcacgaggctgcaaagaaagagaaagaaattctaagatagaacctttgcttattatgtcacacactaaaaagcatatcaacgcttacctttgtgcaaccgttgcaaggtgcatcacactgaacccaagtgaggtcactgccagtgtcaatgtccaagtcaaagagcttaggtgggttgccaatgttaagcaacacataatagtacctggaaagatgaattcgttaattacttcaacaatcaaattgggcgttttcaatacaaggtgaaaatcagaatcaacattgcccaaaatcttcaattcccgaaagtagcaagctttgaaatcatctcaaagagcaagagaaggaagatttcacatcgtgtcaagcaaggaaataggaaacaagggaagaagccacacagatgcaagagaagccaacaaagaatccgcaccaagacaaaatccagacataagacaacacaatcccgataaggaaaatcaaagaaacaagatcaaacccacgaaagggtcactgaaaagtagcataaaacagagaaattgaaacaaaaagatgcgaaatttggcacttacccaagaggatacacattcccggagacaggaaacacgacggtggagctaagtcgacgattctgtaacttcacttgagccgacgagtctttagtagcttcagaggtttgaaagcgagcacagaggatgaagacatagaagacgaagacgaagaagaagtaaaggtttcttctttgctgcttattcggattcatcatcttctctttttggcccccaagaaagcgaaaccaaatcccaccaaaaaggttttttttttgacacaaggcaacaaaaaggaggctatttctttgtagaattgctgctcccttataggagtgagtatttgtttatatatctgatctctctcacactcaatttcgtgcaacttgcagcagaggtttctatgagttcccgt

SEQ ID NO: 36093 - DNA, 2049 bp, Arabidopsis thaliana landsberg
cttccatatattttaaacccaaaattttcaaaattatacatgaatataaaaaaaaggtcgaaattttggattaaagatacttgaaactattataagaaaaagtaaaaggcataaattttggtttaaagacgatgtaaaaaagttgcttccagccttgacatgacgtgtaatcattcttaaaatgaatgatagtaagatatttgtgtacattttttttcctcatttgtgtacattataatttgaagaatttctaaattctatttttttcgccaattttggagagtcatgtttgtcttctaataaaaaatagtaattaatatcttaaattcttagtaggatattagaataatgatacaatcagaattcgatacctttttgtgtaaattaagcgatctactaaatggctattcgattaagagagtttaggaataaaccattattacaaatccgaaacccatggagaaaatggaaacggtggtgaggtcaacttggcgtgatgtaaaaccaagattctctaattaaaaattttattggatatccaaatcgaatattctttttttacgttcaaaagttctttgcaccgtccacacgagttttttttccagccacaagaaaattcgtaaactgtcttcttcgaaactctagcgtgacagcgtctcaaacattcaactggtatgaatcacacacggtgttggaatatttatttttagtttggtgcataattcaatagaaatcaaatcccctatattaaaaatattaaaacagtcacaagtttatgcaaaacatctaagtatctaacacacataagaaatatatcaagataagaaaaaatgtccgtatgacagcaaataagttgtcttattttgaacccatacttaaatggtatggctttctctagttcggttctttatttgaaggcagtagtatataataaacattatcatttctgttttttttttggggtcatacaataaaaattgtgtttcttttttgccctaaaccaaaaatttcatctctcttttccctcttcccgtctctatctctctggtgagtttttcttctctcctttctccaattcgtattttctctcagattcttcaattgtacgttgattaatcttctgaaattcgattatttatcgcacccaatttatacgcggttttggattctgggggaaaaaatgagttttttggtttcggtcggtttatcattgtcttattctgtgcctcttctcccgtagaatgggaaggtcggcgtcggcacgtcttgttgcatttcttttcgggagaaatttatgccattgattttagctcttttaggctttttcttagtttttgggaaaattcttgtggtgggtcctttgcaaatctggggattcaatctcttttcttttcattggtccataggttcttgaggatacaaaatttcattgcacatagggtgttctcatgatttctgggggaagagaataaataattccatctgtaaaaatcatctttttttcattgttggaggtgggatcctcatatgattttagagatcaaataatagaagagaagattattgtttttttctttacccctttgtgtcaacatcatacgaaatcgtttcttttagtatcaagcttcaaagagatgttttgacttgaaacgattgttgtcttgcagagaagcgttttttcggtggagagaaagagagatttgactctgtcaagttattagtacattgaggtcgggctgtcaaaacttgacagcccgagtttgaagcttccaggtaatttacaccatgtccttacaatcttggactcttacacgcgttttaaacatgtgtgtttgtttatgtttgtgtggctatacttattacaaatctatctcatcttatataacaggactctttttctattaatgagattggtatgctagatttggagtgtattggattagattgtggcgatcatgggttctctgtctgggatcattcaacggccacttgttgctgctgctgctgtgattacagcttctgtgtttgcagatgtctctgagaggttct

SEQ ID NO: 36094 - DNA, 1591 bp, Arabidopsis thaliana landsberg
ccacccacaaacaaaaaaacccagatgcatgcattatcaataaatttatttatacacgaattagagaattagggaataggttaatggtcattcataacataggaatataaaattgggaacacgaattagagagaaacaaacaaaaatttcaacaaacacaccactgaactcgaacgcgactgggagacagagagatcgagagtgatacgaagaaagagagagagagagactggtgatgattgttgaaaatactgaccttgattgatcgaatattggctttgattctttctcagagatttgggttttgagtccggagcttgatgaagaagaagaaggccattgtgcgcatttgtagttgttctctgcatcagcattagcgtcgatactctgccacgtgtgcatttgtctaataaataattttgttttaaagagcagcaaatattttaatttagttatttatctaacttcgcattgaagtaattttctcttaaactctgtattttagtatttcttaaataataacctttttatatattttttgtgtgcaaaactcttttttatatatataagaacatgtttaagggattttttttttttttttgttttacatgcttttctataatcatgcatttattttttaaaatatttgtgatgccatgtttttataattattatttgaaaatttagaacaaaaacaaataatgttttactatcaaaggtagtcatgacaaacagaaatttaaaaaaatatgtaattttagctttcaatttccaaaccatatatatatagagatcaaattaccaataaagccaaatcctaaaggaggacgaattttataatttcgaatcttttttttgggtttgtggggttatatataaaaatatgatatattcatacgcatcaatatcacaattctaaatttaaatagacatttaaaacaacatgcaatggatcaattttgttttcttcagtaccaattggtaaggatttggcttttgattaacgctagctacattacgctagaggagatcatcgaatcgacattattcaactaataagtattatgtatgttgatctatactatatgattctgaattgaatgtgaataaccgatggattcacattaactagaatattagccattcaatatgcaaggaaatggtgggggctggaaaatgcattcttctttctttcttgtttcttaaataaaagaataatcttatcaaatatcacaaactgataaattaaaagcaagaaaaaagtaagtaaaccgaaagagtatatgccaagtccagaattacggatgtagctttttggaagaaaaatgttacgtggctcatttacagatatattaattaccactaggttttaagggattaagagtacgaagctgattagctgttttgcactcagaattacggtggtttaattagatttatgcgatgtttggtgcgcatggaccgacgttattgctttcactctttttgaatgaatctgctatggtagatgtgcatagggaatgagtgtgaagctatgagtgtttttgatgatgtgactgattcctattagtacatcgtggtacatacgcta

SEQ ID NO: 36095 - DNA, 1279 bp, Arabidopsis thaliana landsberg
  unsure (1)..(1279): unsure at all n locations
ctgcatcagtccaagaatcttgagaccacaaaacgcaatgacttgtatatatgaaggaagctcatgcattatgtttgtttttactgctcctggatctaccgctctacaacaaaccataaaaaaagtgtaaacacatgagtaaggcataatcccaaaacttataaacatataggaataatagagcgcctaattgtttaagatagtaatttgcttaatttaagactggttgtttcaattatgaacagtagagactagagacaacataagtgagcgatgatgtaaagagaaatgagtatttaggacgcatacacaacagagatgtgatgtgaatcatccatgaggtgaagctgtctatgcagctcgtacgagaaaagtagaatgcatactatatcacaaaagatcagaaactatatcagcatcactacaatataagggaaaacacacatgcttgtttttatgagtgggtttccttacatttagaatactcgtagatcctagcgcatggatattggtttgatcttgaaaaacacactccagtaacagaatccttgtctagcttttgaataaaagctacagaaaacaaagagatatcaagtcacttaagctagtctttaatggttcttgttaaatcttatatatcactacatcttacctgaatgatgtgtgaaagatgtaacgttaacgacccgtgaaggaacattgctgttnttcagaagtggtagaagaagttggtcaaaaagaatggacccacatagtttgagcaatcattctgacaagagggagacaaagaaaaggcagtttaaatatcaaatccataggctaatacataaggtaagttattgacagctgaaaacaaaagatttgatcaagccagactgacctgtcataaccatcaatggttggtcgactagaagttgccaagatcccagcattgttcaccaaaacgtgaatagaaggatgtaacgctgagtccgagagccattgctctagagagtttttaaacgtgaagattgattcaaatgaagacatgtcagcttcgaaagacttgagttgagcatctttgttcttgttcttaatttccttcagggtctgtcataagccaagagattttgcatcaaagaataatgtgaaagatagcatttctaattcgacaaagccgaagcaaaaagatttatagataacctctgaaagaagctgagacgaccgcccaactgataaaaaaatcaagaaggaaatcaaaccattagtccacagagaactaaatttgtgatacttaaac

SEQ ID NO: 36096 - DNA, 1506 bp, Arabidopsis thaliana landsberg
ggtcggatctgaatacattgatttaaaaaggggggcccgtaatttttatagtcagtttatttttattaatcttatgtgaatttatgctgatatttgtttttccttttttgcgaaatttaaatacattagctgtattattatttttgtttctaattctgcaactatccctatgtggctagcttgcctataaaacttttgttgatttctataaaaactttgactggaatttatcattaagccataaaattatttgtgctctttatgtcattaaattctcatagtcaaatctattgtggtcaaatagtaaaaactctaaaaatacaagtaaataataaaatataggaaaaatctgtcttttctttatctattatcttatcaaaatatccaataatattagagaatataataatcgaattaaaacaagaaaaaaatccacctagttaatttgttacttacaaatcacaacagatacgcatcaaagactctccagttggcttctgttacgatctctggccgtctttaaaacacacaaaaccttttcatgtaaaaacaacaacaacaacaacaacaaaaatggttaatgagcaaaagagatttgctttgtttcttgctacgagcgattcaacgttcgtgaagaaagcgtatggaggctatttcaacgtgtttgtttcgacttttggtgaagatggtgagcaatgggatctgtttcgagtgatcgacggcgagtttcctgacgataaggatctggataagtacgatggttttgttattagtggaagccttaacgatgcttttggtgatgatgattggatcgttaagctttgttctctttgccaaaagcttgacgacatgaagaagaaggttcttggtatctgctttggccaccaggcttaatctgatcccgttagatttatgttttgattcttatccgctggatcgtacttgattaggggttttcgaaaaaaccatttgctcaaataatcacttagaaatgatcaaaaccatttaagataatttggttgatgtgaatctgagtgtgttgagaaatctagtgactcgtaaaagtgtgttataaatattaaggtcttgattgtttgtttgtttgtgtttacatttacatttgatttactaatgaatccaaaaccttaatcattttaaacaaaatatctttgttaacaataatgttttatgaaaaactgcaaccataacatgtagcttagtccgatagtatcatcgttgattttgatgttggtttcgatgtcttaaggttgatattgtctgagtaaagtttaagttctaggcattgtggattctttattggctagaatctgaaacggatttccaaaacgatcttgaatatgaaaaaaccaatgtgcaacagtttgattagaaagattcttgatgaatgatctgttttctctctgttgttgaaaccagatactaagtagaatcaaaggagggaaagtcggaagggcgagtagaggtttggatatgggactaagaagc

SEQ ID NO: 36097 - DNA, 1196 bp, Arabidopsis thaliana landsberg
accctacacatagattctaactctttgctcgtcatatggatgttggttgatttcaaggagactccaattcgccttaaacacttagagttggcaaggatgtatagctctatttctttctcctcctttcttcccctatatccattccactataatatcttaaaatggttgcactaacattcggaagcagaactggattggttccatgaaagcggcaactccctatcaagttgtttgaacgacagcaaagcaccaacaagtgatatgataaacgcacatttagctaatgcttgtatcaatccatcaaaactgaatcaatgaaaaatgaaggtaacagcatacctggcagaggaaaggaacttaaatatggagaatactggagcaacaacagtagtgattccaaccagacaaactcgctcagaataatcagcttacactctatatgccgagagaagttatcatcgttcacccactcacgctggctggaccacaggacttcattagtagatcaacacagttataaaatgagatcataccaatatataaacacaggagattgacctgagatcgacagaccgttgcaacgctcaaaattagttcgagacacatgattgaggaaagagatctcataaacttgttatcagggtaatagaaaaggctgatctttgccttatcaaggcgaggcttattcccaaacgagtaagagtctcccgaataatctgtaatgcagattttctttaaaatcggtgaatctataaccaaagtccccacaataccttcgttttctgctcccaatttcacataattatatgataagtattccaaagatggaacttttatattaaaaaaattcacgttgtcttgatgttgacgatccacgaccaaagatttgagaattggacaactcgataaaagtctaacaacagaatcttcatctttatataccacaaaggaaagtctaagacctttgagggatggaagacaagccaaagaaggaacatcaatgagaatcttgccggaaagacatatagagactagagtttcacatgtgtaaagactcttaagtaagctgggcggctctccagcccacgtgagcatgaaacatagctttcgcaccttacgatgatcaaccgcatttgccatccacttttccacatcaaccttcacatccggggaatcaaggcttctattatggtaat

SEQ ID NO: 36098 - DNA, 1757 bp, Arabidopsis thaliana landsberg
  unsure (1)..(1757): unsure at all n locations
ctaatactatttttgacaactgtacaaataaaaaaatctcccgcgataaaccgcgggtttaatcctagtattatttatttggtaatactttagtagagcaattctgatttttacttgtttgatgtatagaaaatgtataaatataaaaaaattctggttacataatttttggatttttgtaatgttggaacaatcgttaaccaaacaattagaaaaaaaactaattaatttccgttgagataattatactttcataaaataaaaaggaaattaagaaaaaaaaagaaactttacttttcctaatagtaaaattgtaacactgtaaaaccatcaaaatcctattagaaaaataaattacctaactcgcatcctctataaatacagtagaaactctattaattaataatgttgggaccataaaattttattaatttatagtgatattaatttatcctataaattaataaatattaatttattggataaaataataaatattaatttatagaaatatttacgtaaaatacaatactaaagtcttttaaaaatgtttattaatttagtttttcttatgttttgttgtttgtatattcaattctgttaaaaaaattatttttctcttgactttttaatttatttttctacaatatattgggtccgtatatttacgacgttaacgtgatgcttaatccaatttttctttatccaactcttaccaatgattaaaaaatgttacaaaaccaaatatgacgtttaaaatgccgcaaagagttacgtgagtacaaagagatcataccaactgtactctaaaaagagttgtaattgtggcttgaataaaagttttagataaaattagtattccaatgtatgcttaagatttatgattattaatttatgatattattaggaccatatgtttacatagagatttcaaaaagattattatcttattatctgatcgattttggttaatttttacattgacccgacttggaccgacaaaatttattaatttatcgtgtttattaatttatcgagtattaatttatagagtttctactgtattattttctttataacaatgtttttcttttatttgcaaaacattttgctctatacaaattaaaaaattgacttcttgaaatattttaggtcatagtggcgacgataaaaaggcatataatcattcatcgatagattagtttttagcatttgtttgagtgcacaaacgcgaaagtgggatttatctcatagccaaacaataatgttatgatttacaaaattgaatatatgtccatgtggcgctgaatcataaagcctattaactcattattatatctttgtcaattcgacttgtgttgcatcaccaatttttaatgaataacattgcccagctaaacttattatcacataaaggatagtgtgataagtggttggaatttaataatttnnnnnnnnnnnnnnnnnnnnnnngaacaagtataaggtagcattaaatcaaaagaaaagctgtcgcatcaatacaacttttaaacagatatgttatcataatttcatacagaaataaataaattatttccacgagtaaatagttgctatagctaccaaatgtccaaagaaatatatacaaccaatactaaaaaacaaattacacaatattgtgaaatcaaattatttgttttcgatatctgccaaatttgctgaagttaccgaatgttcatcgtacggcatatgtcaccagtgacgactgtcaatga

SEQ ID NO: 36099 - DNA, 2995 bp, Arabidopsis thaliana landsberg
  unsure (1)..(2995): unsure at all n locations
caggacaggatatatattaaaagctgcagagccaaattttcattgaattttacaatcatcagaatgagatcttagacccttcaatgatgaaaacacacaatgaaaacataaaaagcaggagtaaaatttccccacaatttaaagattcaactaaatgagatgtaaaccttctcactgatccgtgaagcattacgaatggacaagacatgttctactcctccagcaagctctacgggaactttgtatatatgcttcccgcgtaagctacataatattttttaaaaaatcactagacaagaaggaatatgacaaacaaagaaacggacagatgggattaggcaaatgtatcaaaacaaataggcacttcaagtgcttcgtgaaatagcatacaattttcggtaatgagttcttacagacttacactacagttatgaacgtagataaataacacttttagtggatttcagtaagacagggagagctagataagcccgttcaataagacaactaatagcataacattggtttaattttcaaatggctccgatgacatcaaacattgagcacaaaaaggaaatcttgccatactcttcccacatgttgattttagtattaatatttcaagatgcaagataattgtaaacagacgcaaacatttacatataaacgagctgctctttctcgagttcgtacaggccaatcattttatccaatcacctaatctttagagcctactaccatagccaaattgcaagagttgaaatcagacctggtatacttcttataagattttgagccaggactttcgagcacgtagataaatggaccaactaagcataaataccgccgctgccacgaagcttctcttccctattcatagaattgacactggaataaataactagtgtccaagtagacaaagagtttgcaaccaggaaatcgattctggtatgcagaaaggaactgaccttccagctaagaatagacaaccacccctcaaaatcagcttcttcccatggacgtagaatctgagagctctcatcatccttagtttgaaatatctgtgcaacttgcatcaacctatggtaccgagccggtgagaagtgaaagcttaatgagggtagccgcacagcaagtctggttgatggggacgctgggtttggtcgacgaatctatgcagcagaacaagtaacaatgttgctacaaatatttagtctgaaacataattctttttaccaaaaatttaattgccggatgtttagaattttacctgttgaagttttaagagtaccccacacttatcaataactggcaagaaagttacactgctttccctaccagaactagaagctctttttgaggataattgtttccaggaataatcaccatcaacaagtaaagcggacacatcactcaaaactaaatcaaactgcagatacatatccatttcctctgtcagttcatgcttatagtcgtcctgcaaaatttaaatacatagaaatttgagatactgcattagaatatagaaattatattgttaagacaacagatacttttatactttacctgggaacggatgaccaaattacccaggtctagaagaagctttgtagaacgatgattatcaggacgaaattctgttggaattgtgattttgggtgctgcaatatctaaagtcgagcagaaacctggttgttttgtacaacgtcatttactgtaataaacatgacataaatttgaccagagagcatatgggagcacaaacagaccttgaatgatctttcaatgctctattcattccttcttgagcagtgcgtctgacttcatcaatagttgactgagaaaacaagtatgtggtttataatatgattaaagtggttctctttgggcagttgaatataaggacggttcagagatctaattccaacattttttaataagctgccaggcaccattgtagctcacgtgcaaggagcagcaggctctataaatagttttgccatttccatcacagatattaagtatcatgtcaacagtataagctttgatttccagtataaaaaaagtcgcatgaaaaactctatagttccacagaattactcaggtgtcttgtacagtattgacaacaaacaaaaattgcttgctaagatcctaaattcatcatgatgatgattaccaaaagtagttaacaggctatataaccctaatatgcacttgtgtttcccaacgttttacaccatagcacataaaggacacacctgtacagcagctgcagtctccaaagctattgtctggctcacagcagtactgctttcgaagaagttgacaattccatcaatggaatcctttagatactgcagatggcaacacaatcagccacatatatataaataacaganctctttatacaaatttgccctagagagaggtcacgtacagtcatataacatggagaagcttttgcaacaagactccagtcaactttagcatcaaagggcttatagcagaagacagcaagtacagagtgagaggcaggtgcactctgcaggaagagagacatttataagagtctaagatacaactgataatgttttacagcaagcaaaacaaaacgaatccacgtaacaaacctcagcaagcagaccacttggtgatgacaagcgatatctccctaatttaatgtcagctatcttcgtttctgggaaaagcttaacggagcaattaagacnnnnnnnnnnnnnnnnnnnnnnncattccttctccccatcataaagttttgaagcactacgcttcatctgtacctccaagaaagtatggagagcatcaggttttgcattgttgataattgattgctcatcaccttctttgtaccctatgactttatttaaccgttcccaatcttcatctgtgaattgaatagattaaccttcacctccagacacttcactcttcctgaaggcattcatacaagataattgagaataaattttgggaa

SEQ ID NO: 36100 - DNA, 965 bp, Arabidopsis thaliana landsberg
aaccttgtgattgtggaggaagactaggccacacgaaattcaaatctttcaaattcagcaacttgcttctcctcacatgtgtcagcccctttatataataaacgttcctctttttcgtcttttcaacatatcagaaaatccctaaattcactgaaccctcttctctctctttctccccccatatcttctgattctcctccaactcctttattaataaattctcctctttcattgctacttgtcttcctcatttccctactagtacttgtttcacacagtttcttgatccaaccaaaaccaatacacaaagcttctcaaactccttcacctcaaagcttcttcctttacatctgaatcgttgagttaactcggatttgttctgcatcctctgtttctgaatcgtgggtcatccttattttgtctcgaattcttcaccaattgcttcgatcaagctgcattggttaaccagttgccctaaagatcagatctttgagcaaaattttgtcactgatcttctaaatccaaaccagacacagcaaaacaacctctgtagatgattcgagaaatctcaaacttacaaaaagatattataaacattcaagacagttattcgaacaaccgagtcatggacgtcggaagaaacaaccggaaaaacatgagctttcgaagttcgccggagaaaagcaagcaagagttacggcggagtttctcggcgcagaaaaggatgatgatcccggcgaattatttcagtttagagtctctgttcctattggttggtctaacggcatctctgttaatacttccgttagttttgccgccgttacctccgcctccgtttatgctgctattggttcccattgggattatggttttactcgtcgttcttgccttcatgccttcttctcattctaatgctaatacagatgtaacttgcaatttcatgtaaatctgaaatttattatata

SEQ ID NO: 36101 - DNA, 686 bp, Arabidopsis thaliana landsberg
tattttgtgtggtttgttttttaaaaaattaccttcttgttcgtgttttgtttggattgaaaagctgataatgtgtgaaggagaagaaggaagcttttaaaaaagagtttaggtacataagttaaaagttattattgtcggtgggttcattaaaagaaaccaaaaaacataaacatgttattttgttttggcataacgaagcatcttttttttctttctcgtatttaatatacatttccagagattttcccttgtgagataacaacgaagaacgattgagagagagagagagagagatatgatggacggcgttgaaggcggcacggcgatgtacggtggtctcgagacggtgcaatacgtacggacgcatcatcaacatctgtgcagagaaaaccagtgtacctctgctcttgtcaaacacatcaaagctcctcttcatctcgtaagcttctccaatctaccactaatttcacccttttcgtaccattttctccatgatccgtcaattttgatcccaaccatcgatttagggttttttcccccaaatctctgtttaacgattgattataattgattttttttaggtttggtcacttgtacggagatttgatcagtcgcacaaatacaaaccgtttgtgagcatatgtacagtaattggtgatcctgaaatctgcagtcttatataa

SEQ ID NO: 36102 - DNA, 2294 bp, Arabidopsis thaliana landsberg
ccaatggcggttggttgaactggattggttatgttgccgatataaagttagatttgatttaaaatggattagaagagttatcatcttaaaaactaagacgaagttaattttgagacgaagttcatgaacattataactaaccttaatatgtttctgtttctgtttctgaagatgattacctaaaatcctaagtctcatacttgatacttatctaaagtatactactagaaaacaaaagtttaccctttcaatgaagatagagttataaaaacgttttcacgagatatcgctttgatgtgagatagcaaagagtcttaagacagtaactcttttgagaaattcctaaatgcctttcgagataatgatttttttggttcatttatcttagagattgaaaacaaattttactttcttgtttgatcaattatatatgtttggtttttgtgagatttgatatcaatgtcatgtagagaatcacgcattccaagttttcaactaagaaaaatacagatgggcttgtgtccataatattctttggacttggaattcttgacactatatctatgtttgtttttaatatctatatatatatttttgcagccattttatgaaataaatcctgtagttgggacttatttacaatggttaccactggattttaatatttgtttttgataattaaaaaaaaattattcgaattaaatatttgacatttaacaatcttcctaaaatctctctacattaactacacgattggttaataaaataaaactttcaaaatatttaatatcatttaattactacaaaattatcattattgatattgttttctgcatgactattacaattcaattataatcatcaaaccgcagagatatttgatagtatttaattactacaaaattacaaaatatttagacaatgattcataaacatatgataaataagatcaacattaataaaataaatgagttttttttacgggacgggttggcggacgggtttggcaggttgttacttaataacaattctaaactataaaataaaaatattttatagatagatacaatttacaaatttttatatatatactatctttaaaaaagaaattgtctccgcggtgtaccgcgggttaaaatctagtttaaactctataaatggaggcttggttcaatttatttggacacataaaaaaatgtcatttctaccataattttcttattcttctgccataaattctatatattattctaccataatgtcatttttaattaatttaatttagttttaatagatattttaacttaatttgtttaacaactattattatgcatcacgaaatataagatataagaaaataagaataaaagaaatagtggggttgggtgttgaattttattaatcaaaaacattggagtgataaaaaattaaagtaaggaagaaagaggaaataatgtgaaatgttcaaagttgaggtggaaggtgctaaatatgtttttgcattgtacgtagttttaagcatttaactattgaattaattttttcaataagtcattgtagatagtcatagagaaaacaattaatcaatactatttttgaatgcccaccagcactctagacttgcacattatcaccaatactaacggtcctaggaattttccaatcttcatcggtctatgtaaacatagatcatttattttggagaacacatttatattattttatttttagctttttttggatcatgtgatacatatggaaagtacaaaatgaaaaacttcacgaaaatatggatcgagatccaagagatattctcaaactagcgaaaaacaaagacaatgcttggacgttagcctgattggaggttgcaaatgaaattcaagcttcagtggcagttaagtcggttaatataaatctttcaggatattattgtttcattgatgactcttggaaagatagtgacaagtttttgggcatggatggttctgtattttatcaaatgaaggacatccaaccatgtgtgctggaagcactcgtttgggcaatgaaatgtatgattggccaagaaaagcgaaaagtaacgttttttataaactgtagatctgatgaagataatgtatttcccaacaaaatggccaacattcgctacatacttacgattcaagaagatagtgatgagtttgaatttttttatttatctctaatgcttcgaaatgtaaatgttaaaacagaccacttgatacgaaatgttcggatataaccacatatgattatctttggaaacaatacttttt

SEQ ID NO: 36103 - DNA, 1656 bp, Arabidopsis thaliana landsberg
cgttgatggtagctttgtcttcaagaaaggcaaggtagtacttgtcttatcctgattttttgttttggtaaggttacttactctgagattttgatcatccgtaccacacgtgtgtcagatctacaaagtcccagccactgatgtggaagccctgaaatcgccattgatgggtcttttcgagaagcgacgtgcgagaaagttctttatctatgtgcaagactatgatgagaaggatcctaagtctcacgaaggacttgacctaagcaaagtcactgctagagagatcatctcgtacgtacaacgatttttgctccatctcaagtcacttcactatagtttcttgctttacacgctttgtctctgtttattcccaacagaaagtatggacttgaagatgacacaatcgacttcatagggcatgccttagcgcttcacaacgatgatgactacttggatcaacccgccattgattttgttaagagaatcaaggtaaagtgttttcttttcttcttcaataagcatatgttccaatcttaatctcattttcttttctgttttctggtgaagctctatgcggagtctctggctcgattccaaggaggatccccttacatctatccgttgtacggtctaggagagctgccacaggttcgtgttcactctattctcatgtttcttcttatttttacgactttttcctctgtctcaaacctctgtttctgtttcaggcttttgcacgtttgagtgctgtgtacggtgggacttacatgctcaacaagcccgaatgcaaggttatgaacaacctataatctcttctttctctgtttataaatgatataacttaactcttttaaagatagaaactcatgaaccttcaatatcatccctaacaggtagagtttgatggttctggaaaagctattggtgtcacttctgcaggagaaactgctaaatgcaagaaagttgtatgtgatccttcttacctgtctgaaaaggtaaccctaaacccatttcaactgcagtaactgctaagtttttatactgtctagttaccttctaagacggtttccttgtctttcaggttaagaaagttggaaaagtaactcgagcggtgtgtataatgagccatcctattccagacacaaatgatgctcactcggttcaaatcattcttcctcagaagcaactcggtcgcaaatcagacatgtaagatcatagtcaagaacacattcaaattacagaaacatgcatgtatctcatttgtttctactttgaaacagttgaagataaatctcttgagtttttggattttgtaggtacttgttctgttgctcatacgctcacaatgtggcaccaaagggcaaatacatagcttttgtctctgcagaagctgaaactgacaatccagaagaggagcttaaacccggaatcgaattgcttggacctactgatgagatcttctatcattcttatgacacatacgttccaaccaatattcaagaagaagataactgtttcatctctgctgtaagagaatatcacatcacaacaatttgttgcttacgtatcttattacctttttctgatgtttgttgtttttgttttgtgttgtcagacttacgatgcaacaacacatttcgagagtacagttgtaga

SEQ ID NO: 36104 - DNA, 4203 bp, Arabidopsis thaliana landsberg
  unsure (1)..(4203): unsure at all n locations
cagattataagcagaaaaacataggaaaacactaacttgaagccacgtccattattagtgagaaggttatagtcaggaacccgtacaactccttcatgtgtggagtgcaactcaagacattcctcgaaagggacaagttcctttaaattacttgcaccttcatggaatttcggatcaacttgtattgtccactggaaaatcaaaactatgcttgttttacataacatacaggagagataacaaaagcttgaatggaaaatagactacacatctggtaggagataaagtttgccaagaaaaattctggctccatgatagggcatcccaagacttagtgttccagaaacagatgcatatggcatatcgtttgaagataatgattttttatataaattttaagttagcatgcatttaggcagattactatgcatactgctgtgatatataaacgctcacctcagtagactgtctgcaagcagtaccctcccgcatgtagatgcctcgtgatgttggaactgcgttaatannnnnnnnnnnnnnnnnnnaaaggaagttatattgtttatcgaaaaaccccaaaatcttaggaaactttccccatgtaacagcaggaagcccttaaattaatagctaggttccagtaagcaagttctcaataagctactagcttgaaattgttttaaagaagttcaaattattcgtttacatacttgtttcaccggagagagtgacctttatctgattaaatacgcatggatagtcctgaaactgtttaagtattcatatgccctgtcataccaaaataaatacatacattatctgaaatatggtgtcaaattaattacacagtatagaaccttacttatcaacttgcataagcccttgtccagtagttagtttatcttcaggtagatcacctactggtgtagatgtattttcaagggcccttctcacactgtacgggctaactgggatgccctcagcctgcagaagtgtgaaagaatgtcagcactcagcagcagaactaaaaagaacggaataggaaacggatgtgcagaaataaaaagtaatgttgaagaagaaaccttcatagcacttagaagtaacgcaattgccccacaggcagaaggagatgccattgatgttccattcatgagcatgcgtctttgaagcgtccatgtaggaacaggagcaacagccccaccaggtgcacttatgcagacaccaagatctccatcagatgttggcccccggcttgacctacaatataacaataactatatcatgccagctacaactagctgtagaataattccaaagttaaaaaaggtgaaaataccaagtgtattcaagcccctcactgggaggttccaccactgaatgggcacctgctgccattgcaggagaaacatacgcaccaaccccaatgatactggacgttgttccacccggtgctccgactgttgtcaaagctggaccactgttgccagcactacttacaaaaattagacgtctcttgttcacagcctaataaaacatagcagaaagtccataaacgctagaagaaaagcaaaaaatacaagctaataagtgctgcccaaataaagacaaaaggatttgaatgatacttcagtaacaagatcaacaaagcgcccatagtctggaagtaatgctggctctccatagctcatgttgacaagatcacagttatgctgtaacattattataaaagtcagtatatacaaaaaagaaacattgaacgtattgacttgtgtcaatgcaaacctcacatataataatccacaaatatatgaaattcttcgtgatgtttaagtaattcaagagatatacgacttgtttagttcaaacttcatacaatatactttcacgaagttacaaatgattttcagctaatggtaaattcatatcagctgatgaattattacctctagggcagctatcaatgcccgagtcaatccagttccggtctccattgaacctaatcgcgagtctccaattttgcaagatattatttgtgcaccaggtgccacaccatttaacaaatgctcctaacatacacatagaaggtaagttaattggttgcaacaaatcatcaatgtatctaaattatatagatgcgttttgcacctcagggtggtgtgcagtagctattccagcaacatgagtgccgtgaggagaactatcagttacaatgcttagaacctttccctcatcatacacgttagcaacaaaggagcatgcatctagtcggctaaacacgccatacttccgttcaattctgtagtacatatttgattgagattaataaaataaaataaaaaaattggtgaacaaatcatgcttccaaacgaaaagttcctgaactttcataagagatagatgtttaaaggaagacttgccggtagttagtcagtggggagaagtctgctagtttcccgctatctggatcctcttccagactctgtgtatcaagtgcaaccctccatacttctccatcatgccacacaacagcatcaataacaggccctttgtcttcatatttctacagaaaaaacaattgatttacagaacagattcaagaccacagcgaacaagtacacagacataaaactaccaaagggcggtctctaaacttacatcagcttgttttttcagaaaatcaactttgctttggaggtcttcacgagttttcttcaatttcgcatcttccaccttgctgtgcttctggaggcaagaatgaaaaatgaggttatgatagaattgagtagcactgtctaactcacaacatctacaatacagcaaaccacaatcagcatctccctagtacctgatcgaaatcatacagattatttacagccttggcaatttcctcctgattcttttcatcccaggatttccttctctctttctgtgtaatgacaaaacaagtcttagcaaatgggattgcagaccagatatgtaaactctggtataagatttaatgagtagatgaaagtaatccaacagccaaaaaggtcacaactctaatcgctaccttcacacgagaagtcaagtcatctgtaaataactgataaaccaacttggaacctacacgccactctccagtgggatttttccatgaagaattgacaaccaaagttgcccctgtttaaacaaaagaaattatcaacgcatatcgtagcaagaaagagaaagcaaactatcatgcagaaatcataaaacctctcaaatcaccaacctgatgctccacgaatatgaccatcttcattggctttcaccactgtggatgtatctatatctccacttccagtgctaaacgataacgtaaaatgaccatcacgccacagtcaaagaacactaaaatgcaaaattcaattaaatcacaaaactataccagtcaatgacgtccaaaaccttgggttttccatcagaagttacatgcaagccagcagcagaaggatcaaaaccagaatctggaaaacacaaaattccatttgctcagttcctcaatcagaatttttacttggagagttacaacaccttcttaagaaccaaacaatcgctctactatctgatccaagtataagcaacccaactataacataaggcttatacaaaacttctccattaacaaattcaatctagagaatacaaaacgagagaatatccaagtaccaaagatagctatacaacgccacgaccgtcgtactcaggatgagcttcgatgaagcaatccgcacggatttctttcttaggcatgagagaagcaataaaagtagattcgttcagcttgaaattagcgacagaagcattctcagctccaccgccaacggctccaccaccacctcctccgccacaaccgacgcgagaagccgtaagagtatcagaagaagaacaaggcatcgccgagaaaccactccgtcttaatcggattccacgagaacgagagcagcttcttcttctgagtcttcgatgaagaagaaacgtagaagaagaaatgaaatcgcgaggaagagaaagtgaagaagaagaagcccaataagaagtacacgacgggcctttgttgattaacgcgccgtgaatctgcagctgcagactcagatccatcttcgggatgtgtgttaattaacaggggtattttggtcaaaaacagctgagtcgatgcaccgaatcgtgtcactc

SEQ ID NO: 36105 - DNA, 1600 bp, Arabidopsis thaliana landsberg
tcttcaactagacatttctaatgcatttttgaatggagatttggatgaagagatatatatgaagattcccccaggttatgcagatcttattggtgaatctttgcctcctcatgctgtttgtcgtttgcataaatcaatttacggcctcaaacaagcttctcggcaatggtatctcaaactgtccaacactttgaagggaatgggttttcagaagtctaatgcagatcatatgtttatcaagtttgcaagtggagttttgatgggagttttggtctatgtggatgacataatgattgtgagtaacagtgatgatgcagtgactcagtttactacagaactgaagtcttatttcaagttgagagatttgagtgcagctaaatacttttctggtattgagattgcacgttcagctaaagggatttcaatttgccaaaggaaatacattttggagttgttatctactacagattttcttggtagtaagccttcttcaattcctttggatacgagtgtcaagttgaacaaagaagatggtgttcctctgactgattctacctcttataaaaagttggttgagaagttgatgtacttgcagattacaagacatggtattgcctatgcagtcaacactgtgtgtcagttttctcatgctccaacaagtgttcatttgagtgttgttcataaagttctctgatatttaaaaggcacagttgggcaaggtcttttctatcctgcagatgataaatttgatttgaaaggttacacagattcagactttggttcttgtaccgattctcgtcgttgtgttgctgcttattgcatgttcattggagactctttggtttcatgaaaatcaaagaagcaagatacagtttctatgagtacagcagaagcaaagtttcgagctatgtcacaaggcactaaggagatgatttggctttctaggcttcttaatgacttcaaggtgccattcgttcctccagcttatctctattgtgataatacagctgctttgcacatcgtcaacaattcattgttataagacacgggaggcagttgaatcaggttttattaaaaccatgcttgtggagactggcgaacatgtggctgatccattgactaaggccatttatccggctcagtttcacaagcttattggcaagatgggagtgtgcagccccactaccatcttgggtgtgtgtgtgtggtggggggggggggcgattagcttgctatacttaggctatacttgtgaataatagaagtggttaaaggatcggtatagtccggtttattcatctaattaaggtgaatcttttggttatttctggtttagtagagtctatatactatagatgattgtaacaaactctttagatcattaatgataaattgagctttcactatgttttccctctcgttcatggttcctattagttagaaagtatattaactacagtcattcccggcagcaaaatatattatagttttaagaagcattaaattttgagaaaaagtcttatagtaaacctgttgtagtctcgattttaaagtaacaactaaaaggtactaattctgaagttaaagatttgatgtatag

SEQ ID NO: 36106 - DNA, 1888 bp, Arabidopsis thaliana landsberg
taacctaatgtatccttgatttgcttagctgtctattgataatcacgtggcatagctatcatcacacaatctgagagcgtcgtaacggttccttgtcgtcacttccgtatctgatgatacggattgctctgctgatcttctgtatttgtcgcttgttgcaggtagccgttgtatggagatgagctttggtgaagaccgaatcgcattgggcttctgtatcttttggcccatttgcaaagatctatcgttttgagctgtgattttatttgagtatcataagcccaaaaatcattttttaatgaagtaaagcatgtatttgggcatgatctgtatcagtccactgatacttttgatactgagtatcaggtgacgtgacatcacacaattggttcagcgaaaacaaagaaaaaaaaaaaatcttctctcctctctctttcacatatcatttttctttcgttctcttctacaaacctaaaaaatcagaacaatgagcgacaaggtatgattgaactgaacctaaaaacccattttcctttcgtttttatatatttattttcgatgttgcaatttttttttttattatactttaaccggtttcaccaatggaaaccgatttattacgagtatcatacaaaatctcaaaaaataaacaaacattaaattaatattaaaaaattactaatgatactctatgaatatcagctatgtacatgttctaagttttgaccaaaaagtagcctcatctgaagactcattcccaaaataagtcatctttcgactttgtggcaacagttgaaggcacatgggatcaatgttatctaccatgtagattatccatccgaaggataggcgcttgagatcttttgtctatatgcttttaaacaaagttctcggcgggatggttatgaagagcatgcagcaaaagtagttaagctttgcgcggtaatcttccactggccattcgtgttgtgggttcttcttttaatggagacagctaagatgagcggatgcttcaattatatgggacagaaactaatcttgatagaaaaattgaggatttcgtcttcagagtgggttatgacaaattgttggagaaacatcattctctgtttcttcatattgcatgttttatgtgacaaccatgggtcgaagaccccaatatatttttgtattctttattgggctgactttatcataaagcccataaggcccattactttattctgtaggattcgtgaaacggccttatgattatgaattctgcaataaaaaaaattcgtgatttgtcgttacggaagaaaaaagggaaaaaatcgcgaagcttgagaacacatagatatgcagagtgaaatcgggagattgatgttccctgaagatgctcgaaaagtagctgaatcaatctctagattccgatgttcgcagtttaattctcatcggagaatttgtacttcgatttgggtttctttgattttttcttttgtagaacttgacgagatggggaggagcattactggaaatttcacagtttcagaaagtctctgaagtcaaaacaaatgaatctaggtgcttttttttttccttctattttttttttttgttagctttgatgataattttcaaattcaatttaagaacataactgtcattgattctgcctggaaatgtgaactcttatggtaggatttcaaaattctcttaaaaaaaatgagttcttatgtttatagtgtcacttttgaccttgcttcaaagtggcacttaagattcagtagtagtagtgctacttttaatgttttgcaattttagtaagatggatgtgtttaaaggtaaaaaatgttggtgatttagctttgcattctttgccactaataaccacgtgagaatgctattc

SEQ ID NO: 36107 - DNA, 5191 bp, Arabidopsis thaliana landsberg
  unsure (1)..(5191): unsure at all n locations
aagctggggcaaacttcattagcataactggctcaacgcttacctcaaaggtacatggaaccttaaaactatgttgtttgcactgtcacgttgatattccactttgtaaacatcttcatataaataagaagaatatctaatgacataagaaaaacttttccaccccggtcatcgacttattattgtcaatgccgattgtaacttagagtaaatctctttccaactttacctttgattggttctgatttaagtcaatttcgtccattgtttggcacagtggtttggagatgcagagaagctcacgaaggctttgttctcttttgcaagcaaactagcccctgtcattatatttgttgatgaggtgagaaattgtttagctttatatcacttttcaatttcggttattgctttttatgaggaatacttttgtgatgcgtaaaatgtgttactcaaggactaactgtaatttattttgttgtcgtataggttgacagtttgttgggtgctcgtggtggtgcttttgagcacgaggcaacacgaagaatgagaaatgagtttatggcagcttgggatggactcagatcaaaagatagccaaaggattctcattctcggtgccaccaaccgaccttttgatcttgatgacgctgtcattcgtaggctaccaagacggtaatttaagctttcaagtaatttctcctttggaatatttgtatcttttcgataattgtattgaggcttgtgtttataggatatatgtggatttaccagatgcggaaaaccggttgaagatattgaagatatttctgacaccagaaaatcttgaaactggtttcgagtttgataaacttgcaaaggaaaccgaaggatattcaggaagcgatctaaaggtttggtcattcggggtttcatttacaagttcgagtatgattcaacacagtagttctgattccttttcttttcttacattgcagaatctatgcatagcagctgcatacagacctgttcaagaattgttacaagaagaaaacaaggtaaggacatgcataaacccacacagttgatttctgttgttacgaaaaataatttttgtactcactccatgcttttgaaacgtcgaattatcaggactcggtaacaaatgcgtcccctgatctacgaccactgagtttggacgacttcattcaatccaaagctaaggtattggatcaatctcttaaaaaacatcatcatcatctctattcatgttttttcccctggtgtttttattatcgaaattgcgtcattgtaatgtaatttgcaggtaagtccgtcagtggcatacgacgcgacgacaatgaacgaattgagaaaatggaacgagcaatacggtgaaggagggacccgaactaagtctcctttcggcttctaagccacagttttgttacattcatcaatgtctctctttaacaatagaactcgttgatttgttccatgtcgtaacaataaaagtcactatttcaattttaatcatagttacacaagagagacctttaagaaatgagaaaatagtaaattaacaagtcgtcatttgctcaaaatatttctggtttctcatccaataatcacaattctgtactacatagttatcacaaatcctttgagataatatttctgcatatactattggtcaagacaaagcaaatcctttgtatttgccgaccaaaaaaaaaaaatccttaaactctctccttacgcgctcttttatttaaatttagcggagaactattataacgttgactcaacgcgccatggatgcgcgtgagattaaaacacaaaaaatatttcttttgacaaaaattgaaattagccgtatctgctaattccatggcggaaaaaggaacggcgacgaaaactaaagagtagaaaaaataagagacactctcttactcttactcttcctcttgctcattttcgtaagagacgatggcggaagtatcagcaaaatcggtgacggttgaggaaatggcggaagaggacgacgctgcgattgaggagcggtggagtctttacgaagcttacaacgagttacacgctttggcgcaggaattggagacgccgttcgaagcaccggcggttcttgtggtgggacagcagaccgacggtaaaagtgcgcttgtggaagctcttatggggtttcaatttaaccatgtcggcggcggaaccaagactcgtcggccgattactctccatatgaagtacgatcctcagtgtcaattcccgctttgtcatctcggatctgatgatgatccttccgtttctcttcccaaatctctctcacaaattcaggtgttttgttattattattacttgtgcttcttcaattgcttgtttctgcgtataaattctgggaagattttgacgaatgttgagaaacacaagtacttaggtttattgtagagaagcgaaatgctcatgttaacgaaatttgttatatgatttggagttaggcatatattgaggctgagaacatgaggctggagcaagagccatgtagcccattctctgcaaaggagattattgtgaaagtccagtataagtattgtccaaaccttaccatcattgatacacctggacttattgctcctgcaccaggactgaaaaaccgagctcttcaggttgttttttcttatggcttccagccaattccgtggctgatttcatgttttggttttgctttatttgagagtgggttacttgttctttttcttaggttcaagcacgggctgtggaagctctagtccgagcaaagatgcaacacaaagagttcatcattttatgcctcgaagatagcagtgactggagcattgcaaccactcgaaggatagtgatgcaagtacgttgcttgacgtaactccattgcgtctaaccttgtctttatttttgttaaagtttgtttctcgttcatgtaggttgatcctgagctttctaggacaattgttgtttctacaaagcttgacactaaaatccctcaattctcatgttcatctgacgtggaagtctttctctcacctcctgcaagcgcacttgacagctccttattgggcgattctccttttttcacgtctgtgccttctggaagagttggctatggacaggattcagtgtataagtctaatgacgagttcaaacaggtctctgctctgctgtctgattccttaaacaagttaaacaggtctttttctaaactatgtgtggtttttattacaggctgtgtcacttagagaaatggaagacattgcatctttagagaagaagttgggccgtttactgacaaaacaggaaaagagtaggattggcatcagtaaactgaggttgtttctggaagaactactctggaaaaggtataactgttgttttaactctgatttttccagcctctgtttctattgtagtttacttttcgctgtagtcttgatgcccttctctttccaggtacaaagagagtgttccattgatcattccactgttaggaaaggagtaccgcagtacagtcagaaagctggataccgtgagcaaggaacttaggtcgcaatttgttttgtctgaaaatgtctacttgattttaggcagtttaattgttagctactgatttatagaaaatataactcattggaggttgaataattcctttcaatgcagctctttggatgaagcaaaactcaaagagagaggcaggactttccatgatctcttcttaaccaaggtaactgtagagagcatttcgtttttttagatttctatttacaccttcccataccttttcatttttgcctggactcgtggattaatagtttttgtataattacaacaagttcatttgtgtaaacttctctttttttttggtttattaactactgacacataaaaacaaatttgtttattgattactgacacatataaaattatgctacagtaaatgatatctaggacttgctacatattcagaatggctgtgaactttttgtgttggatgcccttaagactttannnnnnnnnnnnnnnnnnnnnnnnttaacgttcgaagtacctttgttagtattgatcagtgctgtgttttctcacctgttttgtttgtatttttcttgatcagttatcgctgttattgaagggaacagttgtggcccctccagataaatttggtaatgttactgctctgttctctgctagtcaacttctttggcataaacttttcttgtttctgggtgttgttaaattggacttttgcaaaatcagtttagttaaatgcatattgttcaattcgactgggtcaccagactgcgatgattacacatggaatgatgtatgctaatcaatcaatcattggtcatgatactttggttactggcagaagcacattttataacagcattctctttatgttgggttctttgattgttaataatttctcatggtgtttttcaggtgagacactgcaagatgaaaggacacaaggaggagcatttgttggtactgatggtctccagttttcacataagctaataccggtaagtctttccctgaagcagaatattgttggactttatagagcaagctgggcatggtcttcaaatccagttgtcttgttcttgtacatggattataatatgatggaagataaatttgaccgcatgaaacatatgtgccaaagaataatgtattggaaacaaataaaagagatacttcgttggaccttcaagaattatgagagaccataaccagattatctttcattttacagaatgcagggatgcgtctctatgggggtgcacaatatcaccgtgccatggctgagtttcgttttctagttggtgctatcaaatgtcccccaataacgagggaggaaattgtaaatgcatgtggagttgaggatattcatgatggaacaaactattccaggtatcataggattgactgacatgcaacacacttctcaatttattgtctttgcatcccagacccctttcagtatctaatctgagctgcaacgtttgtcatgttttctatggcctcttattctctttctcttatttgctgttgtagaacagcttgtgttatagcagttgcgaaggctcgtgagacgtttgaacctttccttcatcaggtgacatagatatagctacttttttctttttctttcgtggaggatggaa

SEQ ID NO: 36108 - DNA, 1480 bp, Arabidopsis thaliana landsberg
gtttatagtttatactacatgatcatgtgtctaaggagtggtcgtgagtctggaatggtcgtgagtgaccataactatgggtgtaagatataatgatatattgactatcaaattttaactatttttgaacatttcaaataaattatatatatatatatatctatatatatatttttgtagccattttgtgaaataaatcttgagttggatttacttacaatggctgccactgaattttgatgcttgtttttaataattagaaagaaaatcttcgaattaaatatttgacatttaacaatctttccaaaatctcttcacgttaatctttccaaaatctcttcacgttaactacacagagatataatttgatagcatttatttattacaaaattacaaaatatttagacaatgattcataaacatatcataaataagatcaacattaataaaataaatggtttttttttacgttgataggacgttacttaataataattgtaaactataaaataaaaatattttatagttagatacaatttgtaaacttttatatatactaacattaaaaaataaattgtttccgcggtgtactgcgggttaaaatctagtatatatgtataaatgtaacgaataaaatgagtatataattttataggattagtgttgaatgttttgacttaacataaaattgcatcaaaatgtataactaatgctatatacttctctttttgaaaaaaaaaattgagtcttggtatattaaccggagacgagataatgtaattatatattaagattttttttcactggcatcaaatctaccagaacagtcaaagaggtaattaagagtaactgcaagagctgaaatcttcttacaaacaaaaacataacatagacccataacacagagacagagattaccactaaactagaccaaaatgtcctcgaaacgataactaagtgcacccacagaaccagagaccattaacatccttagagcatcaagaaagagcagaatccactcgaagcgatcaagagaaggcagatgaacaatttgcttgagttcttgagagcaaacgcgctgctgtctgtcgtgtaatccgggttaatccctgtcccagtggtgcctcctgtgctattcccccaaaaactccattggttgggttccctgaataaggactgttggtaccactaccaggaagtgtggtggtcgttgggctgccttttggattggttgtgccaggtgtcacagttgtgctgccgctagagccactggaagaagataagagttatatcagacaatgaagttccaaaaccagaccaagtcttgatgaaagagattgatctagaggaaagtcttcaaagcaaattcatattctatactcaaaaaacgctaacaataagaagagtctcagttctattactacaagggtctttgatgggtccaaagattacagattagagtctattggttaatcggcat

SEQ ID NO: 36109 - DNA, 604 bp, Arabidopsis thaliana landsberg
gcgacctttaattatcatgggttcgctgtaacgacctaacatagttgatagttgatatttaatatgattgtacaaaaattagactaaactgaaccggtaccaattagatcatcacaaattagcaattagcaatagaggagaatggacgttacccggttccggcgaagaaagcgagaggtatcatcatctcccaaccatttatcgccatgctgccaaaagttttgttctaaaattaatcatacatctaaaccggagtaatatattcatttatcaatagaagataaaaacaagaaaacaactataacctttccgcaacaacccaaaaagcagacgtgagaaacaatgcgataagatttatatatgattgatgacttttctttctattttagtacttttaattaaacatatcaacataaacaaaataaaggtcattaaaacgacttaattaccatatggacaaggagtcaacggcgattcgagcattttgaagattcccagtcattataatcaaaatccgataataccaattaaccaaaaagtaatcaaaataaacccaagtatctaccgttaaaagttgtgtcggacataatagacaaatgtccaa

SEQ ID NO: 36110 - DNA, 2267 bp, Arabidopsis thaliana landsberg
acttagctttcttttgttaagaaaaaataactaattgttttcgatgatataagagataacctttttaatactaatgatagaaaataacttaagtagttaaactctacttaaaatatatattaaggtaaatgtcttacgtttatattttataaatcaaacgttatccctaatgcaattgaagtttttttttatatatataatgaaaatagtatttgtgataaatcagtttataacaaaatgtacttagaacttgctcgacacacaacttgaaacggtcactatctataagctacttcgacgaaaattcttgagttcgtaaattttctttttgtcggaagcttcttttgtttgccattgaaaatgtcattaaacacgccaaaactaaaagaccattgacttgatttgtgttttgtcacaaaaggccattgacttgatagatgtattaaaagtcattactctatggatgcatgtcgatcaatgtcgcgtttctaaaatttcctctttgttaggttgatgataaaaactaaaaaggtgaaaatgtttcaagtgaaggaaatagattgggccatcattattgttgggccacgaaaagaggtatatggtgtcaatgagttaattatggtttccaaagagtaaagaaacaaaaataaaagatagttgacgtcggtgaaaactttagaagaagacggataaaatatggttataacttttagcctttaggtgtgcatatagagataaaatggagcgataggatttaagaagatattgtacgtctgcatgtcaattatctaacaagggtgtccaagtaatgccgtgagaaatgggtttgtaattaataggtcatgaggtaaagagaaagcaaagccactagctcttcaatgatatcttcttggctagctaaccaaaacaagggattagagaattaggttaggaagagatagctttgggtgaaagggaaaaatatgtgtaagtgttaatgatagagtgaattattttcgttacatataggcagaagactaaattttggctaagtttagcggaacaagttattatagttttccgcgtaattcctccgattgttcctttgattgtttctccgattgttcctccggttgttcctccggttgttcccgtttatacatcatcgattgataatccagatagtattcattctccatatcatctttccaacagtgataatcttggaatttctataatttctgaggttcttgatggtacaaattatgatgattggcagatagcgatgaaaacttctttagatgcaaagaacaagattgcttttattgatggatctatatctcgacctagttaaacaaacgctatgttcaggatttggtcacgatgcaacagtttagtgaaactcttggattctaaactcggtttcaaaacagatctataaaagcattcttcgttttagtgatgcatctgagatttggaaagatttggccacacgttttcacattacaaaccttgcaagatcatatcaattgtcacagcagatatggtcactacaacaaggttcaatggatcttgctacgtattatactactctgaagacattgtggaatgagtcggatggcgctaattgtgttacagtatgtaaaaactgtgattgctgcaaagctatggaaacaaaatcagaacatgctcgtgttattaaatttctggctggcttaaacgaatcctatgccgtcattagaagtcagataatcatgaagaagcatattccagaacttgctgggatttacaatttgttggatcaggatttgagtcaaagaaatatcactcctgttcagaatgctgtagcttttaatgtttcagcaatggaaccagctcaagcttctgttaatgctacttataatcattcaaaactgcagcagaaagtgatttgttctcattgtggatacactggtcacactgtggataagtgttataaaattcatggttatcccataggatttaaacacaagaacaagaatgctcaacaggataaacagattgttcctccaaaacctgttgttgctcagttagcttttactaatgctacttcgagtgatttgttaacaggaatggcaaaaactctaacaaaagatcagattcaaggggttcttgcttatttttcagcaaaactcaatgatggttctgtgacatggcttctccatctggtgctacgattactgcattacctggtatagctttttcttcctccacattacgttttatgtagccttaaagctcaggaagtg

SEQ ID NO: 36111 - DNA, 1765 bp, Arabidopsis thaliana landsberg
ttgtaactgatgttaaatattttttttgtattaattataaataagtgattaaaattaatatcactaaattttttgacacaaaattatgtgatgtgaatgagtattttctttttgttgtgacatcttcgttatcattctccatttttctaagcaacaatatggcacttccatgaagatcttgcttgcagagtccgcttataaatgtagatttagtaactgcatttggttgacaacccctttcaaacatttgatcaagtacaccaggcacttgagaaatcatattaccattaagcagacctttaatgacagtgttatatgtcacaacattaggtttgtaacccatagctttcatattcttaaacaaagttggtgcatcataaacagaagcattttcctcaagacaaaaaggcctgagcaacgtggtaaatgtgaacacatcaggctcatggccagctttcaacattctcgctaatgtagacaaagcaaatctcagctgcgagcagtgacagaaagcatttatcagcaaatttaggatgtaggtatcctgttcaattccagcgatttccatcgtgttgccaagacggatcacatgatcattctcggttccgattatatttgtttcttctaattttgttttttgatagcgatggtgtgtttaagctacaaattatatcatttacctatacatatttgtgcagaatttagcaagtacaatctgaaaagcaatgtagacagatgaacagagtgataaggaaattatgagcttgctttcatgcccggagaatggttataaatcttggtggtcgatctgcttaagaaaaatgttgtgtacatcaatgttgtcacatatgaaactccaacttagtctttcaatgctctgagacggtaatatgatgtaaacaccaaaattctaagaaagcatatccaaaaagcttttcttcaatctaccatccgataacatatcgacaaccatctttaccgtggaagcatcaactgagaacccgcacctctttatttcttcaataagtttagctgatttggttgcatcaccttctccaagatgtgccctgatgagtatgttgtatgtacaaccatttggcgaatgcccatcctcttccatttttataaacaacaggtctgcttcagacagtgagcctttcttacacagtcccccaatcattatattgtatgttttgacatcgggcttcactcctttgagagggaggctacagaataaatcccaagcatcatccaccttactagcattgcacatcccatgaatgatgatgttatagataccaatatcaagctccatcttactcttctctattttttcaaatatttccagcgctttttctggttccccattgtcacacaacccatccagcaaaattttgtaggacacaatatcaggacgaacacgacgagaaaccatctcttggaagagttctttggcaacttcaagttttcccaattcacaaaatccttggataagagtgttataagtaaccgtatctgcaaccactcctctcaaagacattttgcggaagagttccaaaccatcgtcaatcagattagccttacaatatccatttatgaggatattaaacgtcctgatattaggaccgcatcctttgctaaccatcagatccagcatgtggttggccttatctagctggttctccttgcaaaacccatctatcaaagaagtgtacgtaatagtatcaagagatatgcctcgttgtatcatctccttgtgcagttc

SEQ ID NO: 36112 - DNA, 1151 bp, Arabidopsis thaliana landsberg
aatgctcagcccgtctaatattccccgggacagcctcctttagaatatcatgaggcagtgcagggtttgcaagccattgatcacctcctgcaaaaaaaaaattgttgcgtcaagttcatagaattagaaaatttactgtgtgctttcaatcaaatcacagatcaccttcctgaacacatacttaccagataagtcccctctcagtgctaaaccctcaaccagccggttgtattcagctcgcaatcttcctgcatcagtagccttgaaccttcctaccagttggacaatttcaataatgtaataagaacttaaaaataagcatcagcaaataaccaggtcacttcctgtattgaaccaagaaaattatgcttcatgtgtttaagatgatgacaaaagcgtttgtaaatttttgttccccttacagttctttgacaaaaagcagtctcataaaaccagattattttcttactaacttaaacttccttaagaaaaccaacaattagcaactggagtgagcagacacccagatggcattcaagaacaatcaggaaattcaattgaaaaagaaaagaccctatcactgtgtttattgttgtattaagagtggcacgttcaagagaacttaaggagtatcagctatataggaaaaaattagcgtacctatcaatttcttgccttatcttattaagatttcgattagctccttcaagtgtaaccctcctcacactgacgctgagtgcttcaatacacacgttatcgatattatgggcctcgtcaaacactacaactgactctttttgtaactcctttgatatgaacccagcaaccttaggatccagtaggtattggtagctgtaaacaataacgttggcgaactgaatcatatgcctcgcgagaaagtaagggcaccatccacgattcttaccaaacgcccttagatcctaaaaatcgaaacacacatataccatcaggcaaaatgtgcaagtaacctcgaaataagcattccaactaaaacataaacttgatcaaacaacaaatgtgaaaaaccttaacttttttaatcttacctctaaagtataaacaccaggaggcaacaacgcattctcagcagccttttcatagttctcaaagaagtcacagagttctacatt

SEQ ID NO: 36113 - DNA, 715 bp, Arabidopsis thaliana landsberg
acacctgttgattcagtacataaattaatacattaaattgaccacagagaccaaaataatctaaaaatgatttatgtatttggcttaagttcaatattgttttttaggcaaaacttaatgttcaatatatattcatggaattaactccataataaacagtaactgaattctcttgtactttcttaaatggttttcagtaaaaaggtttagtttaaccaacaaataactttagcaatcatctatataagcataaagcatcacatagatctagtagttatgtttctataatacattttcactaagactaaaacatgcatgaacacacaaacatgaaaaaactattctcaagaagtttgtttcccaccatgttaagtgattctagaaatctgtaaatggttaacctatagtattcattcgtgcaatatttaacagacaaatggtattcattcgtgcatctctcaatttgtgagaaaatacattgcatgagttcgttattaactggaaataatacataaaactctgacaatcagaacctctaaattatatacttataagaagagaggcaacgtatcttgcatcgcttttacttatctaatcttttggtgatggaaggggcaagaacatagaaagaatctttatcttaaaagaagagaaaacaaataatatccaaaattgtaaatccattgaataaagcctaacgttaacatcaaatcgt

SEQ ID NO: 36114 - DNA, 1397 bp, Arabidopsis thaliana landsberg
  unsure (1)..(1397): unsure at all n locations
aagacagagcttaagccaaagatctctcattgacctttgcttcttcattttcttcttcgatcacagcttctctctttctggattccaccattcttctctttgtcgactatgtgacctattctcgatacgatccatggaataatctctnnnnnnnnnnnnnnnnnnnntccccttcaaaagcagacagattcgaaactttcccccaaattcggggaatatatgtgttagggtttgggttattctcaaatagaatcaatcagatcgttttttttttttgttagaagaagatgaagatagcggccaatggccggttcttcacaatcggactcgtagcgtcatggtattcatcgaacatcggagttctattgctgaacaagtacttgttaagcagctatggattcaagtgtccgatcttcctcaccatgtgtcacatgacggcttgttcgttactcagctacgtcgccattgcttggttgaagatggttccgatgcagacgattcgatccagagttcagttctttaagatcgcagctctaagtctcgttttttgtgtgtcggtggtctttggtaacatctctctccgctttcttcctgtttcgtttaaccaagccattggtgctacgacgccgtttttcaccgccgtgtttgcttacctgatgacgcgtaagaaagaggcttggttgacttacttcactctcgtccctgtcgtcaccggagttgttattgctagtggggtattttcacttcttttgacctcttaaatttgaatcccttatgtatgcttttggatgagttgttaaagaggttgatgtagatgtgatgtaggagcaatgaactagatatgttgggaacataggtatggttctgcagcaatgaacgtgatatcgttgattcagtttcatgtttagcaatgatgctagcttttatctttgtgacaagctcagacattgttgaattatgcttcacatgagaaaatttggtattgttttgtgcttgtattcgatagattttgtgtttctctcatcttctcttagccatgtgaactttatgctaaaaaagttcgagtaatggagattatgttctgtttgtgtgtgtgatgtgtttgattctatgcttgatattctttaatttatgggtgttgtcagggtgagccaagctttcacctgtttggattccttatgtgcattgcagcaacagctgtgagagcacttaaatcagtgcttcaaggaattttgctttcttctgaagggtaagaaatggctggtattgttgtagtcgccttgttaggggtctatatatcaatagttcaagtatttacatgagtcctgcttaaaaggttctaaatattatgaaaaagaaaaaagctgaactccatgaatctcctcctttacatggct

SEQ ID NO: 36115 - DNA, 3241 bp, Arabidopsis thaliana landsberg
tctgcaaagaacataagcagtgtttccaagtgttgacaacatcactatttatgccttgaaggtaacaacacgtttttgttttggaaacaacgacaacaacaacttaaggaaggagtactgtttttggtaagtgataatcattaccacccaagctaacattcaaaccaaaaaccagtttaagttaacttgggtggtgctgattatcacttgtcggattgtatgataaatatgagtttaggttaatttgggtggtaatgactatcacttgtcggattgtatgattttaaaaaacgctcttcaaaagcctcagtaacaatgactggttctctatccgtccacctcgtacgtgtcgattagaagggtgagctgcagattggtgaagtagttgagaagaaaacgagaaagagaaaatcgaaaagtgacaacaagatcagaaagaaaccctccgtagagactccaacagaagcgaaaggtaacctctactttttttctctgttattgaatagtatataacatatgttatcgatgcatatcagttaatttaactttgtgttgaatggaccttcaaaaggaggtagcaaatgctgatttagtcatgattgactaagacaatgatgagtgtaccaaagtaacatctaaattctagaactaagaatcagaaacttaaaccatatacaaacagaatgacctttttcaagatcattgtcttggtcaatcatgactaaatcaggcatttgctacctccttttgaacgtcgtctattgaacacataaatcatacatattagtctataacatctaataggagggaacacatcactcaacaattgttataaactattttaccttgttcgattgtccctgaaagatcaatcttggcctcaacatcaatggtatgaccatcgacaggttcctcttgatctacatcacaaatattctgattctcttccaacctagtgacagttccctcaccactttcaaggccttaagaaaaacagatataacaacacaacggtaaatcaaccgatactcttcaataacatttgcagatctcctatatactattcaataacaaaggttaccttttgcttccgttggcgtctctatggagggtttctttctactattgttggcacttttcgattttctcttcctcgtttttttctcaactgcttcaccaatctgcagctcacttttctcctggacacgtacgaggtcaacggatagaaaaaagtcctcgttactgaggccttgaagagcttttttcaatatcatagaatcggacaagtgataatcattaccactcacgttaacctacaaaccaaaaacaagtactccttccttaagttgttgtcgttgttgattccaaaacaaaaacgtgttgttagagaaagtgttgttaccatcaaggcagaaacagtgatgttgccaacacttggaaaacacagttcgtgttctttgcagaatttgtctgtaaaataaacaaacaacaataaacatgagtttaagagtttagttactacaaaaagttaccaaactaaaaaaaaaaaagggaagagattatgaagagtcacctttgaaagaagacacgctatcatgactgtcaaggagtagccccaaacgggtatcaatactagtcttcacaaagacacattgcgaaccggaatcagccatcagtaagattattgtaagagaaatgcaaaatagggttttgatgaagttgagaagaaatgaaactccactctctctgtttgagatttataagcgagtttctttcgtagaggaatatgaaaagctttatgttttttttgggaaatcagaaacgcttaattacttgggaaaacacaacgtgtagtaacgattctctctattcatcgtcctttcgtcttctctcttttggtttatgactcattgaaagggtttgaccagctaataacttcttttctatgggccaaataagtgggcctcacgttatttgaagagtaaagagaagaagagttgggtctttggtaatagaagcccacaaggtaggttttcttctagggtatgtgccgtgagttttaccttctcttgagcttcttcttgtaatctctttgagagctttgtgtaaccctgatttctagtggaagtttgagggcaagagatccctcacgagacatacccataaccactcggggaactcgttaaatcttggtgtcacaaaagcaaacacttagaacaaggttgaatttacccctgcgttacataacaacttaattacttgaatttaacgatgtgagagttttctaatgcctcctccccgtccgataaaggctgctcatcagaggaaagttcgagatgaatagtactgttcatcaaagctgccatctctgccttcttcaatctcaacatcgttttctattgtatatcaaatggattggtataatcaaatatttttctagtcttgaaagacaaagattgccattattaatctttaagttcaatttggattagctgctttaaatactttattgtgaaccgaccaagaagccattgtaaacttatacaaagagagttcttgagaaaaggaagaaattatttttttaaaggagaagaatgctaagagatatttaatcgaagtaaggtttgcatttggttaagtctcggttcatggtgttcgtcaaacacgaattgcgggaaattgaacccataagtaacagattgaaaaagtaaagctttgtatataatcatctcttgactacaagatgttagaattcaaaaaatcttcagatacctcaagaacgatgatataaaatcaaagttagtaaacacattatatatgagatattgttgaattctcacctatctaacctctctttggttagatctcttgctctcttctctctcacacagattttgtcttctttgttctaaagagacacaaaagcgttttcctccaaagactacattgttaattacttggatatattacacaacacaaagacacatacatatagtcatatactactttcattacttgacactattgcacacttgcacttagacctaatcataactcttacacattagaccatactcctagttctaggtactcttacacaagcctcctacttgtgtgtagccacactactcattgggactctaagacaatagttaacatcactagttcaaaagatactttacttggtttacaacaaaacacacttaacttctttttacttggaggcccaccacacaaaaca

SEQ ID NO: 36116 - DNA, 1180 bp, Arabidopsis thaliana landsberg
  unsure (1)..(1180): unsure at all n locations
gcaagtgcgcaacattttgactaaactcaaaaaatatatgttttggtttttgctaagttctttcacagatagagtcactagaacataatagaagcatacttgctcggttacaaaagacggactagtgattgattatactgatcacatgagcttcatagtccttttaaaggatctgctgctttgcctgacctagcatctgtccaggctttagctattgtcttcttcatttcttcatctccatnnnnnnnnnnnnnnnnnnnnnnnnnnnnnnnnnnnnnnnnnnnnnccatcctagtgacatttccctcaccactttcaaggccttaagataaacagatataacaacacaacggtaaatcaactgatactcttcaataacatcggcagatctgctatatactattcaataacagagaaaaaaaacagaggttaccttttgcttttgatgaggagggtttctttctacttttgttgtcactttctgatttactttttctcatttccttctcctcgacacgtacgaggtggacagatagaaaccagtccttgttactgaggccttgaagagcggttttcaaaatcatacaatccgacaagtgataatcattaccacccaagttaacctacaaaccaaaaaccagtactccttccttaagttgttgtttccaaaacaaaaacgttttgttagagaaagtgttgttaccttcaaggcagaaatagtgatgttgccaacacttgggaaacactgttcatgttctttgcagattttgtctgtataataaacaaacaacaataaacattagctgttacgtttagttactacaaaaagttaccaaagtacaaaaaaggaggagattatgaagagtcacctttgaaagcagatacactatcatcactgtcaaggagaagccccatacgagtatcaatactagtcttcacaaagacgcattgagattcgttgattcgggacatagcttgaagaaatagggatttgaagaagtagggatttgaagaagtgtagaggaaatgagacttgcctctccgattgagattgatttatttataagcgagtttctttcttagagaagaaatatgaaaagtcattttcattgggaaaccaaaacacttaattaggaaaactgaacatattcaatagtatcattctctctttaccgcactt

SEQ ID NO: 36117 - DNA, 1492 bp, Arabidopsis thaliana landsberg
aagcataaacaccactttaccacttcttgaattccaaatctgaaagctctgtcattatatatgtataaaccaatttaaacatatacatgtctcaccgataacaacggaggttcattaatgagggtttgattatgatacttacgagtgacagattgtgaatatcaaagagaagcttcttcctcccttttttctccctataaatttccgtagaaaaatcattcattcgcatctcttctcttctcaaaaatcaccacatttctttacttctctgggaaacaataataaaagagctacatggaaatatccaatgccatgcttcttgtagcgatcgtaacagggtattggctatggttcaagaggatctcacggtggctaaagggtccacgtgtctggcctctgttgggtagtcttcctggtctgatagagcaacgtgacaggatgcatgaatggatcaccgagaaccttcgtgcgtgcggcggcacttaccagacttgtatctttgccgtgcctttcttggctaagaagcaaggtctcgtgactgtcacgtgtgaccctaagaatctcgaacacatgctcaagacccggttcgataactaccctaaaggtcctacatggcaatccgtcttccacgatctcctgggtcaaggtattttcaactccgacggtgacacctggctcttccaacgcaaaaccgccgctcttgaattcacaacaaggtacctaaccgctcggtttaatcccttgagtgaccctgcgttaagccaccgcgtacaagaggatgaattaccgagaactagaccaaagatttcatcgtaagatccaaacgtgttgactccatgattgctccgtgaatccaagtagtggaggtaacggaggtattcgtcgtcaattaatgtagtgtctgcttcgaaatcttcttcggtcggagtttggtctggttcggtgaggtttagaggaagatgaaactcctcagccattgattttttttttcctttttctttttgggtgtagatgatgattgtacgagaatgtgaagattgggttttcgagtataagagaatatttcggctcatatgatccttgcatgaggacaagatttgaacacatgtcttacgagtgtgtctcttttgtggccacgtcatagaactattatagcaccgacatatcaataaaacaaaaaaaaattcacaattttaaaaaccggaattaaaaaaatcaaaattttagacaacggtaataagaacagtacataattagagaattatattttagaaaaaaagtaaaagagaatgataaaggataaaaatctctcttgtaaaaaaattggaatattgttagaatattatatattttttacaattactcatatgttttgtgttattgggtaattataattaatacttttagtttagatttttttatttaagaattttttattatcttttaagtaaaaataattaaggaaattatattaatctatgtcattaaaaaa

SEQ ID NO: 36118 - DNA, 2549 bp, Arabidopsis thaliana landsberg
tgtttttccttgtcgcaaacttaattttgtggccgtctttaccagttttctcaaaatctcatttttgtttacgttttgaatatttttttcaaagaaatctgttaaatctagaatatttttgtttaaaaagctaaagtgtttgaatttcggattttttttgcattttgttcatagccgaaaacatgaaatttgttcctcaattttggagttcaatgcgattcctcaaatcatctacccaacaattcgaacggtgatgtcaaaaaacgaagaagtggatgaatgaattttgaactgatttctatttctctcgaatctctccgtctcgttctttttcttcgttttcttcgtaaaaaattgttttctttttttctcaaaatcaaaccgcaaaaataattaaaccgaaatccataatgatgtttggtttatcttcttagaggcattttcgtcgtaagatatcttaactttcaaaccattagaaccccatctcactttgccaaaagctgagaccaaatctttttcttagcataaacgtgaattctttcttattatgaattataaatgagtattttttttctcgaaacacagcctggaaaaatgttcttaaggccgtactttaaaatatatattcggaatttttacagacaagacatggctggacacaaatatatgcaggtttgcacgattaagaccaacccgaattagaccaattgacataccttaagtatatataaaaatagttgcacccaaaaaagtattttatgtttaaaaaaatgaaaaagcgttaacgttttggttgttgcaaatgcgtttgcattttagcatttgtgcaatcgttttcccgtctgaaccggacaaggtggctaaacttactgagtaattacctaccaaagtcaataccaaaaagtcgtctcactccttcagaacgtgccttggtgtctctgttttgtgaattgtttccagtttctatattatacagaacaataaattgaatcagaaaagtatacacacttgcgcaaaaaagacaaacaaaccccgagcagtacatatacaaatacaagtgttccttttttactaaaactaacaaataatgccgaacaagcgatattctatttaagtttgagttgtgtcgtcgactaacttgaccatccattctttttttgttcttcactcagggaaagataagaaattaaagcttgtgagtttccatttggtagactatgctaacttacctcttcctttttttattctccttttcaatatgttccatttcatgatattcttctgttcaacatatgtgtgtgcaggaatttatataaaaatttgcagttgatcacatggctgatcaacaatcttcccccatgttagagcctgttaaaaacatagttctagttgggaaaactggcaatggaaaaagcgcgactgcgaacactctcataggtgaccgacagttcatctccaaaaaacaggcagtaggtgttaccatgaaatgtaagatgcttagagctgcgacaccagatggcccaataatcaatgtcatagacactcctggtatgtgctccattaataactcatagttaccctaccacttttaatatagcaaagtcaatttcatcaaagtcagaaagtaatcttgtacgtgaacaggcttgttcgacttgtctgtgtccgctgaggttcttagtaaggaaatcatcaattgcttaactatggcagaagaaggaatacacgctgtgttattcgttttatcggttaagagtcggatttcacaggaagaagagtccacacttgataccttgcagttgattttcgatagtaaaattcttgactattttattgtcgtgttcactgggggtgacaaattagaagcaaacgagcagacattggacgattatttttctgaaggttgtcccaaatttttaacagtatgttttcctacgttataatcctcacatttttttacaatgcctctagtggtacatgttttctttcattaatggtaaaatttcagggagttcttagactgtgtggtggtcgaaaggtcgtgtttaataacatgactaaggataaagtcaagaacgctaagcaagtcaagcaacttttggctcatgtcgaagctattgaaaagaataatggtgggaaaccgtatactaaccagatgcatcgtatgataaaggtataaatttttttgtttggtatgcattcaatataaaaagtatgtttgatctcttgtatggtatttttaaatgttggaattcatcggtttcctaggaaaagggtgataagcttagggaacaacaaaggaaggttaagtctaaaaaacttgcatcagaaatagaagtcatgaagcaggatttagaactggagcatgacgaaaaaatgagacggatgacacaacttgtaaattcatattgatacactttgaactatatttgtttttcattagtttattttggtgtaatacaatctttttatttttcagttggagaggaggcttaagcagaattctgaagcacatgaaagagcgatgcgtgagatgagagaagctatag

SEQ ID NO: 36119 - DNA, 2707 bp, Arabidopsis thaliana landsberg
aaacaacaagagccaagtgcactgaaaccatctaaccaaaaggtaacaagaagacatgaaacgcgcaaaacaatgtcatttgactatatagccaagtgcactgaagaaaaccccccagcatgaaagaacaaagcatttggcataggttgctaagcacatgactacctaagatcatgtaaaaggatcgcaaccaccaacgatgatacaaaagagggggaaaaattatcaataccaaaggaaaagaagaagacacttgattccggaaatgaaataactgatcaagaaaaagaaataggcaccttgagtcaggaaatggaatctcatccgtcccgttcttagcaccaaacccatgtaagggtacagattcaagtaatccaaggaaagtagcaaaactatcaggattgatgcactgatcttgattctcgttggtagccgttccagaaggtaaacaccagcctttttcatcggaaaaaaattcagacgcacaaaaaaagggggaaaatcagagatttgattatgactaaacgctagttcattggaaccaaaatcaacaacaataaggcttctgacataaaagaggattccactgtgaaatttttcatttaccagggaattgctcggcagatgcaggtagaacctgaggtaagtcacccatgtaaccgttcaaattgttcatttgcccttgagatgccccaataaggttctctgacatataaaagcggcaaaaacttccgtttttaacttctacctagcaaaagaagcatggcccagatcatgtaagttgtaagatttttcaggtcaatgatgcaaaattttgtaacggttgataagaaaaattagagctgaccaccccctcattcttgcaattcaaaagcaatggtgtaagtcataagcttaatctgggaatatgggaatagtgagattgtgtcaactggggcataccataacctgtttaacatggttccaagtggctgagcctgtttcaattgcaatggacccaaatttatatcattaggcactgctgaaaagaaaaagaaaaagaaaaaacttgattagcacatgaaattgtatgaacgattgtcaatgaagcttcaaaaccctacatttcatcacaggatgttagggaatttgattgcaaccagagaaactcacgtggaagcgtacagttgctacagggtagtgctgaagcaatcttgtctttgttgtcattcatactctgctccttccgttggagttgagtaactagattcgattttagagggacaacaacagcagccatattgtccatgcttcccttctcaaaggcagtattaaccaagcagtctgccaaagaaattgagcagtatgaaggcactcctgctccagagctagtttgattgtttacttcccacaaaagatcacatacttcttgcacctccaacttctcaaagatgccatcagatgacactaccaggaagctgtcattagccactagaggctgccagtccatcacctcaggtgcagagatgacaccataactgaaagagatatcaaaactcacactttatctctcaaaatgtaaacgagttcagcattaatcatgttcagatgcacagagagacactaacatacaacaaggaaggcctaccttctataagtaaggtcaccaattgcacgggagacagtcagctggccattcactcgtggcacaccggcccactcagtgacataacctcctgcagcttcaacacgaatcttttcatcctctctatttgggtgatggtcctttgtcaattctttggcaatgaaacgcagtagtccattgccatgttccagtttaaagtcagagaaccttgatggtgaagagccccgattgcgtcttcgctctctgtacaacttcaccaaagtagctgcaataaacaaacaccattgcaacaaactgtttataaataaatacaacactggctttttgttaggcagcttgattttagaaacagatgttgctaaacctctagcttcttccagagtctcaaatttttcagaacagagaagtgcttttgagtcaccgatactagcaaccattagttgaccatctgcaataagtgcaattgtagccgttgaacctgaattcagctttctgtttgatgcttcctggagaaaaacaaagtgtagctggttatatccttatcatgatagtaacaacgctcgacggagtgtatagaagatatccactataccttagtaaatttgacatcaatgtcatggatcgctctcagcaatgcttccttcataatatccaagtggagagaatcatcaaaatgaagtggcaatgagtctcgaaacctgcaagaaaattgggacactgcaatgaagcgaaaatgacgacttgataaacgaaagagaaataaaatgaaaaggcactcaactgcatttgaaaatccaggttgtatagatgcatgatttcatcccgacttacgccgtgcaaaatgacactgtggtctcctttagttgggaatcgtccaatcaacttcctcgtcatagcataaaatgtagcgtgcaagagaaagttgatatgcaaagcaaagtaatccaataaaagttttgaagccatgtcactggcttctgcaccattatgaccgtcaaagactgctgcaattccaaccaaaacatcaattggtgttccagtcttgcctgtcagacgaggccatcagtattccctccacagcta

SEQ ID NO: 36120 - DNA, 2945 bp, Arabidopsis thaliana landsberg
agtccatagaaatttaacactctaatttcctaacatttttcaaaaataataaataataaaaatgcaaagttttatttttattgatagcaaaacgaaaaggccaaaacgcagaagaacataaataacgatacatcacaaacattaaacactcataaaacacgtatttttttattcataaagttgttggatctataataaataagaaaggatctttaaagggatacgatatcgtttcaatacggattaaatctttaatttagttaaaaaatatatatgctgcaaattatgcaattggcatctgatataaaactcctaaatttgtctatatatatcgtggacagtgcataataattcaagtgaatttggtatatgttcctttttatttatgaaatgtttggaacctgtcatcgtattaaattatctatttaattgatttgattcctaaaatatgctttcagtgtaacagaaaaatcagcgaggtagaggaaatgtcacatcgagacgatgtacttttttctgtttcttcatggttttgtgcttcaataaaaagcaattagtgacaaagcaccgttttttttggtaattttattactggtttatgatttcatctagaaggtcaggttcaggtaaaagtgacttaaaatatatgatattagtcagattataacatcgttgtcgagttgattgttaaattgtggagactaatgaaaagtaatgaatcatctaaacgtcgttttattcttatttaaatatatataacgtggagcataatttgtttcatctttgccccaagtcgatcgtcgcttaaccggctaaacccataatcatgttttgtgagagtaggatcaagtcttgcactcgaacaccggttatagaaagaagactaatttactcttcttgtaacaaattgtttctcattattaattacaacaacacccgattattcaatattacaatggaaaattagttgaaaaatatcaaaaacatcattatattacaaagagtaaatcgattattatattatacactaacagaggaacgacacgtataattcaaccactaataataaaagagctagaaaacggtaacaatttctaagcaccacgtgacaagtccacgacacgttccaaaaaccgttgacactccttggtgactctgcaaagcgactcgtgcgccaaaccaccaccgtcaatgctcagtgacatctccgccgagtctctcaacttcttcactttccttctcatcgcttcaccttccttctcagtcataaccttcctcaccaacgcctcaatcttccacctagaaatatcctcctttggatcatccaatctgactgcgattcccagttcgtcgctgagcaacgccgcattcatattctgctcggcaaaaagtggccatgcgatcatcggaacgccgccaacgacgctttccaacgtcgagctccaaccgcaatgggtcaaaaacccaccaacggcccgatgggacaggatttcagcttgtggggcccatgaggggaccacgaaacctctatcactagtacgactcacgaacccttccggtagatactctggcgtgttgtcttcggttccaccaccgttagccgagacatactcgctacaacacgaaccgtcgaccggtggtcgaaccacccatacgaaccgttgctggctctgctcgagtccccacgccaattcagttaactgtttcgccgatagacaaccaccactcccgaaggagatatagagaaccgactcgttcggttgttcgtttaaccaatccaaaaccgggtgatcggtttcggatgattgtatcggtctgcataagggaccgattggatagaccggtacacgagcaacccggcccaagagctttgggtttagaagggacttcaatgatttgggctccatctcttcccatgtatttaccaaaattccatcggcttttgggtaagccagaccatgacgaacaaaatcccggtacaccggttcgtcgggaaccagatatgcatccagagtatcttcgaacctaaccggttcacaccccggtatagcgagcggttttctttgcactgtgtgctcttctttgatatctttgtccaaatttggataataaatcgaaactccgagaaaacgtgcgttggtagggataaacacataactcaacatgttaaattcctttgcgagacataacgcatctgtgccaaacaagtcaacgatcagagccgttggcttttgatgcatggcagcgatcttggatcggagggctggaactgctgcacgcataatgattccgatcttggtcaccacatggtcgtcggggtccactaaaccataaatgtccggcgatggaagtttgacgatgtcgacgccggttgagtttaggaacttggattgagcggagtctgcgtcggtttcgaggacgaagacggtgacgtggaagccgttgttagcggagagacgctttccaagctcgatcaccgggatgacatggcccattccgggactggaaaacatggcggcgtgtggttttgtgatatgcatcactacttcttcttattcagttagctttttgtttttatttagagaggctttgttttgttaatgatgtgtttctatggtcgttgtatatgggttacttacttatttataggcagatttataacatttataaataaaaatattgatatagactataaattgtagtttaatagttgtatattatttgaaagacaaacaatgaaataaagtaattatactgtatatgtaatctaatattcttaccttgtattttaggcaaatttaagtattgagacaaaagcaataacatatctgaatcttcattgaattatatatatttagtttaaagttttgataattttctaaataagtagttaaaacttgattaggtttttaaaaactaattaagttaaagaagtggtgggaagc

SEQ ID NO: 36121 - DNA, 8740 bp, Arabidopsis thaliana landsberg
  unsure (1)..(8740): unsure at all n locations
ttaacccattaataatattttttagctcttttcgcgttgagtgctttttcggacgaggttggatatttcacaaaaagaaaattctcgaacatactatatttacaaccaaagataaataaatcaaagttatcataatgaaaattttaaattaaggagtgatttaaaatacctctcaaatggttgaaaatagtcacaatttcttaaaacatatgcgtgtgcgcttttgtagtctttctctgaaagccattccacgtgcagttcaccacttggacggccgacgtgcataaatatgttaggtactccagggacatgatatacatgaacttctccttcatcgaatcttgttaacctgatccatgtaattgattttaattcttaaatatagcttgcgcactcgaaaataaaaaaatatatttatcttgattctgtttgtatatgaacggcaaagtagtgctctgagaaataaaaaatctcgtcatcgatatatgactcaacaattgatcctgccgcatatcttttattttttgtttttcctttaaactttttgaaaaacctctcaaaaagatacatccacctctattggacaggaccgcccaattctgcttcgtaggggagatgtatatgcaggtgctccataacatcaaaaaatgatggtggaaagatcttctctaagttgcatatgatcaaaacaatgttctgcttaagaatttgaacgcgacttttctgcaaagttctcgaacataagtccttaaaaaatgcgccaacccctggaaaaaaaaatgcatcatctcaagtgcatatatgatataaagagtaaattatattcttattttacctgataatgcaaggtgaacgttccggtcgaggagttctgcaaagataaatggaagtaaccgctccataaaaacatgacaatcgtgactcttcatacctgataacttcccattctccatatcaacacaactactcaaatcagacgaataaccatcagggaatttgattgcatgtttaacacattgcaataaactcattttggcttcatttgtcaatgtataagctggaaatggagcttttcccttactatcaatatgtaagtcaggccgagaacaaaatcgttctatatccattattgacattatgttgtcctttgatttacccttcacgctcataagagtattcattatgttatccaaaacattcttctctgtatgcatcacatcgatacaatgtcggagatttagatctttccaatatggaaagctcccataatatgctttccttgtgccagttatgttccttcccatagcctggcatcttcttttcgtgaccgttgccaccaacatctttggttcttggtggatttacaccagacaactgctcgtaataaatttgctcaccggttaaagactcaggtggatactcggtagaagcgtcttttccttttcggaagtcgtttttgttcttccgtaatggatgaccatgagaaagaaatcttcggtgacaatcaaaccagcacgtcttccttccattaggtagataaaaaaaagttagtactttccatgcaaattggacaagacagtttaccgtgggttgtcgatcctgataacatgttgtacgccagaaagtcgcttatcgtccacagcaacactgcttttagattaaaatttcgattcaaagacacatcatatgcatcgattccagtagaccataactcttttagctcctcaataagaggttggaggaagacatcgagactacctcgcgggtgatttggcccagaattcaaaattgtaagaaacaagtactatgtattcatgcacatacccggtggtaaattgtatggagtcaggatcacaggccacaaaaaatgatttcgcgacatgccaaatggattgaatccatcggtacataatccgagataaacgttacggggttcttcggcaaacatgggatgtagctcttgaaaatatctccactccgccgcatctgaaggatgattcatttcttcttcttttgattggtgctctgcatgccaacgcattgcagctgccgtcttgtggctctgatacattctcttcaatcggtcaccaataggtagataccacatacgactatatggcactttggttcttcgacggtagtcatccataagcttccatctttgagcactacaaaaccgacatttatcttccttttcgtcttctttccagaaaagcatacaattgttaatacaaacatcaattgtataataaggaaggcctaaattgcgcatcaatttttctgtcttgtaatgcgaatcagtagcttggtttccttctggtaaaaaatctgtaaacatttgacataccgaatccacacatctttcactcatattatgatccgccttgttctgcatgactcgagctgctaacgataattgagactggccttgtcgacaaccatcgtacaaaggattttgggcaccttctaacaagtcgtagaatttcttagaatggttacgtacctgatcctccacattctgataagtaccatcttgatgatagttatcatcaaaccccacgttataacgaaatgcatcgttcatcatatccacatatggatcttctacaacattacccacacttttataattctctcttagatacgtactatcaacataattactcgtttctacattcatgttgaaatcttctccatgcttataccaaacataataatcagacataaatccttgactaaacaaatgactactaacttttctacctgagacgatatgttgttattcttgcacacaacacaaggacagtggaatttacctcgacaactttgtactataggctgcctcttagaaaatgtcaagaactcctccactcctgcgacgtattctgctgtcaaattccccgtcatttcatcgaacctcttgtacatccactctcgattaaaaccaccgctactcgtataattatagtttcccgccattataagactaataataaaactaaatatattttaacgtttttttcttcaaaaaagtttattttttttaaaggtattatttgtattgtgtttgtgttgtgaatgaatattgtgtacgagaaattttcattatataggcaatttttgggtgactaaaacacgactaaatagtgtagtcgtttaaaataggtacaacaacttacaaaacgaattacatgtgtttttttaatcgtaaattacgtctattttgcgactatatttaatgacacgccgttgtagtcattcaatagtcgctatttaaacgactagtacgaggtgtcgtatattagtcggcaaattacgtctattttgcgactatatttaatgacacgccgcagttgtcatagaatagtcgctatttaatgattattaccacgtgtcgtatattaatcgcaaaatagcgactaatttacgacaacatttggtgactaattacaaagtgtcatataatagtcgccctttagcgactaccaaggcgtctcgcctctatagtggtaatttggcgactaacgaacgtctatatttttgttagttgtaaattagtcgtataattgtagccaaatagtcaccaaatatagcgactatttatgtagtcgccggttgtattgggtagttaactgttaactacaagaaaacagttaactacccactacaaccggcgagncatttgaaagttcctcctgaagtttgtcatacctccggtactgatcttgcaattcgccattcgatttcatgagttcggaggaaagattgtcaatttgatcctccaattttcgcttggtgtcggtggaggaactgtggtcggactcaagagaagagaacttgcctttccaagcatcaatgtgctgttccctgtcaagcagtagtctttcgtatggttcgaccatgtcgttaagctcactgttcgcctaagcaaagattacataatcaggagaggtaagttagcatgcaaatgatgagtaaggtcggaaggtgtgaagataaaactaacccgagatgaatgatgggcgtgaagtagaaagcgctctcgaattgcaggacgccatctatcaaaggttggcaagatagtatccttccctgtcttcaagcatcggaagacattaccctctgtcttcatcgctatggaagtaaaggatgaagaatgagttattaagggtttgaatgatacaaaaaaatgaaatgatagttcaaacctgaagtgacttggtttgagggacaagaacggtctttgatttaggggtagtaccccagggctcaacttcctcttgtcgaggggtcgcacttcgatcgatcttttcgctgccagatcgagaagaaggagatgtaatggtaggaggaggaggaggtgtgagaccccgtcccagacgtctcggcgtgtggcaaccttggactcacgttcgcgcctctttcttagcccaacctcttaattttcgcgattcaacatagaattgcctttacaaggcttaattctataatcattttcttattacacagtagaagtctttctaaccttggtttaactctaaccaactcttgtactagtttcatcgtctttgtcccttagacttagataatcatttactaggtcaagacatgcatattgtttgctaaccactgtaagcctaacaatcgcatattcctttatcctattttcacggtcaattaccaaacatctatcttaactaatacgctagattgtacataccttggccaatatgcggatttgattactttgcccgtttgtcgccttactccattcgttcaacgactcgtatccgatcgtgaattgatgaaccaatccctatcgttacttagccatacaaccaaccaaccccactggtctaagtacaacgatagagattggggatcgtacgattctcttggttcacgatgagcgaatcaagctcttggcttattggtccatccgttctccaaacgtactcccctccggcttcatggtggacgattgagccctcggcttatcgaaccatccatgtttccgatccggtcgtttaacactacgaccgcccttgggttactaaccgtttacctgtccgatccatggtggtcgggaaagctttcggcttaatgatccatccatgcggtccgaacgatatcctttatcacacctaagggcccgtggactcatccatcggatcatcgtaggctagcccattaaatcctttttccgtcgaccttacgtttgctcgcgagtccaacatccgttttgtccatcggttcccaccgtagactttcccgttggttatccgtcgagtcaccctttggtcttatcgttctctgatcggttttacaatggttgaggagatagagacatgaaggcggccgcgatattgatcctatagggtgaatcacgttccttacccattcttggtgatttcttccttttaccggtaagattccatccatgggcgaccttttggtgtatttggatgcacttctccttatgcttcctcgaacaccattcccggtcttgtccgatccgtctcctcgttagatccgatccgtctgtctaatgatcggtctaccagatccgattcgtctctaagacgatcagtctaccccatccatccgctaaactccatcaaaccgttagaccgggaggtagcatgcacattagttcgatcgagttatactagccgagccgtaccttctttccgaccaacaacttcgtggtgtatttggactatttgtgatgtgtggtatttggatgttgtgagatgatgtgagatgccttgggcgtcctcccttatataggaggcgaatggatgcttcccgaagcatcacatccgttccttgcacccttccgaaaggtcacatccgttccttgcatccttccgaaaggtcacatccgttcctttcatcctttggcgatgcaaccattcgttggtacccgctcgaccttacaccttttggccgagacaactcttcatccgtgagctaccacagtccacaagctcgagtgtcagctgaccggaccacccagctgggtcagtactcgatcagttcactgagctaagtcgagctgtcggtcagctcacctagctgagctagctagtcttccagctggtttagctcacttagcttagctagctagttcatccagcttgtccagctcacctagctggttcagcttgaacattctcgttctttcgactaagtattttgattcgtttcttgaccatggtctagttttctcctaaaacaacctggcctctttatgaacgcgggacgcggtcgttacagtacccttttgagagatatatgaaagtcctcaaagattttgtgagaaacacagcaagacctgaagggtgtattgctgaatgttacttagctgaagagtggatccaattctatagtgaatttttgaagaagacaacaaaagttcaggaaaaggcagatagaaatactgagtatgagaacaactctatccttggagggcgtcctatctctgcaggcacctttattagtcttacagaaatggagagaaaaatagctcatttggctgtgatccagaatatggctgtcgtcgaaccttatgtagagtaagttacaatctatctctctttctattacttttctatattgcttttcactttctgcttctatgaatgctgattctgaattttgttttctctgtttactagtgagcacctgcagcttctacaaaacactaatgggagatgcagacgtgatgcgtctctgttatggagtatgcacactcaaaattttgcatcttggcttaaagaacaggctagcaatagatataagagcctgactttttctatttttctttgatagatacatcttgattcaagtactcatggtgaaacactgaaatggctggcttatggtcaacgttgttgcgcaagatcatttactggttacatagtgaatgggcaacgatttcacacaagaacagttgacaggaaaacacaaaatagtggtgttttctatgaagccacaacagtttgtaagtctagtgcaaaggataaggaacaagtggtggatttggtgcagtattatggctgcataacagacattatactgttggactataatgtcttctatgttcctttatttcgttgcaactgggcagtaaagggcaatggagctaaggaaaaagaagggtttacactagttaatttgaatcatagtcaagtctcctttttaagggatccgtatattatggcttctcaggcaaaacaagtgtttttcctgcgtgaagatgactcatcatcttggcatgttgcaatgagaggtccgtcgagaagatttagagagaaagagagtgacgatgttactcttgacattgggccattgccaacaacagttgacatcgatgttgacttggaagtagcagagaatgagagaagtgattgtgaagggatttatgtttgaaatgtagaactttgttttaactttgagtgttgattgtctgtctgttgtgtttgttgattgtatgtctgttgtgtttgtcgattgtctgtctgttggtttaatttgttgattgtctgtctgtttttagtgttaattgtgtgtctgctttgagtgctgatttaattttatccttttttctcaggtgatttacaatgggacaacagaaaaaaaagcgtggaagacaacctaaaaaagctgctgctaagaaatgcaatgatcaggtggagtatgtgggtacaattgagccaacagctgtagaacaaactgttgttccagcagaaaacattgaggaagttgaagacatcgatggagagacagaaaaagaagttgaagacatcgatggagagacagaaaaagaagctgaacacatcaatggagagacagaaaaagaagctgatgaagacatcaatggagagacagaaaacgaagctgaagacattaatggagagacaaaaaacaaagctgaagtgcaagtagcagaagaacctgaaggcgagcttgaattatctggagatgaagatgttgttcaacctaagaccaagaggcagcgtggaccaactaggatgaaagatattgctaaggatccaaatgccagagtgagagtggagtacaccatgatgggagagcctattggtaaaggctcagttaagttagcatcatatgcaggcgcattggtccgtgaacacgtccctatcacaattgatcgctggacaaaaataggtgaagaaatcaggacacttctctggaaacctgtccaggtaacacttcactttttatttttttgtaatatttgactatctttccttatcacagcaataatcactttttctgtaattgattgaaggcaaggtttgaactagatgaggagtatcaaaaggttgcagtgcttaagcaaatgggatgtttgtggagatcctggaaatcaaggcaagtaactaactttagagaagcaaagacaaaccagcagaggatgaatctgagacctaaaaatgtttctccatttgagtggagaaaatttgtgaagagcaaaactaaccctgaatttaaggtatgttgagggagttgttttaactaagtatatttactatgtagaaagttactaattaacaatcattgttaggttataagcgatagctataaggagagaaggcgcaaccagattcctcacacttgtagtcgcagagggatggttagacttgcagaagatatggtaatcttataaaatgttaggttatgttttttattgctttgaaattttaacacacta

SEQ ID NO: 36122 - DNA, 1550 bp, Arabidopsis thaliana landsberg
ctgcatgtccttcttcttgggtgattccaatgtttttcttcttttagtgtcggcattgttatagcagtattaatatagccgtatgggtagtgtatcgatttttttgaccgtatattatcttatatcttggcttattattggtgatttccattttgttctacagctgatttgctattttgagaaaaaaaatttagacttattgattaaccatgcattgctacgagttcattttcaatcctttatctcgcttgaagtgtagcctacggctacccaaatatattttctatgggttaaacagatttagttgtgaaactttggcaaacaagttatgaaaaaacaattgcatatatgtgatagaaatactcaaaaagttgtatttataatagaacatggagttttcacatacatcttcactcataaatcgtaattttctcatcatatactaaaatcattattctaaaaatatgagtcgataatgcttcataatatcgaataaatttcgcttttgatgccactttcaatattcatggcccttgtttactcgtcgtatcctattccaaagctccattttattacatcttgatcaattgacaaaccgcttggagataaattaatcttcattcggtgtgaatcttggctttaggtactcctcacttaattctttcttgcctccttcgcaaattttctatcattgtgtggatgaccgaaatgcagcatcttaacctacacttaaatgaaaacacgtatatgaataaaatttgacattgtcaactacaaaatgtatcatgattaggcattaggtacataaaatcgtaaatggaccaataggatcttagattacagctgacattaatatatgcaacgggaaagttaaggatacgtatataataatgaaaagttgaagctaacgtcaaaagtagtggagccatccgagaataatgttgggatgatgattttgctaacgtaacatgtggttgaccaaatgacattgaccgctcgagcccttcggctttcgtcctcccaaagtttttttgcgtgtccttattcgacaatcctacaaaaaccaaaaacttcgaaaatctctccgagacacacacgacacttcttggatacacaaattgacctattcgtgttttatatgtacctaatagtttaaactttaaatctctctaatgcaaacaaatagtctcctaaatcgagtttgacaaaagctgatgattgccccaatgagaatattttgtaaactcgtttttttttctttttcaaaatttggtttaaaaatctagatgtcactgttaaagtatataacaattaatttattgtttctcttaatattggtttattacctacctgcaaataatatttggtccggtctatgttggtaatagtaaaaccatctttaaaagtagtcaatcgttacagtataccggaacattagcgtcaattaatcacctaatctgatacctataagtaaatatatagctgcttctgtttatatgacaagaatcatgacaagaattatataattctgtaaaacatttcagtcatat

SEQ ID NO: 36123 - DNA, 1237 bp, Arabidopsis thaliana landsberg
gcatcgaatgcatatttttcataaaaatgcatgtttgttagacttcatggtactatgacatgcacgtggttagtttttgtctatgacgttactcctccctgcatctgagtaagctgaagagaagcatatgcctacaaaaacaacttcgtctaattattaagtgacacaaatgtaatttgccaattggatgtaggtttttgttgcacttcttaggacatgccagccggagaataagatgctagttaagcaagccctggatattctaatgccagcgttgcctaaaaggctacctcttggagattcacgcatgccaatttggataagatacacaaagaaaattttggtggaggaaggtcattcaattccaaatttgatccacatcttcctacttgttgttcggcattcagatctcttttacagctgtagagcacaatttgtccctcaaatggtgaattcgttaagtcgtctaggtttgccatataatactactgcagagaataggaggctcgcaattgaacttgctggattggttgtcagctgggaaaggcaaagacagaatgaaatgaaaatggtcactgatactgatggaaccagtcagattactgatgaaatgcatacttcatctggtgctgatcctaagcgttcaactgatgggtctgccacatcagaagatccaagtaaacgagtcaaaatcgaacctggtctccaatcaatctgtgtaatgtcgcctggcggtgcatcatcaatccccaatgtagaaactcctggatctgctacccagcctgacgaggaattcaagccaaatgctgccatggaagaaatgatcattaattttctcataagagtaaggctttatactcgtatcttacaccatggaacatatattttactttggttagcttttcaattctcttaaccatgtcacctcatgtctaagagtgtatgtgcgtgccattgctccagctattacaaattcatctataagtcgagttgaatttatcagaatcgacctcacttctagttttgtttctctgttttaaaaatatttcgctttcttgaacaggtagcgttggtaattgagcctaaggacagggaaaccaacactatgtacaaacaagcattagatttgctttcacaagctttggaggtttggccaagtgctaatgtcaagttcaactatttagagaaactgctgagcagcatgccaccgtctcagtcggatccatcaacagcactt

SEQ ID NO: 36124 - DNA, 4866 bp, Arabidopsis thaliana landsberg
ctttcatggcaataattcaaccaagttgcctttatttttgtattttcttttgcctacgtatttactttactttattgaggtttatagttatgcttttagtatgcttttttttttctttcgaacgactaaagtcttcttgcaatcatgttagaatgtttaaatggtgatcagtatcgaatttatgattaacactagtactttttgattggatgtgattgtgaattcctctttcgtagaaactgactctactactattgtcttttacgtagagactaatttaataactatcgactttaattcgggcacaagaaaatgtatttgggaaattaatgggaagagagtcagagtcaaccaaaacataccttttgaagactattttgccaattttgtctttggttaaacggtcctgttctctctgtgtcgatccatatcaagtcctccaatgtattggacgaacaaagatcttatataaaaaaaaacttaacttttagatactatcttatgagtatatggacatgtttcatatttgtttgtgttttactttccttttgttaaatggatagttttacagtcctaataattgctctaaaaacattatgcattttttttattttggctaaaaaaattatgcattttattagaacactccaactaaatttataaggagaattttgataactaaatatatgcatgtgggtcttccagagagcttcattttcgttgactaaaggacaacgtgtcaatttttgcttaatttcccacaaagatggcaaattaataatcgaaatttcttcgtatgttgttttcttaactattatcaacttatataagtttttcatttccccatttaaattacctagtctttctttagtccatctaaaatttagttaaatttgagtttccttatttcatgtcggaaatcttgaatgatcacgataatattgtacttgtaaattttagttttattcatgataaaattttggtatcaatatctccaatttagtatatactgagttactgactgaccgagcccaaaatgtatttttttcctcatgggatctcaagaaaatgttctttctttttctttgaccctttacacctaaataaactacttttggtcatttaaagttgactatgggatccgggtatctctgcgccatacttatttggaccaaacatgttggtgtaacaaggttttcgtttttatttggccatactctcactgtgcgcaacactgtcttacttgtgttacataaaccttgaagtaaagtttcaatagtggaacatttgggtagggtttatcaaacgaaactctgtatcagtttgttctttttcttcaacaatgacaaagtttgatttagatgagatcttgatgaaagcttcggaacgcatgcatacattatattaagtcttttagtagtggataggagagttaagaccttcttgagaagaaagtgagcggagaggttggtgtctccttgaagacattgacgacagtgaaagagacagagaaggcattctcttaaaagaaggtctctttttgagattcctcatcgttctctttgcttgaatcgccttcaaagccggctctgctctctccttaagcttcaaaactataaagaagagaatgcggtaacacacaagtatcaacacgatcgctgataagtcccaccacttagaatgtgtgacttgcaccccaaatatcttgtttatcacttgctctcctgtcatcttgggttccccggcaaacattggatcaaactctagaccaagaaaatcgttcttgtatgctccctgcaatataaaagaagaagaaaaacatgttaactttataacctttatactaagtttaataggtatcttggtccggactctaacttgttttagtaatacatttatttggaatttatgagcttagctaccaaagattcacgaacttcgtatcaaaactatatttcctttaatgtgagatacgcaatagttaaaagctaaacgctacaactattgtattgaatggtataaagcaaaatgaatacctgaattgcccaagaaccataactcatgaaggaaatcgggtagcgccagaaaacctttggaagatcaggaagcaaacggaagaatccagaggtcatcatgatgattccctataacaaaaaacataaaccttcaaaatctatttataagtgtataggctagtgaagtagtaataaaaacagagaggatcttgaaataaaaggtagtgtatttcttacaatgatgccagctcctgtgataagacccatcaagaaattcggaacaagagaagccacaaccatcatgagactctcaatgacggagacagagaagaatatgttgagacagaagaaagcccaatgcgagacaccaggacggaatttcaccatgttgtaagtaatactccctgtgatgagcgcaatggctaccaagaacgggaaagaagagacgtaattcgatatgatataaaccgaaacgccgtagtaaccactcaatctctctttatagaacactttcatttcttcaatgaaagaaggaaaccctccaatggacatgaaagtcatgaaaccggtaatgaatccaccacaagaaacccgagccaagatcgatgtgtagctatgtcctacatcgtaaaagattgtcccaacacagaatgataccacaatatagatcacaattcttgaccaatagtatccaatatcgcggcacatgttcacaaatgatctctttgtcaaagttcttagctgcttaaaccacgtcgcttcgcttccctttctcacttccatcccatgatgtccttcctataaaacaccgaaaacagaacacgtaaattttcaataaacacttatcaagattcttgaaatggttggggcagagaagagtttgcttacaatgctagctaattcacggatgcgagattttgcagatttagcgtagactgaacgacgataattctcaacaagcctagctttgatctcagatgttgctagattcatcaaaggatctgatgtagctggtgtctcctacaataaagattaactcttgagtcaaaagactaaacgattttgcagtgttcctcaaaaagtattaaagatttaaatctctcacccgaatcctttgagatcctttgagtgtagctgtaacggtatcaaagtctgagttgatacatcttaggaaatgatcagaaggattccgtttcttcgggcaaggaaaccccgcttcagcaaagaactgcaaacaaaacagttatcatttagcgatcagaaaatcgcagaaaatgtgtttcttgagacccaagaaagggctctgtttttacctcaacagcaaacttggattcaccaaagtaaacagtctcaccactagagagcaaaaaaagatcatcaaagagagcaaaaacttcgctactaggctgatgaatcgatgaaacaacggttctaccaccatctcgagcgatattcctaagcgcttgaatcacaaagaaagcagaagcactgtccaaaccactagtaggttcatcaagaaacaaaatttgcggtcgcgttaagatctctaacgcaacgctgacgcgtttcctctcgccgccactcactcctctagaatgccaattacctatgactctgtctgcacaatcttgaagaccaagttcaatgattgttccttcaacaatgtcgttgacttcttctttggtcaaatcacttgatagccgtagatgagctgagtatgttattgtctccctcaccgttagtgttcccatcaaaatgtcctcttgtgttacataagcctattcatagtaataattccaataaaaattctaaaattcccaaaaaaaaatcgaattaaattttgatattagattatacttacgacgagaccgtagtctagtcttgccttctttccgttcaatagaagattaccggtcataatcacgtttcttgcgagtctacctatatacatgggataattctgaacaattatttaaaattatttaagatatgatttatttgtttatcttttaacgaataatgagtgtgacttaacaactagaattagcataaggtataataagaatccataaattagatacgtaaattatgtagaacaaaataatgaaatagaacaaatatttatgtacataatcaaataaatctcactcacactaataccaaaaagaaaacgaacctgcgagagaatcaagaagcgtggacttgccggatccggaaggacccataatggccataatccgacctggttcagcatgaccgtttaatccatcgagcaatcttcgagtcggaccaccactaaagtttggtataaccaccgtcaaatcttcccacgccaagtacgccccacggccaatctctgccggtggcggcggacgtcggccattgctcgtactctctaactccattgtttttgtttgatcttgaaaaagatcaaaaccttacttattagagagagagagaaagagagagttttgtttgttcttcgtctaggttatttttattatattggttggagatggaattataaagatagtgattaatctttgtaggcctaaggttttctttaggtgagacttgagagcaacaatcaacaaacaactaattacatttaatggatggctttaatatcataaccatatatagatacacgtctatagtatatagttttttttattttcttgcacattaaatgtaagagagtgagagttgtgtgaatgaggtctaatatttatacaatcgtccatgtgtagtagtaactagtaagcaaccacctacttattgacatactattatacgtatgaaatatattttttatgtcggttacatgccaatctaacaagtaaatttggtc

SEQ ID NO: 36125 - DNA, 3304 bp, Arabidopsis thaliana landsberg
agtatcatatagtcccaggaaggatccagttaataaaccggagctttggaaatgttcagttggatacttgtttcatgtttgtgagacgtaaacggaaaattttgaatttcttctgctctgctcagtgccggaagcgatggctacgggtatggcggtagatacggtaggcgagttaggctttccgtactggaacccaatccgacgaagatttcctccggattcgccgttctttgcatctggaaatgtcgagcgcgagctacttgctaaacaggtactccttatggaatctgaatcgatcgaatctgacgtaatgcttttcttagggaataaacaatctacatgatcaattttcagtaaaatcggtttcttgtctagacactctcgttaatggtccacttgaatacttgatgatgatattcgtgttagcatagctcaaatcgaagcggttctgagattttgaggtcgaattatttctttgtggtagtatccagaaacgatttttggggaattcattttcttagtgatgataactgttcggttgctttcgatctgtttggttattctgtaacagcggatttttcattttgaagaagtcttgtaattaggtctgctttgtcaatttggattaaacgattgtttcattctccttctccatgtagttatatgatgcttagtaatcgttttataagtattatgctgtagattgtttatcatctacaaatatttatgctcgcaagagttgagtcataaaggaggattttaatttacaggtgacattggacttcacagaagatgaaatcaaccatctgcatttatttgtggacattgacaccaggtatttgtccttcttcacggatgagattttttttttgttgcggactgttttctgatagtaaatgaaaacaattcagtcaactatggcaatgattataatttttagattagattattgcttacaagagtttcatgtgttttacattggtttttgatgtgttattctcttgattggtatactgaagctaagaatctgtactgttatttttgtttttttgtcttggtgaatctggtttggtgtcaatgccatttatcctatttctgattgtttactgtgcagttcacatatgtgttggtagtgcgtgtaagaattctagctaatagtaaccaaatggctatgaatttgatcactattatctatgtagttttctttcaatatccacatttttaagtggcaatcagtaatatggcattgtgtcactgatcaaatttatgtagactagtttcaattccaaatttggtccacaattatctacgaaatttgatggtcatgagtttgactattttgagcagaagaatctcgtgtcccattgttggctgtcctgaacgcctgaaatctttggaccattttgaagatcactataatgcacggcacactgcctcttgttcagtgtgctcaagggtctaccctacttctcgcttactaagtattcacatatccgaagcacacgactctttctttcaagctaaagtttctcggggttatgacatggtatgctttatatactctttatctctttgtccaaatattaagtgcgttttgaggcagagctcttactgttagctagtgactgtgataccactcctgccatggatctctttaaagtcacatcatatgctaattcttccttctttctgctctcattaacatctttatgcagtatgagtgccttgtggaagggtgtggattgaagttcaagacctacaaagcccggcatcgacacttgattgacaaacacaagttcccaacgacatttgaattcttcaagaagacccaactctcaaagaagcgtagagagaaacttcaaaggcaacatgtatcaaagctgaaacatgaagaagacaaagaagctgcttcgtcagatgccatggaagtagaagacaaaggcagcttagacggtcttgtttcagcactgtcctcgctaactacctcagacacaactccttcgaatgtcagcttcggtcgacgccatggtcgtgggctgacctttgttccacggtctgttcatagagagaaacggaccgaatcttcgtctgcaccaggaccaactaattagtcatggtcttgtagttcctcctagtctgcagtaagataatgaagaaattttttattcttatctgttactaacattcttagctgctgagtcttttgacgaatgcacacgagctaaactttatgttttaagtaattaatttcaaaaaagtaaaaattcgagcaactttgttgcgtatgcctcaaatttttggtctatcaaggaaggtagcaccgattcttggaactggagatgcttgttgcgtctcagccctcttgcagaaagatttataaaatgcaccattggcaattgacttactgcaagtttttggagagactgatggacgccatttgggcctttgatcaagtttctgggtattgatggaccaaggaacctcaggatccctattaattctaaagtcgatggcgacggctggattttgccatcgccgagatcaagcaatgcgctagagcttcatgttttccttacaacattacatctacctctgcagccccttgatgaggactcttatgtttggtgcgtcgataatggcaatgatatcaagttttcctcaaccgaaacttggaatgctataaggcataaaaaggattagaagctatgggtgtctttgatctggttcaaaggagctacgcccaaaaatgcttttaacatgtgggtttcacatctggataggctgccaactagatcaagaatggtttcttggggtatgttggtttctcctgtttgttgtctctgccaagtttcagctgaaactagagatcatctgttgttgtcttgtgagtacaatgttattctatggacctccgttcttcaaaggctcaggctgccttcgagagttttccaaagttggaatgatctgatcacctagacccaaaggagaaatagcacctctccttcaacgctcaggaaacttgtcgctcaagcggtaatctatgctatttggaagcagagaaacaacttcattcacaaccagcaatcaatccctgctgcttgggtgtttaagaccattgaccgtgagatgagatcattgacaccatcaatgcgaggcggcaccggaagaagttcagaaaccttataaggctttggcttatctgattgtgctctcccttttgaattatttctttatctccttgtttttttaaatctttttttggtaaagttttaagtagtattttggtaatcaaaatgtaacgtta

SEQ ID NO: 36126 - DNA, 1398 bp, Arabidopsis thaliana landsberg
tgctctacagtttgaagaccatcttctagactttccttgatctcatcctcgaaatgatatgcgagaccaagactcacaagtcttaatatataaaaaggattttcttcttgctcgactcagaagatatcaacatgtcccttacttttggctttagtgcctctatctctctctcaagcgcatccattcccttcaaagtaaaaaaggtataagcatgaattcatatcctctatataacggcaagagacaaagacttactaagagatcaacatgagcagagaggaattgatgaccccattcggaagggaccaactttttgaattcgcgattattttcttcatggtcaaaagccagaggatgagtagtggccttcaaaggatcaagatgtgcatgctttccgggaaatgatgtcagcggaaagcaagagagtttaaatgccagaaattaatagagtagctaggtgtaaataaccggttctatgtaattagtcggtttagcttggtttagttattataccatacgtgtatataagagaaacaattgtacaaattatcattaagatgaataaactttccctttctataacaaactctctcttatcgtttcttcatcgtaacatggtatcagagctatcgagctcaattttctcttgattttgttcgatttcttcttcttttgagctagttttcttcgtttcttcacgatccaatggttcctggaattcatgttactcgaaaatcagctcgctcgaaggtgtcgaccggttctgttgctcggaaatcatcaaagtccaccggtgttctcgattctgcttccgattctcctccaatggctcgttctcagaccgctggagcttcgcgaggtgttttctcatccgggatctgatgatccgacgcagtctcctttcttccttcatagtgcagatcatccaggtttgagcatcatttctcatcgtttagatgaaacgacttatggtgactggagtgtggctatgaggatctcgttggatgctaagaacaaactaggatttgtagacggatctttacctcgtcctttagaatcggatccaaatttccgtctatggtctagatgcaatagtatggtgaaatcctggttgcttaactctgtttctcctcagatctgtcgtagcatcttacgtctgaatgatgctacagatatttggcgtgatctctttgacaggtttaacctgacgaatcttccacgtacctacaatctgacacaggagattcaggatcttcgtcaaggaacaatgtctttatctgagtactatacttttttaaagactctctgggatcagcttgacagtacagaggctttggatgatccttgtacttgtggaaaagctgttcgtctgtatcagaaggcagatctagagtcgac

SEQ ID NO: 36127 - DNA, 3416 bp, Arabidopsis thaliana landsberg
ctgagctctcgctaacagctcttatgtgcattatggggatgttggaggctactgttatgggattgatatgggaaaggaaaaacatgtcggtctggaaaatcaacccggacgtgacgcttttagcttcaatctacggagtacaacaattcttgtaatctgttcctacattttccagtttgtgtgtatgttttgctgagagaagaagtattgttgattgtactacagggactagtctcagggttagcatactatgttattggatgggcgtcaaaggagagagggcctgtgtttgtgagcgcgtttaacccgctcagcatggttctcgttgctattctgagcacctttgttttcttggaaaaagtgtacgtaggaaggtaataataaccttgatctaagactactgttgtatcaaaagttagaaaaattgattttcactaaatgagcttctaaatttgtagggttattgggtcagttgtcattgtcattgggatatatttggtattatggggtaaaagcaaggacaaaggagggatgcttcaaccaaacgctggatgcgcagagactgtggtaaagattgaccaacagaaggttccgacgcctgataataaccaagtagtatctatcagttaccatttaatgatcccgaaggcagcagctcggtctcaagagtgagtctaagatgccgattctgttccaggatctctatatatcgcaaaaaaacatttttgatagtattggtttgccagaataagagcaagcaatgcgctacattaagtctcataaaagctaagaacttggagttcttgcagtagattatatactttagtaagagacctagacttcaccagacttcacttacgacaaaaagcctgccagttgataactcgtcttctcaagatgccaaagtgacatcatccttcccatagatacgctgaagttcaagtctagcaacgtgatatgaagctgaaaagagacaaaattagaacaatgattggcttttgtattttgttgtcatgctctaagcggctatatcctataaaagtgtctatgttgctctactacctttccatgtgttgaaattcttatggttgatgtcagatcctgtaacattttgaatagcatcaaacaacttctcctgaggtgtattcttcagttcttgaacaacgccataaatggtctttccattttcaaagtatatgtggttatttgggtgctttgtcttgcaattagcatgctgctcgaattcatacgcattgagaacctgttgcagaattcagttggaaaacaaacagatgacatagatttgtatcaaacagacctgccagtgaattactaaaaccatttatatcaggttgcttactttattaagtttacagttgccgcaaccacatagatacccagtcccctttatcatccctttgagatttctctgctaaataatgtttcagcacacagaagagtaaaggtgaaaggttccttctcaggacaggtaaaaaacaaacaaactgacctcacgtgaccacgaatagtacttcacagtaactccatcaaagattcctgttgacaacaaggacttaacatttgaaggaaatgtgtttgtagaacccttcttagctgtctttgtatctttaattttgggcaccagcaaggtatcaactctaggactagcataagggggatttctacattcaaaagacatattttcctctgcttcgatatgaagaggatctttagtaattgcagggtcatggctgaagttctcataattgttactaacacggactgatgatcccattgcggtttctttctgacgatctccaaaagatagggtctcgcttctatcatcctcgcgcctgatttgatcattgctttgacctgctctctcttggctagaaaccataaatgtcatctcaccgccttccgtaaataaggactgtcccgctgacaacgcattggcattttcattgtgatagttagattcggtcatgaaatcgtattcaggtacttgttcacaagagagaagaggcataaagttctcctgtcccttattataggaggaactcactgagaagatattacaatcagccttttgaagagactgacccatcgatagaaagttttctactcctttctccaacggatgaaatgttgacaggacattttcatctcctttgtcataataatcaccaatcggtacgacaccaacaccttcattattgaagtttcgaatgaaatttccatctgttttgctagcgaactgccctggcaagatgaagctcctgtcagtattactgaaggtttggccaaaggatagcgtagtactctcttgaccactattcaaagaaggagccgtttcaaatgatgttgaaattccctgaccataaagctgaaccatgaactcgggcacgttgctaacttttctaatggtgtcaagattaaaagagctcccgtgatgagccagtggcaaaccaaaagatgaaacaggattgcattgctcctcagtataatttcgaccattacggagaagatgtgatgtatgcgcaatggcaggatcatcgaataagcaatcagtgaagtgtgagggcacaagagaagtgtcccatggagataaattcatatgagcatcaatctctaccacttgttgtctcttattactgaatagttctgagctagactcttctgtcaaccactgatgatgactccgctttaattccattctcgaagaaccagaatatggaatctcctcaattatatcctttctgctaatatcttttctcatcatctgtcagaaccaaccatagaccaaaaactgtgagactttgaaggcatgaaaacaaacttatagataggtaaactaggcaagggacagtagctcgtcctgaatggggaaatagtggaaccctaaaatcactaaatcatggcgcttaccttggatttgcatccctgggagtgagatcgcagcgatgttcttaaaagttgatgttagctacttcagtagctcgaacgcggcgtcagattgagcaacgtcaaagtcaaaacccagaatccaaccaggagattgggatttttagggtgaaatctaacaagtcgcagaattcgaagcgagagaagtgagagaggggattgaggcttaggcaagagtgaaaagaggactccaagatactcgaatagctaacagtacacctcatagttttaagatcattgtgagtctcatacacttagtccttgctttggtgtaacagtcgaattctggcactgcgtttttcgaaaattgatcatctttttctgtggtatgaatccggcggattaactgattaattaagcattattttgccccacaatttaaatttacataatgattatctaccgaacttattattatactattctatagcactattatacttaataaaaat

SEQ ID NO: 36128 - DNA, 1672 bp, Arabidopsis thaliana landsberg
gaaaacgatgtcaatatggcttcatgtttctatctcatcatttgaacgaacttgctactagctaaagataattcaaattcattgcttccaagccaagcaaaatcaaccttttacatacattgactacattgaagtaccctcatttgttgtcacattggatccttatagtctatcattgtgttggattattcgtaatagatgtaatcatattcttttacgttaacaacaactatgtatgaataaatttttactaaaacaaacggccatgagtaagatatccattatccaaatgcacagggatatgggtaaagcgagagcttttaatatctctacaaaaacattattataaaagcaccaaacaaaaagtaaagtaagtggagtaaatattcaaaataaatgattttggtatatgcttagaacaagatagaaggaggagggttgtcttcatagggagtgtaaatgatactagtacattgataataaaagccataactactcatcttgtgttccttatttcaatcatcaatggcacattgctccataacccagacatcatcatttataagtataaatttttatatgaatatggtacatgtctgtgtatctcatcactaatttgatcacactttcatttaaatattacagaatagagagaggtaaaagttaattatgtttggacccatcttatatgtaatgatatattctgacaacgaaacgcccctatttgcattgtcgaaaatgaaacttttgttctgctcttcaaaaagggaatcaaaaagcgaggtagctttatatctaaatcaatttctttaatctaaagatgttttctttgtcacttcccattatctctcgcacgacatatattaaaatcattatgaaacattttttagggatatttcattttcaatatgtaatcttctttaaaatattatgattattaatgtatatggttatatccaataaatttggtaaaaaaaaaaggagtttgattcaatatcatcaatctctaattttcgtcaagttggagttgtaaaaatcttgaaattcataatatagaaatttcgtcaatattatgattatttaggttatttatctatgtcaagaaagcttgaatctttcttgttctgagattgtcaacattaatgtgtctttggtcctacctcaaaagtgagataagaaataagtctagtgatattgttatctaactaccaaaatcaaatccgcatgtcgcattgtcgcatgttactaacataaaaaaagaaaatatagtttccattataaacaagaccttaattaacatctgagagattaataatcttttccagtatatatataactgtggaattatgtgcaacagctaagcttggatcatatcatagcgtagtatcttatgattcaaatgtccatagttcaacttggttgttccttgttctgtaagaaaagacatattactgtaatatcatctaccttcgtatacttaagccttttcttccatgcagcttcagccgcctccgccaccattttagcggccgaagcttgctttttcccggaactccatataagcgatacaacttcatcattgctaagcatatcccaaacctacgatgacaatatttaataccaaggagttttattaaacttttgaactgaaaacaaaaaaatcgatattgaa

SEQ ID NO: 36129 - DNA, 5554 bp, Arabidopsis thaliana landsberg
  unsure (1)..(5554): unsure at all n locations
gtaagaccgccattcactattgaaactaactgatatcgaagatgaaaattcaatttgtgactagttcatgccaattttcaaatcagttaagttagaactctttctaagctcagtaacaggagaacaaacacaaccatacgtcctgatatatatactgctccctttccgcaaagattacacttaatcggtcttacacaaccctaacacacttgttagtttgttcctggccaacttctaactcatgaccacagattgtccccgatcactctacagaattaccgtgcataacggtcttctctgacaactacggtctctttagaaataccaccaacagaccctctcctcataaactgagaagacattgcattcttgtttattccaaaagtctgatgtctccataagaaggttcaggccaccttgcttaccaagttaccatcaaattaaaattcattcctgttttttccaaatgccccatacaatccaaggaattgccaattgcagatcacggggaatgtcattgttttccatcaactgaaagataaattacatgttctctttaagaaaatctgagaaatggtatataggaatatcacatactttaagaaaaataaaatgataattacataaactaagaatgtttttgattgatatatgcatagtccatttgagtcccctcatgaaaaataagtacatttaaaaacttgatagtgatctaaaaattgaagaaataaataggtccagattaaaaccaaaacgagtatgttgcttccttctgagtatggatgatatcactaccttccttctcgaaacaactatatcatttctaatctaattctcattctatattcctaatgatatatagtatctgtaatatctacaaatcaaaagttagtttctttagtttttccgaatagtaataatacagaaaattagagttatcaaagacgagtcagtttaatttgtaagaattttctaggaagttgaggcaaaacatggaactaaatcttgagtgggaatggaaggacttatttgtaaacatagaccacactttctcctaaccaaaacctgtttttgttcatgcattaaataccgtctatgacttactgaccttagaaaattcaacaaatgtgttctattcttttttatgcaaagaaaatttacgttcaaacgacagagatttactcataagctaaaagcttgcgagttacagtttacagagaaaatcatatctcagaggagattgaattttcctctgaaatccaggaaaaatcgagatgaggcactacagagcattgcaaaacaggtctaggtggaacttcaagagcatccaaacttccttccatcatctctacaactttgttcatcggtggacgatctgatggggaagactgaatacaccacaaacccaccaatgtcatcttctttgctatctcctcttcctcgctgctgattccaatctcgatatgctcaagatccccattgtctgccttctcaagatccttatatatccattctggaaagtacattgaacttccgttcgcagagttttgaccaaatcgttctttcttccttgcacctatcatttcgaagaccaacattccgtagctatacacatctgacttgtgagaaacactcccataaactcgagagatcatctctggtgcaatgtatcctattgtacctcttgtatccatcaatgacatgacactctctttcttctcgcatagtttagcaagtccgaaatcagaaactttcggggaaagattatcatccaacaaaacgttttgaggtttaatgtcgaaatgcacaatcctcgttttgcagccataatgcaagtactctagaccatgagcaacgcctagcgcgatcccatacagtgccgtcaagtccaaaatcactgaagtcttttccgagatgaacttatcgagtgacccattctccaaaaattcatatataatagctcttcttgaaccttcagagcagaatccaagaagagaaacaatgttgacatgagatgtttggctcatgctagaaacttcatttatgaaatcgtcaccgtttcccttcaaatccttcaagacctttannnnnnnnnnnnnnnnnnnnnnnnnnnttcctctatatacagttccaaaccctcctttcccaacggtgtgagaaaacgactttgtaatcttcttcaattctgcgtaagtgtattgtttcagtagtaacttgaacatgatgacactattctccttttcattcttcttccgacggatcaacaacatgatggtaacaatgaaagttgctagcccaattacagaaccaacgactatgaggattatcaccaaaacatgtgtcttaccttttattggtggtgttacattagaaccatctggatttgagtccgtagacactagaagttctggatttggtcttgcaagattaccatcagaatcattcagcttgagaatctccacaccactcagaatagcgtcgtaatacgtttgattagtgtccttgagaggaaccaagtcaagtcgtagctcaggttgtatcatcccactttcgaaaccaacatacacactgaaatctaaatacattggaatccgaggaccaccgctcaaccgaatcacgtccgtctctttcttagccatcttatcttcgacgaatatggagaagacacgttggcctgctttggtaacttgtggaagagtctcacagaaatgtagcctcacaaggtagttatacccagcatcaactgtgaggaacatacccgttagattgaacatcaagttgctggagttccccattaagcgagacgtggcgtacacgtcatccggcgcaacgtacgacggagttttctccgtgtagttaatctttatatctggtacgatcggagagattcctgaactttcactgagtatgatctcatcatcagagacccatcgtcggaacattcccgaatctccaaccgtttttccccctacgtttaaccggtaaactgtctcaaaagccgttgaattttctatgtgaaagtcaacggaactaccaacgttagttataacgtcgtcaaatcctccctttgagtaaaaccggttaggtatggagacaatctcgattccgttaacgaaagctaaggaatctaaagacggcgtgaaagtgagattcaacgtttggtaaaccggaataataaactctttgattataaactccgtttggggtttagatgcttttaccgttaagtcagcgctgaagttgttcaagagagtgaagccgttgactttgacggagaagaaggatttgacggcgttgaattgggaaccgtatcgggtcgggtaaaagtataaccggagaaaatttgaaccgggagtgactggaaaactgtaggtgaactcagatcggaatattcgagctgtcatgtacggaatctgagaaactcctgattcttggtatgacgcttgtgaagtgaacgaagcgttgactaaatttgacgatagaattttccgattttccgccgtccagtttcggccactaacgtcgacgttgtttgaagtgtcgccgcagttgaagagaaagacatcggtgggttcatacgtcgacgttgctccttctcctactatggtggtggaaacgagaatagagaatattaacaaattcgtgacggatcatttggtattgaagttgaaaaagaaaagattaggtgtttttcatttttcataactaggttatgacttaagagccacgtgaaatggcgaaggaacttatttaacaattttgttttttttaacgactgtatttaacaaaattttatattgcaaaacttttttgattgcattttgagacaaatgtcaaacatattctcaaccgttacgaaccgccaaaaaaaaatccaactttatctctggtcaaataaaagcaagtatataatatctaaatttaagctgctaaataatcatcaaaatgtaatttaaatacaataatgtgtttattcaacaattatacatacacaaatatatatcaaccctaaccagaatgtgatacttgtttaccaagccatcaaatctaccgtgctttaggttcattgatctccgaaaatactccccaactcgaaccactcctctcatcaccaacaactagaacagagtcatcggtcgtggtcgatttcccaacgtgtcctgtagtcctactaaacaagtcatcttctccgtccgtggtcgtaccaacctcaccacttggcattagatccagagactccacgttgtcattcttcttcttagcagtctcgtgaagctgaagagcaaactcaagcgcccaaacaacgtcgttcatcggtggccgttccataccacggtcctgaacacatctaatggctatctcacaaaacttttccaacgatgtcgaagtgatatcagccgataaatctgagtcaatgatctgatcaacggttcctcttctgtaatttgacttcacccatcggatcaaatctgcttgttccggtggaacactttgcattctaatcggtctacaacacaaaacctccaacagaacaactccaaaggagtacacgtcagatttttcggtcaagacttgacggcgatagtactcggggtccaagtaaccaaacgttcctttaacgacggtggagacatgcgtttgagaagcactagtaggaccaactcttgataaaccaaagtcagatactttagcgacgaagttctcatcgagaagtatgtttgtggttttgatgtctctatgtatgatcgtgtacttggctccagtatgaagatactgtaatccacgagctgctccaatgcaaatctctagccttcgtttccatgacaatggaggatcagaggttttgtccctcctgaaaagatgatctttaagtgtaccatgtggcatatactcatagacaagtaccatctcgttgtcgtcatcgcaatatccgattagagagacgaggtgtacatgtcgaagctttgaaagcatctcgagctctgtatcgaactctttagcaccttggttcgatgtaatttccagccgtttaaccgcaacaagtgtggctccaccgtctattcgtcctttgtagacagaaccaaacccgcctactcctatgattagtttttcctcgaaatcatttgtggcggatttgatttcgtagatggagaatcgacggcagagatctgatggaagagatgaggcagattttgtatttgtagagcctgtcccgtgcagaagaggaccccatgacgagttcgtagaaggcttgttcgtggtatctacactagactcgttgctcttcttctttctcttcataacaacgaggacaacaacaagaacaaaaaacgctagcgcaactgcagaaccaaccactgcaattattattggcaaaacatgtgatgacttgccttttccttttagtggcgttatagattgtggtggtggacttagttgaggaattggattaagccccgcaagattaccatcagaatactcagcttgagaatctctacaccactcaaaatagcgtcgtaataggttggatagtcctcaatgtaaggtgtcaagt

SEQ ID NO: 36130 - DNA, 1849 bp, Arabidopsis thaliana landsberg
  unsure (1)..(1849): unsure at all n locations
aaaaccaacaaaggaagccacaaaaagaaaaaagcaaaaaaaaaagtttccccacagagaaaaagagagagagagagagtaacaaactcttgtcgtttcgttaaggacaaggtgtcgttttgttctctctttctgtctctttaaacacacacaagaaaatgggtaaagaagaggagaaagagagtgggaggaacaagatgaattgttttggaagtgttagatcgatattcatgcacgcggacggtgtagattggttgttgatgggattagggttaatcggagccgtcggtgatggtttcacaactcctcttgttcttctcatcaccagcaagcttatgaacaacatcggtggttcctctttcaacactgataccttcatgcaaagcatctccaaggttctctctctctctctctctttcttctctgccatataattaaccactttgttttcttagtagatcatttttttttttgtcaagatttttggatgctttgttgtccagaatccgttgacaattttgttaataaaccaacaaaattaccaacatataagtataacaaccaaattgacttcttcaagtcttacaagtttacatgtatacttcaatctttgactaatgtttatttttttattttgtgtaattaacagaattctgtagctttgctttatgtggcttgtggatcttgggttgtttgtttccttggtaagcctttctaaaaattaataatattggttcctttccttttctatggnatagntgacttgagtacttgacccccaatattatggatttgattttttttttcgttcttaaaaacaaacagccggatattgttggacaagaacaggggagagacaaacagcaagattgagataaaagtacttaagggcagttttaagacaagatgtgggttactttgatcttcatgttacaagcacttctgatgttatcactagtgtttctagtgacagttttgtcatccaagacgtcctcagtgaaaaagtatctctcacgtttaattatatctttgcataattctaataactatattcttagtgtgtgtaaaccaaccttttatgtttggtgcagttaccgaattttttgatgagcgcatcaacgttcgttggaagctatatagtcggatttatcttgctatggagactcgccatagttggtttacctttcattgtccttctagtgatcccgggccttatgtatggacgagccctcataatcatttcgaggaagatacgtgaagagtacaatgaggctggtttcgtagctgagcaggcaatctcttcggtccgaaccgtctatgcgttctctggggagaggaagacaatatcaaagttctcaaccgcgcttcaagggtcggtgaagctaggtattaaacaagggcttgctaagggaatcactattggaagcaatggaatcacttttgccatgtgggggttcatgtcttggtatggaagccggatggtcatgtaccatggtgctcagggtggtactgtctttgcagttgctgctgctattgctatcggtggcgtgtaagtatctataactagagatgacccatgctagcataaataaatttttaatttaaaatgagatatgaaaatcggttttaacaattaaaatgttagtatcatatacaaaatattatagaaatatttttcaatttatattttggtttttactaagaaccaaatgataaaaatgtatcaatggtacataaaaaatcaaatcccagagcttacgagaaatgcgtatttttctagtgaaagtgtctacaatgaaacagtctgaacataatattagtttcttttaaacatatttatattgtaata

SEQ ID NO: 36131 - DNA, 2715 bp, Arabidopsis thaliana landsberg
ttaggatgtgtgagatgccaaataaaacgtatatattttcaatttataaacactcaaattaaagatatcgcgccgaaggctgtattcaattgactaagctataaggaacttacggccacgcatggagcaaacgcccaatgagcaccacaagctcttacttcaagtgctgttgctgccccgattcttctgatcaaatctgcgtctctatcacattcaacaaccactttgttcaaatactactagatagggttaggttccaaatctatatggagcaacattacaagacccaaatcatcaaatacttatgttacgaccattatatgcaaatctctcactcttttgtccaaattttctggtcagttcaaagtgaaagagaatggtaaaaaaacctggtggctccgaggcctattgagtttgcatgcaggaccaatatgaagaagttgatatgattactaagggaggaaactatggttggcattactacgagggaactttgccatttcatccctcgagttcttctaatatcagcaactcaacaacaaagattgaaaatccgatcttcccggtaatgtggtacaaccattcagacataaaccaacaagaaggatcatcagcatcaataactggcggatacttttaccgttcctccactgatccatgcctttatggaacgtatgttcggctctttcctcttcttctctttatttaccataccagtattgtccatcaagaataattcctctgtttgtgttttaggtatctctttgcagacttgtacgctggaatgatttttggtggagctgaaactccagttggtagtggaaacttcacgagctctcatattccgttacaatgcgcttcggattcgccaatcccttgctcatctgaaacagaaccttcctcttcttcatctccaccaattggctttgtattctcctttggagaagacgacaataaagacatatacttacttgcaagcactggtgtttacagaatcgttggcccgagccgctgtaacttccattgctctcttgaaaacacaacgtcctcacctccttcaaaacagcctgatcgttctccaccgtcttcgtcattttctaaaaaactacacaacattggtactcttgttgtaaattacttagcttggtgtgttcttttggtagttatatagagaaaaaagaacatgttcgtacagaaacagaagcacatatttaacgtaattctattgagacaaaggatgtgaagtgtcatacatcttaacaacaaaggaggcggcataacgagagtaacattggctgcgtcacgggcgagaagaacgattattggaaacaacaatgaatgtacatagaattttgggagctgatttcgaatagatcaacctcaacactgttgcatggaacagattcatccggattgtttactcgagaaagcacaagaagaattatatgacattattcaaccaggaaatggctttaagattcctcgttctctcatccgattcatgactcttgaagcatcgtttagtttatctgctctctcatacaaagccgccacaaccaaatgcaactccttgctattgacattaggatcagattctaatctctgaaacaacgactcaaccatctcaaaatctttcttcgatgagtataaactcagcatttggaaatgaacttcatcagggaaaacacatccttcctcttgcatttctctgtaaaccgtgtctgctttttcaaactctctttgtttcccgtacgcgttcaacaccatagctatcacattcgaatccggaaagtaaccagcggttctcattttctcaaacacttcgatgacatttacgtatctttggtttcttgagtaaagattgatcatacagccaaatactgatatgtcttttacctccccggattcaaaggcttgacgaaaaacccatgtcgcctcttccgttctcccagctttagccagaatggtgatagcggtttcccgaggaatattatccgggagctttaactcgtgaagcagacgtttagcatgacccattagaccaactctttcataagccacaatcatggtttgatacagaacttgatcgatttccacaccagagctcctcagcttctgaaacagtgtcgcagctcggtccaatttcccagcttttccccatattgatataatagttgagtaggtaatggcattaggttcaattcctcggctctgcatctcttgaacaagattcgtggccttttcgtgctccatagttttcccatagatcttaatcatcgtattgtaagtaacaacgttctgttcaatgtctttcctctgcatcaacctgaaaagatgaatcgcttcaccgaaaagctcagcctcaccgtaaacacgaaggatagtattgtagctaacaacattaggttcaatatccattttcctcaaactccaaaacaacctatcagcttctttaaccatgtcaagctgaccataaacatcaatcattatattacaagtcgtgagatccaacgcacaattcacctctttcatctctgcgaaaaccgataaagcttctaaaaacttgtgattctctacataaacactcaaaagagtagagtaactaactgtatttggtaagacaccagcttcattcatctcctttataagcaaccgcgcctctctaaacaatttggcctttccataaacattgatcatcgaattatacgcaacaag

SEQ ID NO: 36132 - DNA, 1303 bp, Arabidopsis thaliana landsberg
gagagaaatcgtgtaaataacgttcacacatttcaacaccaaacatgtcgtaatctccgaagataaaaattctcaattacatgtacataaaattttcataagaagaaaataaaacagaacacaagaaagtgtcctagctagcgagagagagagatgagaaatgtaccaaactatcaccattcttacttcgtattattcatcataattctgtttcttgctttctctgtttctgcaagcaacttttcagccacagaatctctcactatctcaagcaacaaaaccattatatctcctagtcaaatcttcgagctcggtttcttcaatcccgactcaagttcacgttggtatctcggcatatggtacaagataatccctataagaacctacgtatgggttgcaaacagagacaatcctctctctagctccaacggaactctcaaaatatccggcaataacctcgtcattttcgatcaatccgatagaccggtttggtcgacgaatataaccggaggagatgtgagatcaccagtggttgcagagcttcttgacaacggtaattttgttcttagagactccaaaaataataaaccaagtggatttttgtggcagagttttgatttcccgacagatactttactatcgcatatgaaaatgggatgggataacgaaaccgtaggatcctctagaatcttgagatcttggagaaccacagatgatctgtccagcggagatttctcgactaatatccgaaccatcgggttaccgaagttttacatatacaacaaagagtccattacgcccacgatcggtgcatggctcggaaatcggttagcagcgtaccggggatgaaaccagttgattacatagacaacagtttcacagagaataatcaacaagttgtttactcataccgagtcaacaaaaccaacatttactcgatattaagcctaagctccacgggactattacaacgattaacttggatggaggcagcacagagttggaaacagttatggtactcaccaaaggacctatgtgataactacaaagagtgtgggaattacggttattgcgatgcgaacacttcacctatttgtaattgtatcaaagggtttgagccaatgaatgagcaagcggctttgagagatgattctgttggttgcgtgaggaagacgaagctgagctgtgaccgtagagatgggtttgtgcggttgaagagatgagactgccagatactacagagactattgtggacaaaggaattgggttgaaagaatgtgaagagaggtgcctaaaggcttgt

SEQ ID NO: 36133 - DNA, 1156 bp, Arabidopsis thaliana landsberg
agcacgcaagtgtgaaacagatccaatcctttcaagccaacaaaatcactctcctgactctagattctaagcacataatgtcaaatactgatgtgggattggcgaggtaacatttgtctgcctttcttcaacttgaattggattctcgttcttgggttgcagagaaaatgtatttgctgtgcgattttcaatctgatttcctcaatattttaactgttgtataaaagaattgggttgaagaatgatataactcagaggctatacaatctttgtatggttactaacatgaattgtttcattcatggattcttttttcttttttttatcaatattgtggagatggattcatcacataaataagtgaacgaaaatgtaaaatgttcccgtttcaaacctcatttcccacacttgggaaaaggaaaataaaaatatttgttgtcagcattcctcctatatatttgttgaccttaaaatgaaacaaaagaaattttccatgaaatataatagaatgttctgtttgctgaccatgagttgaatagagttaacaaaaagaaaaaaaagtttgtaatcgaccatggacatattttggaaagatcaaaattcagaccatgttctaaacgccgagttgcctgctgatagtaaaaaacaatatatagatttaacatatttgctctagtctcttgttcaaaaaaagatggtctagaaatcttcgatattgaatttttcgattaccaaaaataaaaataattaggaggggacttacataaaattgttattttattcagtatacgtgaagagtgatttcatttcattgacaaataaacagacacgtgtcatgttttgatagtgagtatttctttgtctaaaaaacatatgttagtggaattcaaaagcgaagaccaattaagtaaacggagccgccatttcttacttccaccacatgtttctcttcttcttcatctttactattattctagatcatcattatatgtatatatatacgtacacaaaatcatacgtttttccacaaatggatcaagaagaggaagagatcgagattcctaattactttatctgcccaatctcactagagatcatgaaagatccagtcacgaccgcttgctggcatcacttacgaccgtcaaaacatcgttaa

SEQ ID NO: 36134 - DNA, 7790 bp, Arabidopsis thaliana landsberg
  unsure (1)..(7790): unsure at all n locations
acacagaactaagatgcttaaacagaattggtttatgtattaccgctcccgctagtaccggggattgcggcactttttcctgccggtacgacacaggaaaccccatctaatatttggctatctggaaggccactgtcattgaagaaaaagagaaagatgatgtgacaatagacataagttattaaccnnnnnnnnnnnnnnnnnnnnnnngaagctgatatgccaatcatgcactggcctataattggccacttggataaactcaacagagctaattattaaagactttttggggtgtattgagatcataagttaaataaaatttgagttaattactcatattaatcttaacacactttcatacccaagatactatggctccaacgattagtatgacagtaatgttccactaaaatcaacacctacctgaagtgtacattttcaaactcaatgtttccacctttcagtacaagaggctttgcgtcacttgtatttgtgatgtcagatttctcctgaaacagtaagagaataccacataatcaattcaacatgccaggagtgcatactaaaaagcatgcatttaaagcattatcataaaaaaaaaagtgtttaagaaacttaaccaaatgcagagtttaaagaaacaattataacatcctcacatacctctagcaactggaacattgatttcatgtccacaaggctctgaattgtttcacggtaaacactacccaaaaagtttagaggaagagacagctgaaagagaagtccattcaccataacctgcatcacccaaatatgcaaaagcttattagaaaacaatttggataaaaaatgcagagaaacataaaataccaatgtcaaggaaaaatcaaaggacgcactgaccaaatcaccgactgtcatctggccattcacgataccctgagagcacaacaccattgctgttgataaagctgtactaaatatgatactttgtccaaagtttaagaaagcaagacttctttgagtttgcagggcagcatcttcatattctgggataagcagcagaatcgtcacaagataaattaaggtaaatggacggagcaataatatattatggtaaaatatcaatcggttttcttcctagaaaaagaacgtgtaaataaagatgtaaaaagagtcatcagcgcattttctgatctacatttgttacttgttggcttgttgctactattcttgctcaaactaaaactggagaattttctctttttttttggaaattaagataaatgttttcatctaaacagctagtagagttacttacttttcaggaactggtcatacttttcagcctcataaccttcattgttaaaatatttgacagtctgaagcgaaaaagaaattctgtcaaaactgcaagtcaagcaaaatgattaagattaaaaatttacctcataatttatcagagaatcaatggcccttgtgctagcatcattatcagctttgttcatagcctttctaaacttggttcgccactggataaaataaataaaaccgtgagcaaagcgtttgacaccaaaaagatttgtaacaagataatgaaagttgaagagaatgtatgaagacaactatccttctatacatcatcaaacctaatatcacaactagaatgatttaagccgatccaaagagttgatacagttaagattagagaagcttagtaacgaattccagaacaatgtatactatagtagtttcttaaataaaatatcacagttattgctggattatcatgataataacgcaagtattgcattatagttggcattgaaaagagaataccgaaaaaggcacagtacctgtgtcacagctaatgtgaaaacgatatatgatccaacggagagagaagtaatccaggcaaaagcagctccaaacttgtatgccagtatacctgataccatagatatctgaaagatacatattaattacgtcgagtgtttttagagacgaatgaatagtgaaatccaaatatgaatgagcaactgccaattattcaaaatgagaaaaaaaacaatgatcatgagaaagcaccaagtggtcagacaagctttacctccaatatggtaggaacaacattgaaaaccatagctgagaggataaaatttattgcacggctaccacgatcaataatcctgttcaagccgcctgtttctcgactggacataagcaattaagtaaggaagttatgatgagatgaatctaagatggaatgagcgagactactcacaagagtaagagaggagagatagataccttaggtggtaacgaaggtcaagatcatgtaaatgtgagaacacctgcaaagcgaccatatgaaattgattcatacattaaaatatctctatcgacaagatagtttagagcagcagcagcatacctttctagaaacagatcgtattgttcggagagctaccttagagaacacagcagtacgaagttctgcgatgatgaaaagtaacaaccaagagtgaaaagtgcattcttttttaaagaaaactagagctattgagagttaccattaaaagcagaagaacccgtccgagcaatcccgtatccaatgagaacagcagcaggagtagcaaaaacagtaagaagagttgggtttgtagcagcgaaggtggtaagtgaggctccagtaccggtagctgaagcaagccaatcaacagctaatttgaagaggaaagggacttggacattcaagaccttagcacccacgagaaaacccaaagcagcgatgaccctgaaacggaattctggattgtctctcatccacaaatagccagcaagcgtacggagaatcttcatgtcagccatagctgagtctgaatccgacgaggttgtcttgatttccttagtcttggtggtggtttggtctggattgggagtagaagtcgagaagagacgaccattaagcattgaactccgttgaacaaaacgaattggggatggtgatggtgacggggatggtgagttatctgagaggaaggcattgataaccggagatgttcgaattgagttacgtctgatgtaattggagaaaccattatgaagacgataatcagagcgaagactgtaggaaaaagatgggattttgggttgaggttgaagattaacgcgacagagtaagagcccaggagccctaacgaatcgagatcctctcgacatcccttcttctccgaaagtttcacagactgaattttgcgccggcgagctagctaacaatgtcacgacgttcggcggtgcttaatgggcctaataaataaagcccaatacattttaagcccattaatgtctatccctttgtggagtgagtcgtcgtttctccaccattctttcatcatcatcgtcgtcaagcaatgtttattatgagctacttccacaagaagtcattgttagtaaagaaatgggaagccgtgcaatatgcatacaacgtgtggcaccaccgtgttttgaagcctcgcaagtgaagaagatcaaaacagttggttcctttttggtgaatactaggagtaagagaagaagaagcactggtgtgaaatgtagcagcatagctgactacatcggaggtgacttggtgaagccggacatcggacaatggcttcaagacgtggaagaacacaaggcaatcgccatttacgctcctcatgagggtggttacgaaggtcgttatcttaaccgtctcaaaatgcagggctactactttcttgacatctctgctcgtggccttggtgaccctgagactacccttctcaagaactaccctgtttgccctgtatgtctactttcatccatcttctactttaatcttgtttcaatataattttgtgtgaaccatgtatcttctcttcttttaggctcatcttgggaaacaacctatagcaagatggtattatccaccagaagttgattacaggctcgctgctcttccccctagtgccaagggtcttgttgtatgggtcctcgaagcaaaggtttgagtttctctcatttgatctgttctcccacatgctctttctcatatttccatttcactcaggtcctctcaaaatcggagcttcaatttctcgctttacttccctctcttcgtcctaacgtcagggttattgctgaatgtggcaactggtgagtatatcattccttaccatacacactaatcatctatgtttgcaatttgcatgaccattaccaattcccctgcaggagaaagttcgtgtggaagcctctagcagaaattgcaaatctagctgcacaagagtaacttaatggcacaagtggagctaccagtgtatagtttttcatgaatgcatctcccgcaagtgtagcaatactcatcccatagtaaaagttaaaatctgtatttgtaacttggtagtatattcccatggagtagttaaagataatttctgactctgctttgtcacaaataaaagtatgtataatcagtaagattgataggacacgcttagatacagactacagagcaatccagaagtacaacatagaacacttgattcagcagaaacatgtgcaacttactttgatcaactccagtcactagacctaacgagtaacaacatgttccgagtccacaaatcgttttgaaaaccaaaaaattcagatcttttgcaaagttcttcagcgagtaggcatattgccctcctgtgactagacaacttaatacctagagctttaactgaaggttcttgccaatattctcgtgagaaatcaacaaatatggtcacccttaagactttgatggagctaaatgtgaggatgctttttgttgtctagttctatgcttaaccttgagtcagtgacgtatcaaacaggcaactttgagtaatagaagctacactaggaaagatatagacttggataatgagctcagtagtacaaaactttgaagcactaagacaaagctgagattggagaatgcaaaaacaagacaaaaagcaaagttctatactgcagattcttgggttactttaggcaagaaggtatcccaccatccaggttcatacttggggtatggcgccacccaatttttaggcttatcgaactcaagagtggtaggattggaggccaaagcttcatcaagagaggtagcttcaaaggaatcatacagaacacgatccaatcttaacttcataaacctgccataaaacaacaaattgcaaaacacaaatgcgttagataaggagggagtgaggaacgtaattttgaaaagagagagattgggattagggttctaacgtgatccaggtgccattggtggaaacaagagcaacagcaggacgacgaagtctttgagtaattttggggaaattgtcaaggaatttaggctcaatgacaagccagaagtcttgcactaattcacgctcaccgaagtaacggagacgttcaaacaattgctcctggaagtgctcctcttcgtcaagcatgaatttagcgtttgctaccaggaaatggtacttggtgctctctccctgcaatcatccagaaaacgtaagctgtttggtttgattggtcaagaggaaaagagagagagagatagataagagataccttgttaacagaagactgttgctcgatggaggtagctgcggttttgaaagaggaggagaaatgtgatgatggtagagacagagaaggcgaagaaagatggagtttctttgtctgcttgggaaaggaagaggagatgagaaagggtttcgtacggcaagcggcggcggtaggcggcaccgccacagtcaatgctccggtgacgctccacatttgctgctgattagagtctgttgatcgaggcagaatctgtaaaaatcttatcttttttgccgggggtcatccattattatcatcactctctctctctccctttctcaactcaatttttaattgattttaatgttatttgggcttcagtaatggcccaataaggtgttatgggtttcttcaagcccgtaagaaaggaaagggaaaggcgttaactgtgactttcatggcgacgcaggcggagctgagatgctgaacctgcaagtaaccgggaagacgatcttatctagtattcgttgtcagagaaaggtaagttccttatacgatccaacattttgtctctactttacaagttagaaggattgatttttgagtgttttgattgctgcagatgtcgtctacttgttcttcgtacgcatttgggccgtacaaaatcgatccccgtgaagtgttctacgcaacgcctctctcttatgccatggttaatctccgtccgcttcttcctggtatgcctcattcctctctaattattcatcgaacctcttcaactttcttctgaccttctttttcatctattttttgcaggtcatatccttcttttttttgtgtgttcttcatttttcggttttgttttgtaaattgagttctattggatgactttaaccagacgagcacatgttcttgtctgcccgagacgccttgtgccacgatttactgatcttacagctgatgagaccagtgacctgtggcttactgctcagaaggttggctctaagcttgagaccttccataatgcgtcttctctcacattagccatccaagtaaactaaacatctcctttctttcgtcattgtttcttgcgtctaaatcttaatggattggaattgaaacgatctaactttggtttcatgaaaatggcttaggatggccctcaagcgggacagactgttccccatgtacacattcatatcttgcctcgtaaaggtggtgactttgagaagaatgatgaaatctatgatgctgtaagttgttgcattttgatcacattcctaggtttggttttatacaaatcttatggtggtatcttcttgtagcttgatgagaaggagaaggaactgaagcagaagcttgatctagataaagaccgggttgataggagcattcaggagatggctgacgaggcttcccaatacagatctcttttcgattgctagttatcatttatcaatatcaaatcaaaccaagctatccagtagctttaataaggaccattgtgacaagtgactttcagtttgaaattttatgtcagagactttgattcaaatttgtaatttctttctaatgtcgcccaatctgggtataaactaagagttatagctttggttgacactacttagtgagattagaatcaactccttcatgttataaagaaaaattcccacttgctaccatcctctcatgcctcattttacacaatgaacactaaatacttgaactaaacaatagcagagatgtataaataaatactgtcccataagatcagtgcgctttggatactaaataacaagctaagaagcttttgatggttcttcccctggagcgtcatcctcatcatgatagatgttttcagccatttgccatatttggagtatgttgtcctcagcaacactggaaataacccaatcttcacaagggttccacgagaaatctgaaattttgctagtgtgaccaccgtgaataaacagcagctcaggtgggccgtcttctgcgtcctccactgtctgttcctcatcgatcctatcataagacaccctcaaacatatcaatattgctcctccatgaccatacatgaacattaaactaaagaactaaagtctacggcccaaacctgctaaggtcccaaaccataagtcttttaccaaggcaacatgaagctaaaaaagtctcgttctttgggtttcaccaacttgaaaacc

SEQ ID NO: 36135 - DNA, 3106 bp, Arabidopsis thaliana landsberg
tgaattttgttgttgtttttccctttttttgtggggtcaaactgagttgctgtaaatttgaacatacatatgaatatgcatttaaattgtggccaacagttttagaaaactgttatcaaatcaaagatactttaaaaatacaaaaaagtagtgtaagatacaagaagacaaaaagttgccactttctcatgtcgcatatatataacgtttctcggaacttgcattttctctcttcttgtttacacattcctcgcctgttacgagtaacaccaatatttggacttattggatggttgccttaataaaaaggagacaaagaagaaaaagacccaagaacaccaaagccgtcgtgggctcttatcatttactcagaaactaagccctattactaatgggcccaaagatcagttacgtaaaagagttttcccattatataagttgtttactattgtggcccaacagataaaaaagggaatatccggcccattctctttcatcacactccttgaagaggtgataggtcatgtaatttgattaattaagaaaaacgattgagttagacgaagaggcaatggtaggagaaggatagtttgggtagacgaaacggtagagttttggttattctcagattcttgttgttgagagactgatgaactactagaaaaaattaccagtatctccctcaaggttaaaagcgtcatttacggtaaattggggaataaaatggtaaagagaaggaggctctttggtggtgggagtaggtgatgccaaagtagacgactacttgtagtaaacaaaacctttggctttaacactctcctccaaatcccagatctctctctgtctctgtcccgcggagtccccgagagattgatcaccatcacttttgtaccttccttgtactacctatggcgtctgctagcttcgttaagcctaacaccctctcttctccatggatcggccaacgctcctttgctcacacctctgcttcttcttctcctcctcctcgagtctccttcgcgatccgcgccggtgcttactccgacgagcttgttaaaaccgccgtgagtatcctccttatcctctctctctctttgatgctttattagtttggattcgtttccgtaattctcaaagtcaaacgtagagtgagattctctgattattgcgtaatagaaaagcattgcatcccctgggagaggtatcttggcgatcgatgagtccaatgcaacctgtgggaagaggcttgcttctatcggcttggataacaccgaggacaaccgtcaggcctacaggcaacttctgcttaccactcctggcctcggcgattacatctctggttccattctcttcgaggagactctttaccagtccaccaaggatggtaagacccttgccgattgcttgcgcgatgccaacaaagtccaaggcatcaaagttgacaaggtattttttatccatttattctgtcatcatcatcataagtagttgagtttttatgtgtgttaagtgaagtgttgacaatgcaatccaccgtgtagggcttgtctcccctagccggttccaacgaagagtcttggtgccaaggcttggatggattggcctcacgctctgctgagtactacaagcaaggcgctcgttttgccaagtggtatgtcatatatttcaccatgttatcttacatatggtattaactctttggtttgatgtgaaaatgctcttcctagttttgatgttgactctttggaatatatgtatgtgtgtgtttgtctaggaggacagtggtgagtgttccctgcggtccttcagcactggctgtgaaggaagctgcgtgggggctggctcgctatgcagccatctctcaggataatggtcttgtccccattgtggagccagagatccttctggacggggaccacccaatagagaggactctggaggtggcagagaaagtgtggtcagaggtgttcttctacttggcacagaacaacgtcatgtttgagggcattctgttgaagccgagcatggtcaccccaggcgctgagcacaagaacaaggcctcttcccgagaccgttgcagatttcacgctcaccatgctgaaaaggagggttcctccggctgtcccagggatcatgtttctgtcaggaggacaatcagaggcagaggccacactgaacctgaacgccatgaaccagagcccaaacccatggcatgtgtccttctcatacgcacgtgccctgcagaactccgtgctcagaacatggcaaggcaagccggagaagattgaggcctttcagaaggcactgttggtgagggcaaaggccaactcactggcccagctcggcaaatactcagccgagggagagaacgaggatgccaagaaaggaatgtttgtcaagggttacacctactgatttgttaatttcagagatcgtaataaggattaaggaccattgttgtcttttgttttttttttcccttttttgttttgtctctgagaaagaaagacagtcacgagtcacgatcatatcatatatgtatgtgagcaacgtgaaaacatcctcttaaatctatatttcctctcataaagactgattactgtttgactgcaaaaccaaattgtgtaattcttcttttaagtttacaaaatttttggagggcgattaggtaaaattggcatagttgcaagttcagtgttagaagaagcagcggagatctctctccctctttatagtttacttttgacttacagtagagagagtttagagttttgaatttggctccgatgacgaatcgtcttcctccttcgctgtacgttccgcctcaccagcgccttggttccgattacggcttcaatcctgttcctctctctccagttcgctatgtctccgcttatgatgaccgcgtttccgaggatcgccaaccggttaacttcttcttcatctttttttcatgcatctctgagcttattgattgatgctcttacaatggcgattctagttttcgatttgctctcgagtagtattttataaaaatccctttatctttctactggaaccatatcaatttgcagcaggaggtacctttcactgtgccgacttggat

SEQ ID NO: 36136 - DNA, 1265 bp, Arabidopsis thaliana landsberg
tgatctcggaacccacaaatctctcaaaggcaatgcaagggctttggctacagtctcagctatcatagacggcacaagatccgtcggagctgcgataggaccagtcctcactggttacatctctgccataagctgggacgcagcgttttacatgttgatgactgcagctttgatctctggattgttgctcactacgcttattatagaagaagtgaaaactttgttgtatggatcttctgaagaagatcatgaagtcgctgctgcttctacatcaagacctcccattgatgtcctcatatgatatatcatgactttgatcttttttctttttgtttcttttgtttttcaatctgacttgtcttcacttaacatgacttcgtactttgtattatttattgtaaggtttgaatgaaaacatccctcttggtttaactgtgtcttgtcattgtataatctattgtaaggtatgaatgatgtaactaccctaacccaagaaggataacttccggtataagttacttatgcattaatcttctatctgaaaacaataaagatctccaaaaccaaacatgagagccaattgcaatacacaatagcatgcctgcaaagaagtatgtttacccaaaaataaaaataaaaatcacaatcgtttccaacttcaaaacttgtttgagtgaaatgattcgtcactatcctaaaacatcaaatgagagtatagtctctggtatggttttcaaagaacttatttgcttcttccaaacccaaaacatttctcagttagataaagccgagctgcattttagaatctttgtacacacatccacttctatgcctaaacattacaaaataaaagcatagcttatatcaaatagactttgtacaattagctctatataataaaccttgccttgtaacacacacttgggacaaccacaatctttccatatcaaaatgggtttgcaatattaaatgggctctgtatgaatatgaaaaattgatcgagggacaagcacactattaattactggttgtaacaataattaaatagatgggtgatttgattgtatgaatgagaaatgtgaacaaatgtttttttccctgctactacgactagtgtacttctagggacggtacggaccaaacgataccgaaaagacaaccccgcaccttaacgtgtccagaagcaagcgtaaattgacgagaggataaaataggaaactagagtggaggggttatcactgatgctgatgatcaaccagacaagt

SEQ ID NO: 36137 - DNA, 1619 bp, Arabidopsis thaliana landsberg
ccttcaaaatcatacatgagattacgctaaaaaggtaagtggtacttcaaaaccattaaaaaactaaacattcgtccaataaagataaattcaagctgcaagtgatctgtttttcaaccttttggacaagattattccctatgtaaactccaattaattaagtacgctgataagtattaacaacttttcggaattaaacaatgctaacaaagtacaaccgaagcagcatttgatatcaacatataagaaaaagaagactattaaagctgaattccactatattgtagttccaatttttttccagctagttcttatcaggtggagatgaagaagtaaaatgattactttaaaatccctaagatagtgaaatactttacttataaaaaatatacacacgtattctgacaacatgaacgtggctaagtagattagtgtagattaacaagaaactaatttttgccctgttggaaaggtttaaccaatataagctacaaaaacaacacaaagacaactaaaattacattcttttaagaaacctactattccttatttgggctgcttgtaaaatacttacaaagttctattctgcttaattaagaaaacaaatggtggaaaagaaggtaccattaagtttagtttaatacctcggcaaattagtaaacctcacttacattgtgtaagtgtcttaatgcatttcaatcatttatttattcacataaaattccaacaagaatacaagaataacagacacattaaccacgacatgcagaatatacaagcctcttggccatcaagcatttttatggacttacatgcgcatgagctcagattaactgaaatccaacagagatttgttttagctttttcgagctaaagaaacacaaaatccaactatttgacctgatcaagacacttctttggtttactaagtcagataggttcgtgaaaattaatcacaccaatgattttgtacatgtaatttgaacacagtggacttcaaatgtaagacccttaagtgcaaatacaatgtattcaaaaataagggctagtgtcattaattttcacatacactaagaaaacaaatcaatcttatgttatactcattatacacaataaatttttatctctctaatagtaaaaactaaagtgacatggataaaacttaagtctgacactttctatggaaaagtagtataaactttggttcattcaccaagagaagttggagtaatcaagaactagtaaagttttgttttacccatcagtctcttaatgaagatgaaaacaagcgatactactagagatctaaacatgaagccaaggacaaactcaagaaaaatcagtggcatttattagtggaagttatgactaggtttttttctctatgattgaattttcactggaaataagcaattaaaaaacttccagtacgacactgaaacgtcaaaatcagaatctctagcgcaaaagtttattgctttctacaccattttctttctgacagagaaagaagagacaaagatataaagtaaaatttgtatgattagcacaaagatcaacaacaagaagaagaggaaatccccaccacactccaacaccctaatcccaaggctaaaaca

SEQ ID NO: 36138 - DNA, 1297 bp, Arabidopsis thaliana landsberg
  unsure (1)..(1297): unsure at all n locations
ggtacgtccagcggtggttgaatgttttttgtttgttatattgagttgtttgtttgtaatgactttctctatttaatcgagtaggtgggtttagattattcaaacttcaaaggcaaaaccaaatgagcttcgtgtggtccgctgcggtgtgggtcatagctgtagccgctgttgtgatnnnnnnnnnnnnnnnnnnnnnnnnnnnnnnnnnnnnnnnnnnnnagttaccaccgggatcaatgggtttaccgatcatcggagagacatgcgacttctttgagccccatggattatacgagatctcaccctttgtcaagaagaggatgttaaagtcagatatcaatctctttctttctttatcattctttatataacgaatggataccttgtataataaagtcaatatttcaggtacgggccattgtttcggacaaatattttcggatctaacaccgtggttttgacagaacctgatatcatcttcgaagtttttcggcaagagaacaagtcttttgtgtttagctatccagaagcttttgtcaagccatttggaaaagaaaacgtgttcctcaaacatggaaacatccacaagcacgtcaagcaaatcagtcttcaacatcttggctctgaggctttaaaaaaaaagatgataggagaaatagacagagttacctatgagcatcttagatcgaaggctaaccagggtagcttcgatgctaaggaggcagttgaaagtgtacttacataatttcttaatatcttttttgatattattggttgatactagttgctaattctcaatactcacaaccattaacgtttctgtgcaggttataatggcgcacttgaccccaaagataataagtaacctcaaaccagaaacacaagcaactcttgtggacaatataatggccctaggatctgaatggtttcagtcacccttgaagcttacgactttgatttctatctacaaagtctttattgtgagttctttaaatagtttctatgggtttatattatttagatttactgtatgctacacatgataatgttctctcaatggcttccatctaggcacgtagatacgccctccaggtgataaaggacgttttcacgaggaggaaagcgtccagagaaatgtgcggagacttcctcgacacaatggtagaagagggggagaaagaagacgtcatttttaatgaagaaagtgctataaatatcctactngctattttggtcgtcgctaaagaatctaccaatccgttctagctggccatcccctttcttgccgaaaccc

SEQ ID NO: 36139 - DNA, 5011 bp, Arabidopsis thaliana landsberg
gacatttttccccacctttgggtttgaccacttagcgctccttccgctacagttataggaacagaagaagaacttctactcttcagagtcctataattcgtacatgattcggcaccaggcatatgttcaatcatttcctgtacaaaatctgcatcaagtccaaatctgttttgatcgagccaccttgacaaagcatcaactactgctgcaaattcgcttttatccttttcaccacacgtgacactgcaaggagccaacgaacagcaaaattttgacaacgataaaattacattgtctttctcattcatggtatcccagttgatttcacttgtttctctgtcaacatgcttacataggaaattcagggtacccttctgcttcagtacaattgaacatgcatcaacaagtttttgagacacttttttccatgcatcagacaatgaatcttcttccacaacaatgtcaccaatttcaaccccatggtcctgatcataggataaatttttatcaaaatctactcgagaagaatcaacctctgagcgcagggaattgactgtcttggagaaactcttctcacgtaaacaagacaatatatcatctccaagaggtgggcagtgttccgaaagaaggatctcaacactagcgtcatcatcacgctcttgagtactatctctacgattactaagtttgtcactgttctgttccaccatttcatcaatctttgggcaggagaagacagttgatccagctggaataaatgatttcgagcatggtgaccgtgtaaccttgaaaatgggaccagaattgccatcagatacttcacatgtaaatagtgaccccgtgatcttgtcatgccagcaggacttatatcctattggataaatcacgttgacattatggtaagactgtcttatgtcaattcgtccaagcgacagaacaaagaaatcttcaaactgcatcggacatccattctgaaaatcaaatacacaaacatgagggtaagaattacaaaaatattggaaaaaacaatcaatcaggagagatttcaattttacgcttaccttagcttcctcacaaccgcatccattatttccagagctaagagaaccaccagcctgaaaatgagtaccagatttaacggcgaaaggagacatggtctgaccattgaatggaaaacgcctgagttgagcactcactgaactacccttttgctcagggaatttattgtttggccatcttgatgtctttcttctcttgggcgtatgcaatctttcttgaagaagagaattctcattcctgatttcagcatccatacagctgtagttaccattaattgccaagcccagataacaagcaacttcttgtattgaactaaatgtttttccattcggagcacaatacactgcacataactgataaccatttaaaggttgtctgaattcgacacgccagccatcttccaatactccatgcctttcagatatgaaatgcctgagattttgcagaaacaactcacttggatccaaggatggaaatctcatgggcaaactactattgttcaagtttaatgggaatccaaaacctagattatgtgaacccaatgcatccatactcattttagtattacgagacattaaccctgaagcttcgagactagcatgtcctctaccgagacttgagaagcttgaatgcatcattgcataatcaaaagagtttccaatgcaagagctgctggcgagcatatgctttctggagaagaagaaacaagcaaccacatgatccatcagtgctttacaatttcggctatgtgttttctcagacatactcatgttatataaggccagacaagtccaatcaaataaagtctaaacaactgattgaaaatatatcgtatgtataagtaattcataagagaagatcaaaggctccttaaaaactccaacgaacggtagcacagaacgctcaacttatactgaaacttaaattcaacaacaccaaatcctagtccagcttaatcttcaatagtttatcgctttaaaatcgaatacattactcgcaatacatgtaaagacagcttaaccaagtcttgcaactatgttctcgatctcaacccaaattcaattcttataaaaccctaacgcatcgtcgaataccagaagcaggggaacgtacctcgaatcagacgtctcctcagctccgtatccctcagcatcactgggcggcgaggcgttcatgtccagaatgagcttggtcttaacccccaatgttcacagttaagtccttttcccggccagttcgtcagtcggtgtacatccaatcgccggaagtacttgccccagctctgttgttgactcttttcatatgacagcctcgctcacaggcatcgcaggtatcaacgagctctatatagtcaggtcttccacaggctccgcacgtagcatcccgatccggttcaggaacctcggcaggggctccaggggctgggtccgggttatcgtgaattgacctaacaacttcaacaggttcatattcgccgtcgtcatcctgaccagcggtgcaaccaccgccgagagtagcgccggtagggatttcgttgagatcgatgccgagaaaggagcgactctcttccttgtcagcggcggtcttagtgtctccgagttgctcgttagtagaatcagtgggttccattattcgattaggttaatggaatcgagcattgtttgcattgaagtcgaagaagaagaagaagaagattgaaaacaaaaccaaattgcgagaaaaagaggttttcttattaaatttttttcttttttttttgtccacttttcccgaagttctgtttggagagagaaaccaaaaaaacgtgaatgaatccttttacccttttttttcttttttgtgtgtgccttttcctaattcctatcactactactactaaacatattttcgaagatgctgctactcacgtaacgcaccaaaagtttaacctaaaaaaaatgttaattattgtatgatgctaaatttatgttaactttagaaaaatttaaacttgattgtacttgttatcaaatttacggaagtttataaagtaagatgttgcttttatattgatgttggtacaacgcgggaaagataagtaggacctaggaagcaatccatctcctccgtagtcaaatatgtgactctgtgtcagaagaaaaggtaaagaattaaaaaaaccattggcatcacgaggaaagtaactcgaggaaggtgtaataaacacgttaatgatactactaatttttttaaaaaattaattaagaattaaagcagtattcttcttcttcttctcccttttaagttttaacaacaaattttactaagtactagtctaatcaaccgattaaaagagtcgaccaacttttgaatagtgtaacacaaaatcaaaagtaggaggaacacagcgacagttaacagatttgtaaacacttgtcacctacatctaccggcccaacttagctacaagtctgcaacatctgcgacaaaatattttggaacgtggtggattcgttttatcgatcaatgtatgttttccttgttaactatttcaatgtgcattttaacattatttgttctagtcatttcatttttggttttcagtttgtaactgattgatacaaatagtagcaattggatacggtgggtggcagctttgcaacatgtttcttatcttatattttcaaatttgcactcctcatgtgcatcagtgcatgtaacatgtgatgtactttatacgttcaatttatttcgtttagtagaaaataaaatatttccacaccaatccaagtttttacgtattaaaaaatatgtatataccaattccatatctaaataaaaataaaaatgcatatctagtccgagggtatttgaggaatttacaataaccaaccaaagtgtatcagagagaaggaaaagaaaaacattaatttcgcccaagatatgccgtacaaatgggtcccctccgttggatccataaaacgacgtcggtgtaaacgagtatgactaccacgactctactacgagttgcgaactgttggccggaaatcaatttcgtcgtcttcatcgactctttctctccctgaattttctctggcatttcgaatttatagaggtacgcgagtcaaataatcttcactatttactcttcaagttagtagtcatcgataccgcttgactcgccgctactttttctattcttctgcgttttcgatctttcgcggttgcagtagtttacggcgccggagttagatttcggactgcgaggatttgtttgaactttttagagtccttgagtgggatcgaggttttttgcttttgttttgagtaaatttcgtaattgtttgaaataagatttgggaatgtagatagatctctgctctttaatgttattgctgttgaactctcatagtaatgtgtttatcttacaatttctactttgaaagggtttcatataagaatacttaatactaagctagaggtcgaaaattcatctataatcttatctttggttttgtaatcgcagatgctaaacttatgttgtttgtacttataatggcgtcttctttgttacttttcaggtacgcatggctgccaaggctttaaaagatttgaacaatcttcctgtctctgagaggaatatcgactataaaacaaagcttttggttggcaaaatgaatggaacagctgaagataaaccaccacaaaactctgtcccctttgatcacaatcatcctaaaggcgatgagattgagaaacctgaggcagagagagttatcgtagaaattgagtatatagaatccaaagacttgaacaatgtaacccaagttgatgcagttctcaaggtatcaattgttttttcctgctagtatcctatgctttactgtgaattctcatttgccatgctgccttgcaaatttgcaataaaattcaactgtttagagtttggacattggaagtaagttgtttcgta

SEQ ID NO: 36140 - DNA, 1088 bp, Arabidopsis thaliana landsberg
  unsure (1)..(1088): unsure at all n locations
actccacatttacgaagaacttattattcatatcagtcatctaataactgaatagttttatccagttgattatgttaatggtctttctcacgtctttttttcttgttgctcagcttctcatatatatatgaaatgattataaattgcttattttttgaaaaaatatatttccaatcctacattatcaatgtctgcatttcaaccttaattttacgagtttacttagaaattggtgttcttttccccgacgatgtaacatcttgatgctcttttttttttttttttttttgctcttttttttttaatcattaaaaacctttataaatggcttcgagtcttagacaacactcaaataatgtccaagttactaagtttgttgatccatgcttcaccactaaaatatggtttatgatgtaataggttgttgtacatataaacgtacatcttatttatgtgccattttttttaatgtatataggtgcattatctaaagacgtcatgtcttgatatggtttacggaaagtttgattttgatcgaattttaacacttcaaaaatcaacataatggaaggttttttttttttttttggccaaatcataatgaaagtttaattatataaattatctagagaccagtacttctatacatattgggttgtgattctgtttactcctaagaataaatatggaatggtttctgtaccaaggcaaaaagtatattaattcaaaaaaattagataataatattaaaatcagataatgctcagaaaaaatatactcaaattcatagtcgactaatccttgaaatgatggatggtttaattttggatgatggatttgataatttatcaaacgtgtacttgttggagcttagtattgttcttaaaagtttgatgtcacacaatgtcgaattgggaaaaagatataacaaaataggttttgacaattataattgtacaaacacaatcacacaatcacacaaagacccatgtatggatgtatagggaaatccatatatttgtgtgtgcgtgtgtgactacatatatgtacatagataaggttgtngtgtgtacatgggtttgttaagg

SEQ ID NO: 36141 - DNA, 2301 bp, Arabidopsis thaliana landsberg
cgcgagttcttccatcactccaccagctagttccaaaaccttaacaactctctgcccggaaaaccaaaaataaaaacacaaaaacacattcacatcaaatcgtccaataaaatctctaaggaaagagtgagttttccaaaatttcacattctcaacattctggagtcgctgcaacgaagtgttctgcgtctgcggatccattggactctccacgatttcttttagaccagagagagagaactccaaactgagatatatcacaataccgtcaaatccactcatacacataccctaaatactcaaatcggagcagtgggagtacctcaatcgaacacggcgacgcgagacagtgaagatggcagagacgatgaaataacacggagaatttcgattggaaacggcgtgcttatgatcagcaacggagggaagattttggggaatcggcgacactcggcaatacagatcggtgaaggaaaaagcaaagaagatacaagtttttttagtcacgtaaaacggcacgaactctactttatcaattcaggaacagcgagtagttaaaatattgaattacgaaaacaccccttggttcagataaaatctttgtgatggccgcttttctcatttataacggataaaaaccgtaaacaatacacaagaacagaggctgacacctaaagcttactctctaactgcaatggctcacttcatagacctcaacagtctcaccaacactttaccgtctcttccgaaactacccgagagtcgtaaaaccggaaaatccagcgggtttgcttgcagcagaactgaagaatctcaagaaccggattcggtacagatcagaagacggatgacattaggatttgctgtctcaataggtccagccggaattctcggcgaaaataatgtttccttggcacaagacaatgggttttggattgatggtcctcttccaattcctcctatttacaacagtaagcgccattttatattcttgattgttttctttcttcaaatgtttgaacattttgagccatacaactattcaagatgagaattcgatttggtagaatcatttgatttccggttttgaattcgtcctcgatttgaatatacagatatcgtgaatgagaagacgggaacgagaacattcataaagaaaggagtgtatgtagcggatatcgggacgaaaggaagaatgtatagagttaaaaagaatgcttttgatctcttggcaatggaggatttgatcggaccagatactttaaactatgtgaaaaagtacttgaggcttaaatccacatttttgttttacgatttcgacaatctcatctctgctgctgcctctgaagacaagcaacctctcactgatttagccaacagattgttcgacaatttcgaaaaggtaagtgtactaatgaagtcctggttcgttcaaaccgaagagactattgtttttttaaaatttcttctcttttctgatatatcctatatgtttatttgttgttttcttggtgtttcgacacagcttgaagatgcagctaagacgaagaacttagcagagacggaatcgtgttataaagatacaaagtttcttcttcaagaggtaatgaccagaatggcatgatcctggttcggtttataccggtttacttgctattgatgatcctacatggttgataactctgtggtcataaattgtaatctttgcggaaaaatattgagatctagtaatagaaaaaaaaatgtaatgtatagaccaaaatatgatcaaatttataacgaattggattttaatttttcaatcaaagatacagaaagaagagtatatgcactaaatgtttaatattgaaatcttagttttaagaaaaccatttggccaaaaaaaaaaaaagttttaagaaaaccaatgtaatatagactaaaacatgatatatatcaaataaaccgactaactttttgcctaaaactaacggttgagtcgttgagatttatcttaccacatcgacatattcacacacaaaataaagaaacaaacccataaaccaaagatagagaaacagtggtcgtacaacgtttactcacagaggcttacaatatcaaactgagggcttgtgactgtcatgaacccgcaacaagaccctctcgagccacacctgcgacattggtgacacgtatcacagcctgtgcactaagaggtgagaggtttgattggcagaagatttgccaagtgactggctctggatgcctccctccttcggttcgacattagtagttttcttgtacactgtctgaagttccagt

SEQ ID NO: 36142 - DNA, 1821 bp, Arabidopsis thaliana landsberg
gagctcagacattgacagagatatcatggttgagttgataatagatgttctcagttcactctcaagcccaaaccttgatatccgcaggaagacgcttgacatttcccttgacttgattacccatcataatatcaatgaggtcgttcaaatgttgaagaaagaagttgtgaagacacagagtggagaacttgagaagaatggggagtacagacaaatgcttattcaagccatccacgcttgtgcagttaagttccccgaagttgcaagcacagtggtccaccttctgatggacttcttgggagatagcaatgtggcttcagctcttgacgtggttgtttttgttagagagataatagaaacaaatcccaagttaagagtttcaatcatcacaaggttattggacacgttctatcagatccgagcaggaaaggtctgcccttgtgccctttggataattggggagtattgcctatcactttcggaagttgagagtggcatttcaactatcacgcaatgccttggcgaattaccattttactctgtttctgaggagtctgagccaactgagacatcaaagaagattcagcctacctcttctgccatggtgtcctctagaaagccagttattcttgctgatggaacttatgctacacaaagcgcagcctctgaaaccacattctcctcgcctacagttgttcaaggatcactgacttctggaaatttgagggcactccttctaactggtgattttttcctcggagctgtggttgcttgcacgttgaccaaacttgttcttaggttggaagaggttcagtcttccaaaactgaagtaaacaagacagtatcacaggctttgctaatcatggtttctattttgcaacttgggcaatctcctgtttctccacaccctattgataatgattcgtatgagcggattatgttgtgcataaaattgctttgccataggaatgttgagatgaaaaagatatggttggaatcctgccgccagagttttgtcaagatgatttctgaaaaacagcttagagagatggaggaactgaaggcaaagacccaaacaactcatgctcaaccggatgatctaattgacttcttccatctaaagagtcggaaggtaatattattattttctaagctttccctcgctttattgtgtgttcttttccttatgattttccttcgcactctgtttagtttttatctgctttctcttacagttcatatccgattttttctccattttgaaagaaagatggcaaaagtatataatggcatgttatgtttatttcttttggtctgtagatgagcttactgatgataaatttctttcagggaatgagtcaacttgagttggaagaccaggtacaagatgacctaaagcgtgcaactggagaattcaccaaggacgagaacgatgctaacaaacttaaccgcattcttcaactcacaggattcagtgacccagtctatgctgaagcatatgtaacggtacaccattatgatattgctcttgaagttacagtaatcaaccgaaccaaggaaacccttcagaacttgtgcttggagttagcaaccatgggtgatctcaaacttgttgagcgtcctcagaactatagtctggcacctgaaagaagcatgcagattaaagcaaacatcaaggtctcgtccacagagacaggagtcatattcgggaacatcgtctatgagacatcaaatgtaatggagcgcaatgttgtggttcttaacgacatacacattgatatcatggactatatctcccctgctgtgtgctcagaggcttta

SEQ ID NO: 36143 - DNA, 3082 bp, Arabidopsis thaliana landsberg
  unsure (1)..(3082): unsure at all n locations
agagtaaaagagctgaattaagtttacaccaatttattttatatcataaaaacagaattagaattcgaatcaaacccaacaaaaaaataatcaaaaattaactttttaaaaaatcgaaaagaccaaatcagaaccgaatcgagatctcgattgaacattcagattgaacaaaaaaaaaatcgagtaagttaaatccaatgaaaaatgaaatgagcatgacatatactctattggtttgtgatagtgttttgctcgaattttcagagttgcatattaataatcatgtcaacaaaaaatccctttaaaaataggtaaaagccctaactcataacggacatgtttttttttttttttttttttttcaaatttaagggatatatgtatatctactgtttgttgtatggattacaaagtacttatatatttttattttttcttctttatcaaaaactacatatttatatatcactcaacataacattattcctcaagatcgctagagagactactttgggctgttgtagacataggacttggcaaaatagacagtaaaaataaaggcgagggagctgagacaagcaagtagccagtagaagtaatcaagatgtgcctggttcaggttattagagaaccagctcacttgaccggactggcttgtggcttcctcgatgactgataccatgaagctactcaagaagtttcctatgccgattatgcttagatatagagccagtcccatgctcctaagctgtggcgggacttctccgtagaaaaactcttgcaaaccaaccatagtgaaaacgtcagagactccaaagagaatgtattgtggaatcagccagcaaacgctcatcgggaccgtggctttaggcgaatcaactaatccatgatctcgagcagtcttgagtcttttcatctcgaccaaagcagctattaccattgaaataattgagaggaaaatgccggtagaaattctctgaagggttgtaattcctgctggtttacgagtgattgatcgtgcgattgggacgaataaacggtcgtagattgggatgaagacgaggattgctaggcttatgaagcattggagtgtagctgcagggacttggagtgttgatgagattgatctatccattgtagatcctttctttgtaaagaaagtaggagattgcgcaaacacaatgccaaacaccaaactacacaaccaaattggaatgagactcaacacagcttttgcttcctcaacttcatatgaatcgcatgaaatcaccgctctgtccaagaatctgtcgttaccaaaaattacatgcatacttaattttatatctaacaaaagcatgcatgtaaattatcgaagctaacacatgctttaaattctatagattataagtcgttccaacctttttttagttagatgattcaagaattttgtattttcatttatgtatttacaactttttaactattggaggactattaaaaaatatatgtaaaattactaattacctaagttcagataagaaacttgactaaaaaatgattttgtttgtaaacaaaaacacagtgtnaagacaaaagaaaacaaaagaccaaacaaacaaaacatataatacctgaatttctcggtgctttcgttaggcagaagaaggcaagtatcagaaggagtttgtcgccggtttctagctgcagccacaaaaacacggccaattctaacaaaagggttatcatgttttttgccctgtcttccttctcctccggtgctgaagcggtaagttttgattccaagtaagaacaagaatagagcaagcatcatagaaagacatggaatcgcatatcctaaagcccagctcagattctcttggacataatttgtgaccagacgagtggtcaatatgccgattgatatagcaaaatacaaccagttaaagtaagaactcttggctttggactcatttgggtcttgttcatcaaactgatctgctccaaaggctcgaagacataccttgaagcctccttctcccaaagcaattaggtagagagcacaaaagaagattattactttgacctgagagacgcacgactcaagtgtttcttgatcattacaaagagaaggaatcgttgctgaaaacgtaagcagcccaagtccctaaaattcaggatcacatcacataaattatattaaaggtttttccaaaactatcccgcgttttttattaggtcaaagattttcaagatcttgattcacatttgatttttgtagtagaaacaaaaaagtatccaaattaaaacctatataataatatgaatagtcgcatatatcattaaatttggattgggggtttagtcgcatatatcattaaatttttaatcatttttttttttttttgattcaaattcttatcttgtttctagggtataggaaaatggatgtgtagcctaagatccaactcatgcctaattggtaatgatcgcactagaaaaatcaagaaggtaacacaaggtaacaaaagatgaaagctttgagctgaattattaccatgatatagaaagaagaggttaagaggattgtacggaaacggccaagaaaagagtcggcgatagaaccccatatgagaggcaagaaagctgccgtcccaagccagaggttaacgtttgacgctgcaacagccgtcgactctcctaacgcctcggtgaagtaggttatcagattcgaggcgataccgaagtaggcgaatttctcggcaacttnnnnnnnnnnnnnnnnnnnnnnnnnnnnnnnnntttggtggtaaattgaggaaatggaaaaaaaagagtcaagacttacacatggtgaagccagaagatttccatgcaccggaagaggatctgatagatggattgcctcggaaatcgacggaaaactcgacattctcgtttgaaactatagctccagtctcattatcgccgatggatgtcgacattgcttcttgttatttcgtttcagatgtatttatctataggttatatatgtgtatatatatagttggtatttcatgcacaatgaccaaaatctaatatagattcatattataatatgaca

SEQ ID NO: 36144 - DNA, 2042 bp, Arabidopsis thaliana landsberg
  unsure (1)..(2042): unsure at all n locations
agcatttctctccgctgcttcaaaagtccacaacatcacagctcggtgttttgtttatcaaaataagaaaacatagttaaacagatcagtagactaaaaccaaaagaagacgaatatataaagatgttgtctcaaattaaaacctcaaagtcaccggaaagctctctgtctaattccttgagaagatccttattgtagttagcagcataaacggcacgaatgaaactacgttgcgttgcatttctgtgagccaagattgatatgatcatcctctcattggttccccatcctgcattagacaaattcacaattacattaaagaaaaatagagtcagaatcatgtttgaaatcattcatcaatattagattgaaaaagatatataattctagtaaaatttatctcgtttcatcaatttttgaaaggtctattaaatactaatagattatttttgatgataggagtaattttaaccaaattaaataaatccataccataaaccaaactagatctatatactatatagatcaacgaatatatacagacacatgatcgatcagataagagggtttagttgaaatagattacgctatgaccaaccaaactgatagaggattcaatcgaagaaggcgaatgctagactagttataaccaaaagattaatgaaggggtatagagaaggacataaacctttgaatgccttgtggagctgctcggagtcttcttcgggaagaggaatatttgctggaattttgagagacgccattctccgaccactgaatatttctctagctctctagatgagacgaagaaaatgtgggacgaggaacatgcacactgtcttaaataatgaaatgatatcccaattttttatattttattaattatttttgttaaaaattagatttagcaatctatgtaaatcagtaaaagaggaaaaaattattaatacaggctgtctacagtggatagaattgaaaaaacaagtataatgttttgcatttttttgtcataaagctgaatattaaatggaaattgcacattttcttaaataatgaaatgaaatctcaaattttgttaattattaatcaattttgttttaaaatagacttaacaatttaagtaaattagtaaaatgagagattttattaatacaattacaggctgtatacagtgaacagaaatgaaaaaacaagaatcatgttttgggttttttgtcataaagctggattttaaatgcactttaaacagcttaaatatgggattacataggtaccgaaatttaatttatttattttttctggtatataatacacgcatattccttaatttcattattttggatatttcattatttggacatggattataacacatggcggacaaaacattagaaccaatattgttcattttaacaagatgtattaagtatgggtttagctttaattttaaaaccatataattaaggggaaaattataactcattagtttatactaaattaattaaaaatagatcaataataatttttgatatggttttataattcttagattaaaaaaaaaataactgaaaacatcgacgacaaatgaaactgaagacactaaattcttaacatgaccaagttgcaagtccaaccataactgttttattaaacacaaagcgataaaatttagtttttttcttatacaaaatttgcaaatgttatttcaagcatggtcatgtccgagaagagcgagaagtatatcctcatagtcaccatgagtgtctttagcaatggctcgatcaagaggaacactgtttctacgtaaatattcctctttgatccgttccatgtcaaactctgctcgtgtagtgaccactctcgttagtccccactcatctgttcccaatttgttgatggcttgacgtagaactttctcaaaatacttctctggatatgtcaagcatttgatcacggctttgagcaattgaatgtattcgttttccgaatcctcctttagatattngcccatggaagctccgaaattgtttttgtagtgattg

SEQ ID NO: 36145 - DNA, 5429 bp, Arabidopsis thaliana landsberg
  unsure (1)..(5429): unsure at all n locations
tggctctacgcttttcttcatcaaaacggcgcaggtgctgcttcacgggttgggcaccggctcggatgtccagtgagtgctcggcaacatccctcggtatgccgggcatgtccaagggactccacgcaaaaatttcagcgtttgcgcggagaaagtcgacgagcactgattcctatttggggccgagcttggagcctatcctaactttcttgccagcgtcggcgctggggtcgagagggacagacttaaccgcctcggccggttcgaagttgctggcgtggcgcttcgcgtcaggcgcctccttggagacgcaatccaggtcggcgatgagggcctcgcacatcgcgatggcttcggcgtactccacgcattccaagtcgcactcgtaaacgtggcggtgattggatccgacggtgatgaccccgttgggcctcgacatcttgagcttgaggtaggtgtagttggggatggccatgaacttggcgtacattggcctccccagcactgcgtggtaggttcctcgaaacccgaccacctcgaacgtgagggtctcccttcaaaagttggagggggtcccaaagcagatgggtagatcgagttgtccgaggggctggacacgtttcccggggatgatcctgtgaaaaggcgcacgcctgcccggacacaggacagatcgatccgcaggagcccaagggtctcggcgtagatgatgttgaggctgctgcctccgtccatgaggaccttggtgagcctgacgttgccgatgatggggtcgacaacgagcgggtacttccccggactcggcacgcggtcagggtggttgcctggtcgaaggtgatgggcttgtcggaccagtctaggtagactggcgccgcaccatttatcgagcagacctcccgacgctcttgcttgcggtgcagagccgaggcgttcgccaattgcccactgtagatcatgaagcagttgtggaccttgaggactcctctgccttgtgatcctccttcttatcgtcgttgtgcctctgccaccctccgcaggtggcccggctttgtggaagtggcgccgaagcatgacgcactcctcaagggtgtgcttgacgggcccctgatgataggggcacggctccttgagcatcttgtcgaagagattggctgctctcgggaggcttccgagggttcttgtactcagcggcggcgacaaggtccgcgtcggcggtgtcgcatttcgcttgcgactttttcttgcccttcttcttggtgccgcgctgagtggacgcctcgggggcgtcttctggctggcggccctggggctgcttgtccttccggaaaatggcctcaaccgcctcctgaccagaggcgaacttggtggcgatgtccatcagctcgctcgccctggtgggggtcttgcggcccagcttgctcaccaggtcgcggcaggtggtgccggcgaggaacgcgccgatgacatccgagtcggtgatgttgggcagctcggtgcgctgcttcgagaatcgccggatgtagtcccggagcgactctnnccggctgttgccggcagcttcgaaggtcccaggaattcccggggcgcacgtatgtgccctggaaattgccggtgaaggcttggaccaagtcgtcctagctggagatctgccccggaggcaggtgctccaaccaggcgcgagcagtgtcggagaggaacagggggaggtttcggatgatgaggttgtcgtcgtccgttccacccagttggcaggcaaggcggtagtccgcgagccacagttccggtctcgtttcccccgagtactttgtgatagtagtcgggggtcggaaccgggtcgggaatggcgcccgtcggatggcccgactgaaggcctgcggaccgggtggttcgggcgaaggactccgatcctccccgctgtcgtagcgccccccacatcctagggtggtagcctcggcgcaccctttcgtcgaggtgggcccgacggtcacgtcgatggtgctcattgccgaggtggcccggggcgcacgcggtgttgcgcgtgcgcccggtgtagaccgaggcttcccgcatgaatcgggaagtcgcggcatgaggttccgaggggtatccttgccttcgggaggcagagctctcggcccgccggaccgcagcgccttccaggagattcttgagctctccttggattcgccgaccctcggtggttgatggctccggcattgcacggagaagcatcgctgctgcagccaggttctgaccgaccccgctggatgcgggtggcggcctgaccctgacgtcgttggcgacgcggtgctggagaccctggggcaggtgacgtatttttccggctgggggttggcccacccatgcctgtccgacgtcccgacggatcggctcaagcgctcctgctccctcgtcgagcctggcctgcgcctcgcggacttgctcgagttgtgggtcgtgaccccccgccggagcggggaccacagctagctcccgcgggatgtcggcgcgaggcaccggcctagggagatcaccgtccaccggcatgccgagatggttgcttcggaggatcccctagctcgatgtggaaacattcgcgacttgggccgcagccctcgtcgtcaaggctgcggctaccgtcggaacagtcggagaggctgtagtcacatgcggtcatgaagtcccgcatggcactggggttgccaagtccagagaaatcccaacagatgctgggatcgtcatcttcctcggacccagagggcccgtaggtcgagacgtccgtcaaccggtcccaaggcgaccgcatatgaaaccccggtggggttgcactcgcctcaatgagagcgcctgccaaagcaaggttgctaggcgggttgaggccgagtcgaaatgacgtaggatgggaatcggtcggtaccttttggtcgacgagcagcgacatagtcacgtcggggactgattgcaccgctgtctcaggtaggagggcgacgtcctgcaagctctccggagcacgctaggcgtcgtccacttgctcgggattggcgtgtcgcggggggacggctctcgccttcgtctcaaacgcgaagtcgacgcccgacgtgccccccgttgggcgcctggggacgtcgattcgctcgcaagtcgacgaagcgcggcctcccgcttggccttggttgccccggcctcctcctccgttggcgggggagaggacggggcgagctcgaatgtcgttcttccatcatgcggggaagatgtcgtcgattccgccgccggcggctggattgtcggccgccattgtcgtcgtcgcgcggcggtggaaggagtatcatatcgtagctgccgttgagggacatgaactccagactcccgaaacggagcaccgtcccgggttggagaggttgttggagactgcccatctggagcttgacgggaaactgctcgtcaacacgcatcgtgcgcctacctggccggcaactgtcggcgtttcgagacagttgggtccctaagccgacgagtgagtgtgctgcgtgccccagcccagatgggtcgagcgcgtgggcgagcgcgaaggggggaaagcgaggtggccggagacgggcgtgagagaggtggaaatcccgcggccttcgtgttcgtcccgcgcccaggtcgggtgcgcttgcagtagggggttacaagcgtccacgcgggtgagggaagcgagcggccccaagagagcgcctgtcccgtcctcgtccccgcgcggtcaaccttctctaagaaggccctggtccttccttttataggcgtaaggagaggatccaggtgtacaatggggatgtagcagagtgctacgtgtctagcggagggagagtagcgccctaagtacatgccaatgtggcagccggagagatcttggcaccctgctagtgtgatgtcgtggctgtcggaggagcggcggagcctggcggagggacagctgtcggagcggtcgagtccttgctgacgttgtcctgcttccgtaagagagctgagagcaatccgacatcatgggcgcacgcggggaaccatcattacctattaccggagtaaccttagatgggacaccggtcttgttccttcatagcctgaggcagctagctaggagtagggtaatgatgtatcccctgtagcgtagtcggtccaaggcccaggtcgggcgaggcggagacttctcctgaggccgaggctgggctcgggcgaggcggagaccaccttttgaggctgaggttgaggccgagccctggggtcgggcgaggcggagacctcctcccgaggccgaggcttaaggtcgggcgaggcggagacttctcctgaggccgagccctggggtcgggcgaggcggagaccaccttccgaggtcgaggttgaggccgagccctggggtcgggcgaggctgagaccaccttccgaggccgaggcgggggccaagccctgtgggtcaggcgaggcggagaccaccttccgaggtcgaggcgggggcgagtcctggggtcgggcgaggcggacttcctgttgcgcctgaggctgaactcagctgctgtcagcctcaacctggcgggtggcacagcagtcggagaggggcgagcggcgctgttttcctgtcaggtcagtcagcgggagggcgaagtgattgcgatcacttcgaccttgccgactgaggcacgcgtgtcaggataagatgccaggcgatccttgcattgaatgcgcctgcgatacggtcggttggtgaggcgatttggccaaggttgcttcactatgaagcctgcccgagctgggcttcgggcgagtcgagggtgcgcccgttgcttgaggaggccctcgggcgaggcgtgaattcgcttgggactactgttctcgcacgagactgggctcgggcgaggcgagattgcgtcccttgagtagacaaagccttgacctgaattgcgcccatcagtctctgcagcttgtgctgatggtgattaccagccgagtttaggagtgttaggggtacccctaattatggtaccgacaaaactacaaaaacaaacatcaacttcgttaagaccacaaaaaatccatcaaatggccagagtgcattcgactgcaagggtgactcgtgaaagagaagagatcgaggccaccgagcctgcaccaatttccgaagtcatgaaataatcaggtctagttgtgacagagggaactactgacgaaggtactcctgttgtcgaagctgaacagaccgttgctgaagaagaaaatattgaagaggatgaggaagattatggtattttaatcccaacaaaacccaaccatctagattttgagaaatnnnnnnnnnnnnnnnnnnacatgtccatgatgatgaagctagctactttggggaagctaacacccccccttgttcgatttgccagagaagagaccaaaca

SEQ ID NO: 36146 - DNA, 2203 bp, Arabidopsis thaliana landsberg
  unsure (1)..(2203): unsure at all n locations
attttgtgaacaataccatgtttgggtttgttctctcaattcttcatatctctattttggtcaatcttcttttgaaaattctgaattctggttttgcagaggaaattgatactgaaatatagccacaaatacaggctaggtctatggaaacctagagctgacgcaataaaggcgtgattggttcctgtactcatcgaatcataagttcctctcatactttgttatgctaatggaatgagttgttctcagaatgatctaggcatagcaatgttgcaaatcacttgaaacattgtaccaatttgcattcatgtacttgttttttccatggttataaacattaagcgactgttcacatcctggagcagtaacttttgaagtgttgaatgtatcggtcttgtgggaatccgtttgttcacaaaattttggaaatcaattgattatagtaaaatatatctttttccattggctacaaaaatttggtatgaccaaaagactctagtcggactgggtttaagataggtatttactaatttgctactgttaaaaaaaagagttaaaaagttcagtgtgagcttaaccatttgctaaatttatttttttgagtcttacgcccaaccgagagaccatctacaagtttttgggtatcaatattttgtactaccaacttatcaatatttcgaattagtttttgagatttttcgattctgatctatcacatatatgtacgtggtagtctaagaaaatatatgttgagtcttgtaatttgactcgagttcattctacaagcttgtattttcaaaaagacaaaaatcaagcagcttgtaatggttcgaataattaaataaatatcgaatttaagtttttatatgtactttattgggtttgaatgtaagtggtagtatagcaatgttcctattattctgaaaattaataatgtattttctttcaaatgaactcatgacaattggtctaaagtgtaaacataaaataaaatggaaggcaatcataaaacattaatatatatatttttatttactgtatataaaaagtatttttctgtcaaaaagaaggaaagtattttgtaaaatataggagaaattttataactttatatatatattttataaattatataactttttttttgcatggacaagtatttgatccatcttatataagactcaaaactcctcccaatcgaagttatcataagttttctcttctaatacctccaaacatgataaaatcattgttctacactttccttcaaacgaaacaccaagaagaaagcaacaactcaagagatcctaattatcctctatttcctcaagagatcgagattcgacccatagcttatttcccttgggaaatcatcaaaactctaacaaccgatgaaatcataagtaagttccaacttccaatggaaaaaatccgagataccatgcttagacatgcttcagaagaagacatatatcgcacaaaatttatgagttgtgagaccaatatattggtaaaagatctcgacacaaacactatccatcaaggtaaattgtggaagcatccatgcgaaaataattttgcattgcgtgaatcttggatcgaagaatttgtgaagaggaggaggcttgtggttggcatggtggttggtatgtattgggattatgaggcctgcatgttttgtttctctgtgttagatggaagacaatgaatctaaagattcaaattattatttaggtttggggggggggggggacctaaatngcccaattgatctggattagattctgtgaaccgattttgcctgcgtcagagtgagtcaaaattcatttctcagacagaactagaagatgacaacggccacataaagtttgtgatgtcttaatccatatggttaagtatgtgtgatgaagcatttagatttttggttttctttgttttttaactggtttgattttgctttgcagtgtctttaaagtcggacaattttgagggtttacgcttcgactttaccagggcgttgaatcagaagttttctctcagtcataggtatgtagcttgtatttatagttattgttgtaccatctatttatttgtggtcttcgctaagcatgtgtactgatggttaaacagtgtaatgatggggccaaccgaagttcctgctcagtcacctgaaactactatcaaaattccaacagcccattat

SEQ ID NO: 36147 - DNA, 3838 bp, Arabidopsis thaliana landsberg
atccaacaggttctcttaacaattggaactcatcagacgagaacgcctgttcgtggaacggtgtaacttgcaaagaactcagggtggtgtctctaagcattccaaggaagaatctttacggttctctcccttcgtctctagggtttctctccagtctccgtcacttgaatctccggagcaataggttttatgggtcgttgcctattcagcttttccaccttcagggactccaaagtctagtcctttacggcaattcctttgatgggtcattgtcggaagagatcggtaagcttaagcttcttcagaccttagatttgtcacagaatctcttcaacgggtcgttaccactttcgattctgcaatgcaacagacttaaaacactcgatgtcagcagaaacaacttgtctggtcctttgcctgatgggtttggctcagcgttcgtctctctggagaaactcgacctcgccttcaaccaattcaacggctccatccccagcgacattggaaacctctccaaccttcaaggaactgctgatttctctcataatcaattcaccggctcaatcccacctgcccttggagatcttcctgaaaaggtttacattgatctcactttcaacaatctctccggtcccattcctcaaaccggtgctcttatgaacagaggaccaacggcgtttatcggcaacactggtctatgcgggcctccattgaaggacctttgccaaggatatcaacttggcctcaatgcctcttacccttttatcccaagcaacaacccacctgaggattctgatagtactaactctgaaaccaaacagaaatcaagtggtttgagcaaaagcgccgtcattgccattgttctctgcgacgtgtttggtatctgccttgtgggtttgcttttcacttactgctactcaaagttctgcgcttgtaaccgcgagaaccagttcggagtcgagaaagaatccaagaaaagggcttctgagtgtctgtgtttccgtaaagacgaatccgaaacgccatctgaaaacgtggagcattgcgacattgttcccctcgacgctcaggttgcgtttaacctggaggagctgctaaaggcgtcagctttcgttctggggaagagcggaatcggcattgtctacaaagtggttctagagaacgggctcacactggccgtacggagattgggtgaaggagggtctcagagattcaaggagtttcagacagaagttgaagccatagggaaactaaaacatcctaacattgctagtcttcgagcttattattggtctgtcgatgaaaagcttctcatctacgactatgtttccaacggtaacctcgcaaccgccctccacggtgagtcactcttttctcatttcaagatgcattattcagttacatcatcgtaaatgtgtgtgtgtgtatgtgcaggaaagccggggatgatgaccatcgctccgttgacatggtctgaacggttgaggataatgaaagggattgctacagggcttgtttatctgcatgagtttagtcccaagaaatacgtccatggagatctcaagccaagcaacattctcattggacaggacatggaacctaagatctcagattttggactagcacggttagctaacatcgctggaggatcttctccgaccatacagtctaacagaatcatccaaacggatcaacagccgcaagagaggcaacaacaccatcacaagagcgtatcttcggagttcactgctcactcttcttctggatcctactatcaagcacctgagactctcaagatggtaaaaccttcacagaagtgggatgtttactcttatgggatcattttactggaattgatagcgggtaggtctcccgcagtggaggtggggacatcggaaatggatctagtgcggtgggtacaggtatgcattgaggagaagaaaccattgtgtgatgttcttgatccttgtttggctcctgaggcagagacggaagacgagattgttgctgttcttaagattgcaatcagttgcgtgaatagcagtccagagaaaaggcctaccatgaggcacgtttctgatacgctcgacagattacccgtggccggcgattgagacatctagagattgcacataaagcttgttttgaaatttgaagctgcaatgtattttgaagcataagcctgatgacactaatgtggttaccgtttgttttgttttattttgttcttttatttgtcccagtcttgttggtggttggttattaagatgtccctctcttcataatcgtatttatagcttaaagcttccattacatcagatattgaacaatagaaccacaagtgagctaatttggatcttagataaacagtgaacgccccagaagaagcttggacttaaaagcttaaaagggaagaagagcatcgtttcttcttgcgattcgcatccgatccacgctttcgacaaactccctacaggtttcagacaaattacaaagtggtttacttaaaatgcttagtttttgtatagagaaaatgtaagagcttacttccatggaacatccccaacattcctccaaatgccttctctgtctctgtagaccaaagagaactcagactcagtctggaacaacctcaatcccgacacggtctgcatccctgcagattcgaattaatgtggcaaaaccttctgaaacatacttgtagctggaagcttgggggtcagaacgcggcttaccaaacatatcattgagctgaagagcaagagttgcgtaagctccttgatcaacaaggcaaaccttgcgccctaccactaggccatccagatttacctttacgtaagcatattttcctctgctctctccttcattattgtaatatccttgggcaagtctttggtgtccagtgtcctcactcttcaactgtgtaatgctgttatagctgggctgcgaccagtctatgagctctccatacccgtcgagacctatcactttgattcacatatagatattgaaggtagcaagttgaggattaagaaaactaactaatgatgaggtgaaagcacggctattcagcaaaaaaaaaaaaactcacttcgcgccggtgggaggtaagtttcatgttgtatggtcctaaggctgaggcctagatcgattaccccaccaccctttttggtctgtgagtaatatgtatgaaacttggaagaaccttggaagaagtctgcaggtgtgtttgggtccattgatgcttttttatttctaaagatgcagagaagggaaagtgagatgagaaaaagagagctcacttctaaagatttatagtatgagctgatgctaaaagagtgtcagaagagttaaaggaaaaaagacagaattgcagacatgaaagagacataagacaagaaaaacccattaagatccagttggtttgaagcaagggatggggagctgaccacagagagagatttggttcagatcttgtaatccaaccaggtctgccaatgcttctgatgcacaaagtcacatctcaactctgtgaacactgcagaaatattatctgggactattgacaactcgattcaaagtgaggctctgtgttgcttatgagagaatagtgtagtacaagagtaaaatatctttgagtcatgtatagagagagagataaaaaggactgggtttggtgtttaggtaaagatacaaatgcctatctctttcaaaagagatagttgtgttgataaatggcaagacagatcgattttgtcactacccttttcccccacaccttgtctcttagaagatgaaggaaaagtgtgtacttttgcaagaccacacacatgtttta

SEQ ID NO: 36148 - DNA, 3162 bp, Arabidopsis thaliana landsberg
agtttggtaagtcaacgtgcaattcataggaattcatcatcggattgatttggtaatcgcattcttgtgatattttttcggggaattgtgttttggctcgataacgatgaatggtgtctatagattcattgttgaagatatctgcaagatttttggagcaaaggcataaaagcattacttgcttgattttttttttttagtttgttttatattctaatttgatggtgtgaagacgattaactctgaaaagcgaatgaactgttgggtttctggtttatagcaaacgatgggtaaagcgcggaaacactctagagggagaccatcaggctttgttcctgattacatgcaagctgttgagcctgatgaatttgtttactcagagaggatgaattctgaggcgtctcctccactgaaaaggagacgttttggtttgaatggagataacaatggcgtttctaaagaggttttgtctctgtcaaagatgtcgaggtctgagagaaagaatttagttcacaagttgaagatggagcttcaacaggtcagggaccttagtaagaagattgcatctttcagttcagacactgttctgttgtcgccatacaatgatcatagctgcagtgatgggcctaggaggccgccaccagaaaactttgctacatttgttgggtcacagggcaaaaagcgccctcctgtgcgcagtgataagcagcggaataagaaaggtccatctcgattaaatgtcccaacaagttatactgttgcttcagtgatgaaggagtgtgagacgttactcaatcgtttatggtcacataagtcggggtggccatttcgtactccagttgatccagtgatgttgaatattccagactattttaatgtgattaaacatccaatggatcttggaacgatacgaagcaggctgtgtaaaggtgaatactctagtcctttggactttgcagcagatgtgcgtcttacattttcaaattctatagcttacaatccaccaggaaatcagttccatactatggctcagggtatcagtaaatattttgaatcgggatggaaaagtatagagaaaaaaatacctatgtctaaaccaccagttattcccctaaccagttctgcttctctggagtctgaaatccctttcgaagtagcaccgatgagaaagaaggaagctgcaatgaacgataacaagctgagggtggaacctgctaagttggtcatgacagatggtgagaagaaaaaattagaccaagatctgatggcattagaagaagatttccacaaaagattgctgttctcatgagtatatcattctttcctgttattaaaggtactctcgaaaacaacatttgatatacgtgacagagatcttcaacttgcttgattgggaaaagaaaaaacgactcttcaagctcgcttacattatcctcactctctttctcaccattttctggtaactagacctttcactgtctttactcaatcctaaactcgtaccaaaacattgaaaacttatgttgcaacttcgttacaggttaatctattcaacacttgatgattacgaggactgaatcacgcttgaagatacacccctgtgacaggcgacaacaaacggtttgatcaaacccctctcttagtacttgacaccgcgcttgatacaatggcatgagaaggaaggcttttaggttatgtaagttaattaatgtggcattagagagctgtgtaaaccagattttatagtcattagaatttcattgtggatctttgtggtgaagccaagcagtgaattgttaaccatgattggaaccctctaactaagtcagaaggttttacttttttattttagctgcaaaattatttattagtatataaataaattggtaacttctccaaattgtggtgaagaagccagaaggatttatctttatcatcgtggtgagttctttctctagattttttatcctcctccgaatcgaaattctgtatgatattgaagatcgtcgttgaattctgagtctcttaactttgatttctacttaaaaccctaaataatgttttgacgactggaaaagaaaaccaaatcatctctcgatcacgcttttgtttttttgttttcttctgaatttcgtgtggaatctgtggacgtaaacgcggaacaaacatagatttgttggtgatgtaaattgcaaagattgttactcagtaatgaatcttcttcgcatatgttatattgtttcgtaagaggattaagatgacaatagcattagggtttatataatagagtaaaaacaacattaagcacaatgttaactagtaatgtaaattgttgttaatttgagctacgattagtgtcaataaacatcaataaacatagttaccgagctttgactgaattttgagaatttttgagtgttgttgtttactgcagttttagtcatgttcttgaatacactctggtttcagtttcttctctgcttcaatggttaaactccattgttagttttgatctacgatcagtttttcgattaaagcacaagtaaaccgagcttttgatttgagtccaatggctgaagactctctttatgatgttaaaaaaacgatgttgtttacagttttggtgattcaagatttctaatgttttttgaatgtgttattgtttcaggttctttgctttaagattcaatggttaactcaatcaaaggagtcttcatctcatggtacattacataacctttcttgttaatatactctgtcgagaaatcgtatcttttatctttgttttttttgttcttatagtgatgttccaatggcacagttcattgcacatttgaacaattcgttgcctgcttcacagaagttcataattcaagtactgaaactggacactactagtatgtttgtgaagccatatgctgaagagatgatccgtgatgccgtcatcaagttcagggacgaaaactcttacgcaaaggcgaattgatcgggtttttttcttctcggtttcggttactagatgtcgattttggatcttaatgtagtgtggagatcaacaaggatttgtgggaaatctctgatggaaaatatacatgaatgttaattattaatgtacaacgaatctgaaaaaccgaattggtttgtttttcaacgcacaaaact

SEQ ID NO: 36149 - DNA, 6437 bp, Arabidopsis thaliana landsberg
aactaaaatgagttatggtttagttttagtcatatgagactcatctagtcgataaaacatcaattttgtttttgttctaaacgacttcaaagttcaattttgaaatattcaacaaatgcggtatttttccttaagaaatttttgataaagactagtaacgtagtatatacgtttatacgggtcaaaattagcataatatgatgactcaatttcacctttttgtaattaatttttgtgtttgaggaaaagtctaataaataggaataaatctgtgtgatgttcaaagtttttcagttgcttggtctacgtgcgggctgctttgtgtttttttccaacttctctttttctcaaatctctttccacacatgaatttccatgaaattcatcttcttccccgataatttccacatcttctcgaggaacatcgcagaggacagtaaagaagcaaaccaagaagaccaagtggaggaggacgatgactatggtgacgcgtgtgatcatgacggatgatgattctcagtcactttgctttctttgtttcttactcttctttttcatcactggtaatttcttctcttcttctgttgtttgaatttgagtttcgttgagagtttttgggaattgtaatgtcttctcttcttgagtatgagttttgggtttctgtttctttcacgtttacttcaaatgggttcagggttttaaaatttgacgtgattttttgggggtttcattgctttcatcaattcaaggttttacattgtacgtaaatgaatcgcaaagttttaatttttactctgtttgatgtcgttgatgagtattttagctgagttttttgatgtttttcttctatggcagctatagcagtggctggagattctctggacagtgatagagaagtcttgttaagcctaaaatcgtaccttgaatcacggaacccacagaaccgaggactatacacggaatggaaaatggagaaccaagatgttgtgtgtcaatggcctggaatcatatgtacacctcagagaagtagagttacagggatcaatctaactgattccaccatttcaggtcctctattcaagaacttctccgctttaacggagctcacatatctcgatttatcaaggaatacgatcgaaggggagattccagatgacttgagccgttgtcacaacttaaagcatctgaatctttctcataatatccttgaaggagagctaagtttacccgggttgtcaaatcttgaggttcttgatctttcgttgaataggattacgggtgatattcagtctagcttcccattgttctgcaacagtttggttgttgcaaatctgtcgaccaacaactttactggaagaatcgatgacatcttcaacgggtgtaggaatctcaagtatgttgacttcagttccaatagattcagtggagaagtgtggactggttttgggaggctggtcgagttttcagttgctgataatcatctctccgggaatatctctgcttcaatgttcagggggaactgtactttgcaaatgttggatttgtctgggaacgcttttggtggggaatttccaggccaagtttcgaattgccagaatctaaatgtactgaatctttggggaaacaagttcacagggaacattccagctgagattggttccatatcctctctcaaaggtttgtacttggggaataatacattttctcgagacataccggaaactctcctgaacttgaccaacttggtgtttctggatttgagcagaaacaaatttggaggagacattcaagaaatctttgggagattcacgcaagtaaagtatctagtcttgcatgcaaactcatacgtaggaggcatcaattcttccaacatcctcaagttacccaatctttcaaggctagatttgggctacaacaatttctcgggacagttacctactgaaatttctcagatacagagtttgaagttcttgattcttgcttataataacttcagtggcgatataccacaggagtatgggaacatgccggggcttcaagcacttgatctctcctttaacaagctgaccggttcgataccagcttcatttgggaaattgacctctcttttgtggctaatgcttgcaaacaactctctatcaggagaaatccctcgagagattggcaactgcacaagccttttgtggtttaacgtggcaaacaaccagctctctggtagattccatcctgaattgactagaatggggagtaatccttctccaacatttgaagtgaataggcaaaacaaagacaagataattgctggttctggtgaatgcttggcgatgaagagatggattccagcggagttccctccgttcaactttgtatacgcaattctaaccaaaaagagttgcagaagcctatgggaccatgttctcaaagggtacggtctctttcctgtctgttctgctggttccacggtacgcacgcttaaaatttcagcctatcttcagctcagtggaaataagttttcaggtgagattcctgcaagcatctctcagatggacaggctgagcacactacatttgggtttcaatgagtttgaggggaaactgcctccagagataggacaattgcctcttgcattcctcaaccttactcgaaacaatttctcgggcgagattcctcaagaaatcggaaatctgaagtgcctgcagaatcttgatctgtctttcaacaatttctctggaaactttccaacgagtttgaatgacttgaatgagctgagtaagttcaacatctcatataaccctttcatttctggcgcgataccaacaacaggacaagtagcaacctttgacaaagactcctttcttggaaatccgctgctgcggtttcctagtttcttcaaccaatcagggaacaacacgaggaagatttccaaccaagtcctaggaaacaggccaagaactcttcttttgatttggatttccttggctcttgcattggcgtttattgcatgtttagtggtatcaggtattgtacttatggttgttaaggcttcaagggaagcagaaatcgatctcttagatgggtcgaaaaccagacatgacatgacttccagttcaggtggatcatcgccatggctatcaggaaaaatcaaggtcattcgcttagacaaatcaactttcacatacgctgacattctgaaagcaaccagtaacttctctgaggagagagtggtaggtaggggaggctatggaactgtttacagaggcgtattgcctgatggaagagaagttgcagtcaagaagcttcagagggaaggcacagaagcagagaaagagttcagagctgaaatggaagttctaagtgccaacgcatttggagattgggcacatccgaacctcgtgaggctatatggatggtgcctagatgggtcagagaaaatcttggtgcacgaatacatgggaggcgggagcttagaggagctcatcacagacaaaacaaaacttcaatggaagaaacgtattgatatagccacagatgtagcaaggggattagtgtttttacaccacgaatgctacccttccatcgttcacagagacgtcaaagccagtaacgttcttttggataaacacgggaatgcgagagtgacggattttggactagcaagactcttaaatgtaggagatagccatgtgagcacagtgattgcaggcacaatcgggtatgtagctcccgagtatggacaaacttggcaagccaccacaagaggagatgtttacagctacggagtattgaccatggaactcgcgacgggtagaagagctgttgatggaggagaagagtgtttggtcgaatgggcaagacgtgtaatgacaggtaacatgacagcgaaaggttcaccaataaccctgtcagggaccaaaccagggaacggagctgagcaaatgactgagctactaaagattggtgtgaagtgtacagctgatcatcctcaggcaagaccaaacatgaaagaagttctagctatgttggttaagatatccggtaaagcagagctcttcaatggcttatcttcacaaggttacatagaaatgtaaaaatctttctttcttttcttctttcagatttattatacagaacaacagagttttcttcttcaccatttttcgtttcattgtttctgattcttcttgtacacagaacctcattgttatcagacagatagggatagagaaaggtagttttgttcgcaatgtacagagacacaatctgaaaataaagatcttctcttcttcttgtctatattgagtgtaaacaacgttggctctatctcgtgtttcttacaagtcaggaaacatacaggaagaaagaaacagtacaatgagtcaggttgcaatctctctgatcagccagtttaagctcgggaaggcaaaataaaggacgagaaacgacgggacagccaaagcaaacgtaacaaagaaataaaccccgagaactgcagcactcacagggattgcatataaagccatcaacaggaatatgactaccagaggaaacttagccaacaaatgagcaacaagagccattgacttacgtaccgagtcatggagcctcccagttctgaagaatcctctggtcacaccattccaccagctgcgattgtccagcaacccttcatcacccaaggcggtattactcactccatcacacctatttctcaagtctctctgccctgaagcaacccttttgttgtcgctgggtgcctccgatctggagccattcatgctttctaccatccacagaaggtaaaagttcttggaaggaaatctgatggttccattgcaaaccagccttaaagagagaatattgcaccaagggcaagcaacgaagaagggaagctggaatggtaaagcagaggatttgatgacaatggcacgttgaagccctaagagacagtacttgcagattgtatgaccacaccataagacataaggtacattctcaacaacgttgaatgattcccagcaaatgggacactccaatttttcttcctttgttgtctttcttccatctcctgatctatctaaagtagctcttcttggttttgtagcagcttcttctcccttcgatataaaaccttctctgatcgattttgaagctaaattccacatagcaatggagggatccacaaagataatcactttgaatctttctctctgcaacaagaaaatcacacacacatacactacataatcagatatgagatttacaatccaacccccaaagattggaccgagaacatacaaaaagtaacgaacttgatgaaacccaagaaatcattaacagaattacagaaaacgaaatacacttacaagagtttatccggtcatgaagatgaagatcattgcaaaaacaaaaaatgcaacagctacgtcgttgagttatataatatcgccgaagctctgatgtaaccagcgagaagaaaaccggctgaaaaagagacacgcgtcgtaaaacatggtgactctgaaacgcctttcaatgtttccgccgcccccaccgatttcctcaccttatccgtttctgttttcaggtttaactaccaaaacgcatcgtttcactataccgccaaaattaaactaccggtttagttccgtaattttctattaccgaaatcggttaaagtaaaatagtagttgtcggtgagagtgagctgtacgcgtttcttcttctccttgtgcgctttctggatcgaacgaagcattttcctccgacaatatatttttaagtaatgacaatgtttccgcattattgggtttaattccatttttaaattagggttcttcagatcgacaaatctttctctttctctttccccgatcggaatcatgctaaagatctgaactttttctcagatccgtgaataagtaagtacagagagagagaaacatactcagactgatctgaggaaaacaaagttgatggtcgcaaacctgtaagtgaaatctatagagagagagagacgttggaggagaaaatgggtcaagatggttcgccggcgcataaaagaccttccggaagcggcggaggacttccgacgacgacgttaaccaacggtggaggaagaggtggtcgtggtggtttgttacctcgaggtagacagatgcagaagacgtttaacaacatcaagatcacaattctctgtggtttcgtcacaattctcgtcttacgtggcactatcggtgttggtaacctaggaagctcaagcgccgatgcagttaaccagaacatcattgaggagactaaccggattctagctgagatccgatctgattcggatccaaccgacttggatgagcctcaggaaggtgatatgaatcccaatgcgacgtatgttctaggtcctaagatcacggattgggatagtcaacgtaaggtatggttga

SEQ ID NO: 36150 - DNA, 2266 bp, Arabidopsis thaliana landsberg
catggctcatttggataaggaactcgctggctattgggcaaaattaccaatgattaggaggttgatgttgtctcatccagaagttgagtggatctggtggatggatagtgatgctttgttcactgatatactgtttcagatccctttggctaggtatcagaagcataatctagtgattcatggttatccggacttgttgttcgatcagaagtcgtggattgctttgaacacaggtagttttctgctgaggaattgtcagtggtcgttggatttgttagatgcttgggcgcctatgggacctaaagggccaattcgtgatgaggccgggaaggtattgacggcttatctgaaaggtagaccagcttttgaggcagatgatcagtcagcattgatctatctcctgctttctcagaaagatacatggatggagaaagtgtttgtggagaatcaatactatttgcacgggttttgggaaggtttggttgataggtatgaggagatgatagagaagtatcacccgggattgggtgatgagagatggccatttgtgacccatttcgttgggtgtaaaccgtgtggtagctatgctgattatgcagtccagaggtgcttgaagagtatggagagggcctttaattttgcagacaatcaagtgctcaagctgtatggttttagccataggggattgttgagccccaagattaagaggatcagaaatgagacagtcactcctttggagtttgtagacaagtttgatattcgcagaacgccagtggaaaccaaaccacagaactagaggaacacaaggagaggataggctcagctctcatgagattgtggacacgtataggtaaattatatgacactcacaaatgcaaagcaaatttgtttgcctgtacttgctactttactgtttcttctgcttctcttttttttgtttgttgttgttgcaagaatattttagatgcaaattctttttccatagatgtttttgtgttttcttcagtcaaatatatggagaaatttcatactttgttattgctcgtgactgctatattcaagtttcagacacttgaactcgttggcaaactaacgtcggaagaaatgtttagagaatccataatattagactgtggaataaggatgcctgttacattgaacgatacaagacagatcatttaacatactaatttccttcttcgtagctacaaatcgctcacgagttagtatagactaagttccttaatattacatgcatctacaagatgggaatgaccagaagtgctcaccgactgaccaggaatagacagattaatgattcatcctcagctagatcacttcttcaggaggatcaccaactttttgactgctagacgtatccctgccatttgctgataactgtaaggctcgagtgagaagaatgcatcaaccagagtaccgggaagtaatgctgactcaagcttttccaagttatcgctactgacatcgagcttttgattggttcccaaaggttcttctttttgatatacctgcgttccacacagggtatcatctccgttggattctgagcttatactgtcaaccagataagaatgggatcagaggttagggactctcaatggattcattatcatatgtaaaagatttaagagagagttgaatacttactgcagtctggctgtgggatagttggcaaagccttctttccttataacagtgggtctccaatctgagtttgtgcttgagtcagttggtaagttgtgcgcagcagcatcaactgcgtccaagatcttgcatagatcaagaggggcgtcaacaataatattcaactttggacgacctgcatgatccacaaacttccggcttattccgaaccgaactttcaagctatgccaacacagatgcagaggggtgtcgttgtgaaatagcttcattctcaagctcccacgataaaacgggacaagacttgccctgatgctagaaacagatacttcattaacacccaaaaatgattcatctttggcatcggaatcgggtgatggaggtgattcatcctgctgtcttacagttttcgcttcttctgcagcatccgtctgaagagttccaatacgtagtttacctattaaagtggttatatcaattggatcttctatatcataacttgatgcatcactttctgagcattccgtaagaagagaaacgatgggatggtttttgacgattgtggcgtccacggaagaggaactcggatcagttttaggactcg

SEQ ID NO: 36151 - DNA, 1788 bp, Arabidopsis thaliana landsberg
atgccaaaactcagagccttgaccacttgcacttccaccctgtaatgatttacacaaaagagaagcttgatattaccatttcaggcaaaaaaaagtacaagaatatttatgaccaatacggtggtaccgaaatcatctccactacagctgctggagctcgaagctccgattttggttcagttcttatcatttcggtttactgttgactttggtctttagcaggttcaaatcgaattaaatttcggttaagttccacgcaattcaagggaattttgcagcttcaaaaataagagaaacggtcacaaaacgagcaaaaattcaaaattagaaaatacgcagctcacgagtatcgtgatattaacaacaacccaattacatcattacacgtgtcgttatatacagatgggtactttcgtttataaatacacatcaaacgccttactaaaaacctagaaatagaaaaatcagatctagattcagtttttttcatcaaaaaagagcgtcttcataaacgcccttcgtcttcttccctggaaatctagtttctttcttccacgaaaatgagagagtgcatttcgatccacattggtcaggctggtatccaggtcggaaatgcttgctgggagctgtactgtcttgaacatggcattcaggttcgtatctagatctgtgcttcttctatatttttcgtaattttataattcagatctgagataatttggccatgcattgaccttgttctccggatttctgatgaattcgtatatatttagtacgtaattgtttagatctgtgtttgattccgatgtcttacaatttttttatgtggtttatgtaagatccgtttctcattttagaaatatttttgacatacctgtttagatctgagtttgacatagatttcttgttggttgattcaagatctgttcgttgaacaaaaaaaatattctaggtttgtttagaagatgcaaatcgatctatttcccatatacttaagcttctatatgcttagtgcatactgtatgagtttgtattgatatgttttggatctggaatgttacagcctgatggccagatgccgagtgacaagactgttggtggaggtgacgatgctttcaacaccttcttcagtgaaaccggtgcaggtaagcacgtcccacgtgctgtctttgttgatcttgagccaactgtgatcgacgaggtcaggactggtacttaccgtcagcttttccaccctgaacaactcatcagcggtaaagaagatgcagctaacaatttcgcccgtggtcattacaccattgggaaagagattgttgacctgtgcttagaccgtatcagaaagcttgctgataactgtactggtctccaaggattcctcgtcttcaacgctgttggtggagggactggatctggtcttggatctctcctccttgagagactttctgttgactacgggaaaaagtccaagttgggtttcacagtttacccatctccacaggtctctacctccgttgttgagccttacaacagtgtcctctccactcactctctcttggaacacactgatgtctccatcctcctcgacaatgaagctatctatgacatctgcagacgctccctaagcattgagagaccaacctacaccaacctcaaccgcctcgtctctcaggtattgtagccagcctcaaccagtctttttgctgttacattttcttgggctcatctaatgattattcctattttgttttcaggttatttcttccttactgcttctctgaggtttgatgg

SEQ ID NO: 36152 - DNA, 6783 bp, Arabidopsis thaliana landsberg
tgttttttaatagaaagaccactcgtaaaatgaaaaataaattaagaatatgtagatatattttttgtaatactctctcaaacaatttttattgattagaatctgaaaatggaaatttggcatggagatttttcatttggtaaaatatataacagaaatttggaatggaatttttatatagataactaatagtaatacgtgacaacttgtttttaaaaagattcaccagataaaacccaacatttggaagcaaccttgaacaaatcatgttgtttgataaagtcaacatgactaaacaatgatgcgtctcgcgttagaaaaataagaactaagaagcaatgaggcaaacaaataatttgccaaaaccttattacgagttctcacttcaaatcaatgtaccagaagttttttattttatttaaccacacatgcatgtagagataatttagctcactacgtacgtcttttgattcttgttgaagtgcaaagaccgtagctcaactgcgtcaagctctctggcaaaattgtctggtctatagtatccggtctgaggatcaggcatccaccataactcttctcctctcatcattttaccttgaacttgagaggtttttgcaatgtatggatctaactcttttgcagcggtctcgggtctaaagtatccggtatcagggtctgatgcccacgatggcttctcttgactacttccaattgtatatgccctttgagaggcttttgtgatcacaatgtatcttctcctagaataatatttatataaaaaaaaagaattctcatttagtttacaacgcaacatattcaaaagaattaaccaatatacagtattttctaaaaccataaggtttatacaaatggatagacttacattctgattgtgttgttgatcgagcgagataaacttttgagattgaaaagtgattgagacattaatcctctcaaatttcctatgaagaagattaagtgtaagaggatttttgtatagactattttatgaacgcgcgagttggtttatgtacgtttggaagatatggctttatatataggttatatagggaatttgttaatcataacaattttgttgttgttggaataaactaatactttgactttgtaatgttgatcagactttggaacaaaataaaaaattaaagtattggtaggttctgtaaaaaaaaaaaaaaaaattatagtgtaaagagaagtagtagtcccttgctcgacctgaagtcagattaaatcatcgaaaaatatacaaccaggacaatgacctaatcatgcttcaatttttaaagagttttaagcgtacgtgctaatttttaaatcaaatttattgatttaataacggtgaactaactaaacataaaacaatttttgaattggtctatacatattatgtgaaaaggtctgagacgatcaagattcaatggtttctctgaacggtcaaattatttgaagggtcaatcgagataatggcttttcttcgaataatataatttagcatcatttttgttggctcaactagaagtgtagcaaaaaagaattttgacttaatcaagcttagcttaactacctttgttccctacaattggtcaagtaaattgtttttttctccacttgccgggtgccggttagtggttacacgagcaagtttggtttcgactacggttcttaaaacgtagtcggattttattttttctctaattcggtttcatatcggatttttagatagagttttggtttggttaaccatatcgaattggtgttgattggaaagaccaaaccgaataaagggtctttcgagtggacccgagacaagagaaaaagagactctctaaattagcaaaacacctttgttttctcatgaaattacaccatttgccactgaactacaccggtaaaccaacaagtccggcgacagtgacggcatttggattttcaatttccctcccccaaaaaatatttagcagtttcgtctttcgtgaatttcccaatgttgcacgagcttcttctagctctcttaggcttcaccggcgatctcatcgtcgacgagcgtgagcaacggaaaaccctaggcctcgctttcaactccgattcacctctttctgatgaatgtacattcaaactcgctcctgacatctccttcatcgaacccagcgaaaggtttagtctctgctcgcgctgatctggtaaatttggccgctgattttgatttctagtgactctgatgcgcttccttgcagggacttgatcgaaaggttgatcaagttagggttctactatcgagaactcgaccggtttgcgaagaagtctcgcaatttgagctggattaggtctgtgaccagtgtgcatccgttggaacgggctgatgaattgtcgaagcagagtagagagaagaagcctagcgtgtaccgtagagccattgctaatggaattggggagattctttcggtctatagatctgcggttcttcacattgaacagaagctattggcggagactacgcctattctggctacggttacagaggggctcaataaggtacatgttctagtacaataccaacacatttatcacttgatgattgagattagcatttgccaaatgaatttgtgtttattgatagtccaatgccattttctgtctagtttttcgttcttttcccgcccctgtatgaggtaattcttgagattgagcgtgatgatattcgtggagggcagcttcttaatgtattgaataaaagatgtcattgtggtgtgcctgaattgaggacttgtctccaaaggtattcactagctttgttcctcagtggctttattttcagtaaactgagatcatttagtccagcgtcaccacttgtcaaagtttttgtatcctgcttgttcccttatccacgtgcaggcttctttggaatggacatcaggtcatgtataatcagcttgcagcttggatggtctatggcattcttcaggatcctcatggagaatttttcatcaagaggtaaattgtaaatctacatcgttttgtcaattttatcttgatatttgctgagtgccatctcgtttttcttaatgtcgtcattagtggtcctcattatgtatttattctgcttaggtatctgctgtatacttgcattgatacattatggcctgccgtcgtctgcagatgcactttgatttctgtttatcttctccaaagaatgttcaactcatttctggtttgcttgtaggcaggacgatggtgatttagatcatcgctcatctcaggaagaagtatctgaaaagttggctcgtacctcagttcatgagacatctttaactgattggcactctggatttcacatttctttggtattctccatgccacttacacttttgatttaggtactgttactatattattgatttttctgtgcttatattgcaggatatgttacctgattatattcctatgcgccttggtgaatcaattctttttgcggggaaagccataagggttttgcgaaatcccagtcctgctttccagttccagaaggacaagagttttcagcaaacaatgcgtggctcccagagaattcgaggatttatgcatagtgatttccctgaaacagaaactgagttagatgcagatcttacagggggagagttgcttccacaatctgaggcagataagattgaagctatgctcaaagatttaaaggtactttctcactggacagtatatctttggtaaaaagtataacaatctaaataactgagttgattttcggttatgcagcacgcgatcctactgctcatgcatagagatcatgcgtagagatagtatatgcctttctcctaggatcacattagagctcagattgtacacttagatttatacgtttgtgtgcaggaatcatctgagtttcacaagagatcatttgagtgcactgttgattctgttcgagcaatagcagccagtcatctttggcaggttttcacttgacaacattttaaacttcaatcttctggatttatttttttgggtcacattaccttcctttcttcagcttgtcgttgtgcgtgctgatctcaatggtcatcttaaagctctgaaagattatttcctcttagaaaaaggagatttctttcaggtaaaccacataatctatctgttgatgctcttaaatgaaaattaagggtgattaatgtcgctcccacttgttcatgtcctcctcttcttgcactagcctcagttaaagacctgtggacatttaatttctcatctcatagactttctgatttcagtgctttctggaggagagtcgtcagttgatgcgtttgccacctcgccagtcaactggagaatctgatcttatggtaccgtttcagttggtatgtggttacaacttaaacaatttcatgataaaagttctgttcaggtcaaattgtttttgtaatgttctttcttttggaacacacaggctgcaacaaaaaccattgcggaggaagataagtatttctctagggtatccctacggttagtaacacatcaaattcttcttaacgactttgtattaatggatttagtgtcgagcctttgagctaagtgggacgcacatattaataactatttctcccaactgttccttaatttggctatttaactgctattctcaccaggatgccttcatttggagtcacagtcagatcttctcaagctgacatggtgagatctaaagtatctctcaccgggaaggcaaatcttacatcagacacctctgtggatggctgggacgctattgctctggagtattctgttgattggcccatgcaactgtttttcactcaagaagtgctttctaagtaataatccttaggcactgcttatatccttcttttcttctaatttttctcactttcaaagtttttgcatcgattatactatgaaatttttagtcggctgtctgctggaacttgaaatatgtgatgctttctctgagagctataaacttgtgttaggtatctcaaggtgttccaatatttgatacggctaaagagaactcagatggaattggagaaatcatgggcttctgtaatgcatcaagatcatatagaatctgctcaacatcgaaaagatggtttaaacggatcaacatctcaacaaagacgacaaggaatacgacccatgtggcgtgttagagagcacatggcgtttttaataaggaatcttcagtcttacattcaggtaaagacgacgtttcctaagaatttcaaagttggttataagccagtttgtaaaacaaaaaacttctcatgttttgattctctctttgtcttaaggttgacgtgatagaatctcaatggaaggtgttgcaaactcacatccacgattctcaagatttcactgaactcgttggcttccatcaagagtaagtatatccaatgctcgttgttctctttcaagagtcttcatgctacttacttggcctggcatttattcttctgtgtttggttctcgtttcgatttttattattttgtgaagcaagtctgaacctaaatctttttcagtaatttttccctctacttacctactgtactatacaaatgcaggtacctctccgctcttatctctcaatctttcctcgacattggttccgtctcaaggatacttgatagcatcatgaaactatgtctccagttctgctggaacattgagaatcaagaaagcaacccaaacacttcagaacttgaaaacatagctgaggtgcgttatcttttcactgtaatactcatacaaaggtaacaatggtctctcataattttttatcttgcggtttaaggaattcaacaagaagtcaaattccttgtacaccatactgagaagcagcaaactcgccgggagccagcgagccccgttcttgagacgttttcttttacgtctaaacttcaattccttttacgaggtaaggatttcaatcagaagatttaagtttttctcaatgggagcttctcactgtctctctttcctggtagcaggcaactgcaaggggcgtgttaaacgttgtccgacaacgcccagcgcttccattgtaaaatgccagacagtcctggtggaagaatctcgttccgaagctttttcagacatgagctgatccgaaggtttaatgcaacaactatgacacgagaagatagcatttgtctgatcctcaaaccaggatgacatgacgccaccaatggaatatacataaatatatgtggacagagttcgtgctcacacgcctttcctttgtaagaatctgtgtactgtgctccggctttcacaagaatctgtttagtgctgtgtttaattcgtgctttatagatgtaatactctgtaaattatgtagatgtggtttctttaatcatttttaacaatatgataagcttgatgacgtgatttgcaaaaatttctataatcaagagtcttcagttagtgatttatgaacagtgaacactgaacagtgatgaatattttcttcttcagtaaaagaataacgtatgactgtagcataacacaaaaccgacaatgataaaagttacaggtagacattgacaaaaaagaattaaaaaattagaggtagactaaattaagaagattatcaaataacctctctaaacttgggaaaatcaggagttcttattcactcaaacacagttgtgtcatccaaaataaataaaaggaacaagacaacagtttaaccaacactacaaacagataatgtaaattcttcaaaatgtcttaggcca

SEQ ID NO: 36153 - DNA, 4141 bp, Arabidopsis thaliana landsberg
caacgatgaaatgggcaacattgcttagggacatcaaggagaaggttggattagctcaatcctctgactccgacccctttcccgttggcctaactgctccgccctgttcttcttcttcttcctcttctccttcttttacttacccctgctcttcttctcttcatcacttcaacttctctccttcaaggtaatttcttcttcttttctcttctgcttttgcttcatcttgttccgatgttgcgcatcgttgctgctagttatagctttgcttttttatgtttgtttggggaccagagtttagattgctttattagtgatcgacaccaaccaagtttcttttagattgctttattgcaacatttgtggtgctacgttttttgtgataagattgataaatgagagtcaaaggctgctgctaactcaattgaaacaaaaatatagtctttgaagctgcaacacttttcaattggattctctaattttgttgactgatcgctcttgttgttgttgtaaaactattgttgatcctctctttactcctctccaaagcagagataaccatgagttggagctggacttcaagagattatgggaagagtttcgttcatctagttctgaaaaggtacttactttgataatccatactcttgcacatgcgttagtgaacgccttacctttattcttggaacaatatctcttcttgtattttctacactggatgggcttacaaaaggctagaaatttattagtgctaatcgttcatatgtcatgcaggagaaggaggccgccttgaatttgaccgtcgatatattttgtagattagtgaagcggcacgctaatgtagatcagttagttactatgtaagctattcctaactcgttttccctttttggttggatatacattgaattggcgtttgttgtcacatgatttgaatttttatggtggaaaatgcgtttctcaacctgtatgttctcccctgtctagctagtcttcttccatacctcatattttatccttgtaggtcagacatggtataatcaccaatttgagaaatttattttaatcgcaggttagtagaaacacatatattctcctttgtcattgggagagcatttgtgacagatattgaaaagttgaagatcggcagcaagacaaggtcactgaatgtagagaaagtattaaggttcttttcagatgtcaccaaggtttgccttttctttctgaatgtgcatcttgacatgtcaccctctcttctctatttttaatccatgatttcttcctacaggagggatttagtcctggtgcaaacctcttaactgctgttgaagtacttgtatctggggtacattttcgactttttcctgtgtctttcatcttactcactccataaaatcttgcaaagctcaatttcttatcgtccaggatccttactctttgatggttttatgccttatattgtgttgcctcttatgtgttcttttcagcctatcgacaaacaatcactactggattctgggatattctgttgtctaatacacgttctcattgcacttctagcatatgatgaactaagcaaaagtaaaataactggtgacttagaagttgtatcagcggaaaaagatgctggatacatagttctccagactagacgacttgaggttctgtttcaattgttttttttccaaatcataatacgattagatatgttattcgacattgttttgagctacatatgacaaccaagtttatattacacaaatgctttatcagcttaataaataataaatactttgtgccccttcattcgtgtaggtggagggtagtgttgttcatatcatgaaagcattagcaagcaatccttctgctgctcagagtttgattgaagatgactctcttgagtcgcttttcaatatggttgccaatggctccattacagttttttctcagtataaagaaggtctagttcccctccataacatacaacttcacagacatgcaatgcaagtaatttttgcgcatctattttagagcatcatgctatgaaatggaaatattccgtgaacggctttctagatggacaaattaaaactaggattgaataacctgatgcttatactttcatttggcaccctatcgtgtctcttccagatccttggacttctactagtcaatgacaatgggagcacagcaagatacatacgcaagcaccatctggtacgccagtgaattatgcagactgcctgagtgtagtatattgagtctcatgcatacttttaagctgaccgtgggtatagtttattctttttgctaatgttgaaactatgtgagatttccgtgataaagaacgtggttatcaggaaacttatgttgatttcaggatagaagcaaattataattaaatgttgtatgcttatgttttagtttcatcagaagcatagtgttgcaaaatgataattgcaacaagtcattgaaaaatatattctaaatttttgagttctcgtgcagataaaggtgctcttgatggctgtcaaagaatttgatccaagttgtggtgactcagcctacactatgggcattgtggacttgttacttgaatgtgtagaactatcgtacagacctggtaaatgtagtctacatagctctaaatatgttatgtccgtatgaaagaatgctgcgtgagagtagaacattcagtagtcacattatatatgtggacatgtaagctaaagctgttctgattatggctactaatctttttcatatttgactttgtagaggctggtggtgttaggctccgggaggacatacgtaatgcacacggttaccactttcttgttcagtttgccctggttctatcttccttgccaaaaaatccgatttttgtgtccagtaatcatgatagtggttccgatgaccctgaagtgtttcatgatggagaaaatacaaacagtacggaaaatgctgatttttcatcacaaaactttgctccatcgttgtcaagattgcttgatgtcctcgtcaccctggctcagactggtccagctgagccatctgtagggagggcctcacggtcatcccaaacgaagccaactgggcatagcagaagtcgaacttcatctgttgacagtatatacgatgagacatgggaacagggaagtggtaaagttaaagacctggaagctgttcaaatgctgcaagatatcttcctgaaggcagagaataaggatcttcaggcagaagtattaaatagaatgttcaagatattctcgagccacgtggaaaactatagattatgtcaggaattaagaaccgttccattgcttgtcctcaatatggctggttttccttcctcgctgcaagatataattctcaaaattcttgaatatgctgtcacagttgtgaattgtgttccagagcaagaattgttgtcactttgttgcttattgcaacagccaattacatctcagttgaagcataccatactttctttctttgtgaagctcatatcttttgatcaacaatataagaaagtcctacgtgaagttggtgttttggaagtcttacaggatgatttgaagcagcacaagcttcttattggtccagatcagtatagtggagtctctagtcattcagatcggaagcctagctcaggtagcttcagaaagaacttagatactaaagatgccatcatctcatcaccaaagttgatggaatctgggtcaggaaagttacctgtttttgaagttgacaacactattactgttggttgggattgtttgatctctttgttaaagaaagctgaggctaatcagtcatcttttcgtgcggccaatggagtggcgattattcttcctttcttgatatctgatgcccatcgaagtggcgttttgaggatcttatcatgtctaatcacagaagacactaaacaggtagcttctttttcttggatcaactacgccactgtcaattttattgcaaatttgatgtgttcgattacattgatgccatcataggtatttatttttcataattggcaaacatccctaatttactttttctttcaattactgtccaactaggtccatcatgacgaattaggagcagttgtcgatttgttaaagagtggaatggtcactgg

SEQ ID NO: 36154 - DNA, 4502 bp, Arabidopsis thaliana landsberg
ggacggagaacccaaggccgaacttttagattcgttatagttggagcctagtcaggatgcaagtgcaacaaccggagatggggatggattgaaggagactttgagacttgatttttcagataaaaggggagactcgatcatagggaaagatgcagagctctgagaatctgttgcctgaacttgaactggattacctgtaaaatcttgaaagtccctttcactggaagctgaagggccaacatgatgatcgtcttgtttcttaacatcttcaacaccttgtaatgatttacttgtgtcctgtgttggtggtggaagaatgttctccatcttatcattaaccacataatttgcaggtaaagacatgtcttcggaaccaagactgacctgcccttgagggaagcttccaacactgatggaggttttagtggactgatcctgatcatgaggcaagcttccttgtgagccgctatcgtcagcatcatttatatgcttctcttccgccttcacagagagctgtttcgccatcttcacagcataagcagccctacagcacaaaatagcctttaggcgcaagttatgcaaataaacatcttgcagggtcacactaaatccaacatcatgaaaatatcctggtcttatctaagaccctcagacattgaacaagatatgataactaaaacaaaatactgttcacatagtctgtccaacgaaagataaaatctatgcagaaaaatttatttattttcaaaaacctaaaaatatcgtcaatatttactaggcggtggaaacatatatcagtaggtctgtaatgccaacctgacacaggagaagtaaagatcagcacaattttcaacaaattctgcacgtctgcaagcagtagaaaattgagggcacatctttgcaaggtcaaccatgaaacggagaacagacgttgcagcagcaggagctgacgcttcgccacccatcaaacgtgccgcatatgttttgtgcatcaaagcttccccctgaagctccccagtcatttctgccccctctataagctctgccacaagactagcactcacctgagaaagatttccagactggtgggctagcattgattgcatgatcaacctgtcataagtagatttagccattgccaccactgaatccaacagttctatgaactttaactccacatagcttccatcatttggcactagagcatgaaagtctaacattcgaacttccggtagtcttggataaacaggtttcccaaagatcaagcagaacagtatgtaatatatgtctggggaatcataaaagttttgaagtacccgcagcagcccctgataacctccacttgttcgaaatttaagggaaaagttcggagaggaagcaagacagacaccaagaagggtcatgatccacctcatactagtaggatgcacagcttcatcgaggaagtatgttatcaattttgacgagactatcttatgccacagctccagaaggtcctctgctttaatggttacctgaagatcaatgagcatttccaaaagcatatttctcacaattacatgctttcccattgattcgcgcaacaatgagcttcgtgacttcacttcaggtgggttaaatgtcataatcacaaacctaacgacattttcaagctcagaagtcaggaatccgtcttctaagatgcatcctagcagaacaactaatttttctaggaccggaacttccacatcacctctctgaagtgtcactaacaaatgttctaccagattgattctgcgcagaattgtaagattgtgattcctgtaccaatgcattgaaaccaaattttccaggaaaccaagtaaagcaatctggatggaaacaggggatgttacccaaagggtccagtccagaaggacatgttcaaccatatcggcgttggataagacaatgcagtttgaagtttcaacagggatatctgtttctagctcagagagatggctaaatgaatccttgggaacagaaaagtcatccatatccccatgagacccaactgaggaactatcgtaccggaacctcgaaagactaagatcctcgtaactgttttcgaatatagtctctgtaggtggcatagtaatattactctgtacactctccaacttttttggctctgaaaacaaagcttcgcatgctgcaatttgaaaaaatatctccaaagactgcatgtcaaacagggtcattttgggacgcaaaaacagagctagtaaatgatatccccttatggtttgcatatccttcacattttgagggttttgatgaagcgcacatgcaagcaatgaaagagccatatgtagcatatttctagattcggcagcctcaacaagcgcaagtacaacagtcattcctcccacaggtcggatagtatcaccaatcacactttgtctgcagatagatacatttcctaccagacgcccaaaacgtggtattcctgaaccatttgaaaaagaagaatgaatcaaattatgaaatcgattcagatgaatatgtacaaaatgaagaagagtttttaagactactatatacctccaattggagaagcagcagcagacaatgggtcaaccagattgaggagtgaaaaatttccagacgcacggatgaactccgagcatgttccatcaaatgcaaatatcagtttcttgccaggtaactgaaaggcaagatttcccaacctctcaagatcccagacaattccactgccatctgccttggagtcaccttgtctattgcttccatcaaacttttgtccattcgacgatgaagtcatgtcagtgtctaatgagtccaggatagccatgctgcccccaccacaagcctgattaggcacaaagcgtaagaggtctgcatcctggaaaagacctttgtaccccctaccaagaatgtacatgaaaccaatgcaacctgatgtgagcacctcctcaaaaagataacatgagcgtgttttccatgtcagatcactaactctggcacaagtagccggagttccaactgttacctgcaaagattttccaacaggcgaaggagagtaccccaatttacccgtgtgccttagttttccatcaagatagacatatgcaacactagcttggaagagtccagcaagagcattcggtttactatgaacaacagcaaggtgatgccacctgccctcctcaatctccaatccagaaaacgacaaagaatgtgaattgctagtggcaagggtcagaataccatcctcctgaaagtaaagttctgcatagaatggactttcattgcttacagcaccaacagaaaacatccggaaaatgttctgctcgtgttgttgggcacttgacatgcgcgtctttgatgaaccgccagctttagaggcttctgattcttttccttgggttgtcaaaaaaattacgaaactggaaccaacaaaccaatgaataaccagcagcaggcggccaagatctttctcccagggacacctgaacagaaacatgcccagttttgctcatatccaattctacaaaaggagccagagatagatgttccaaggctgtgtcttccatgagaattagtttttccatcatgccaactattgcatgacctgaattcataatcctcatttgcaaaacatatctaaacagcattcggagctcagatggggacaatctacacacacacaaaaaaactatttactaagaaaacagatagtaaagtgaaagcagtaacgttggaaatatatttaaattttttaataataatgcagggcattctttacctgtacgctccaagaatttccacaatcttcaaagcataagaaagaaatggagatgaacccgcaagaaaggggtaaatgatctccaacaagagttccacgcaacctgttcaattacaattcatgacgagaaagagataagttgagagataaaacggaaagaccaaaagcgatagggatcataaaattgattgaagaatggactggttcttaccaatcgatgtgaggttttcctgattgaatggactggcacgtgcaagactttccagaagtctcaaaaattctagctgcatttttggactaaaaagcaacaaagaacggatcagaactctgaccgcacctgcattgtaaattctctccttgtcaggattgaactggcccgatggggttgttacaacaaaagttgtgttttcattttctggtatagtagcaagggccgttgactctgatgttaaaaacgggggaaccaccacttcaagtgcaagttctaacaacagctgtataacctgcctttccaactcaacacacagcaatccagactccgccaaaagctcaaaaaatgtctgagacgttataacagcgtggagtttcatcctattaacagcattctcacagactgcagctgtcataaggcgaaacagatatttaaacaatttgatgtaaaccgtcaagtcagactcatccatgtgctctcttttcccttgaaaagtatgaaggg

SEQ ID NO: 36155 - DNA, 10133 bp, Arabidopsis thaliana landsberg
  unsure (1)..(10133): unsure at all n locations
agaatacctctgaactgcatactgttaaggtctcatgattgttcttggtggcgtccttgtagttaacttggaaatgagctggcattgtacttacagttttcttcactaactctgcttgtacagaaaaccaatcagagttcccggtcggtttcactgatgtccaagactttgatacctaaatcaccagtttacaacaagaagtttccttgtcagatacacatatcaagatagtagaacaaagagaagctgaaaatattgatgaaaatgttgtaccttgtctgtagtccaaatcttagatttgtcagcttgaagtagattccagtaattgagaactgtatcatcttcaacaaacaaaaatccttctgcgctgctgtatcgatcaaatatctttggtagatgcctgaaatatacatacaaacttaccgttagaagcatgaactttaaacaacatatacatagtaatcttgagaatattcatacttgtaaatgtgatcgagtttggcttcttctacatagagatctgagttcttctgagaagaaagtatcacaacagttttgaatatccggccataaagtaacctccactcgagtgcggtacgttcaacgggaccgttacaaaacataaccagcacaacattcccaaaattcttcctccacctaatcaagttccctatttcagtgctcactgtgccagtctcctcaaccccgagatgaaccgaaggtaacttccttggaacaaactcttttctatctccatgaccgatacttgctcgcgggcgatccaattccagcgacatcaatctcggttgttggtacccaacagcaatcaaatcctgaagccaagcagctgtgaatttcaaatcctgttctgtccaaaacccttcttcagccatagcaaagctcaaatcaaggaccgtctcaaagaaactatgcttctctgatctccaagcaagtaagaacttgatcaaacgaccaacattaacatgaagatccttctcctctacaaaagggtaagcctcgattctatcaaaccggtgagctgtaggtggataaacagcaacataaccaccaagctcccacaaaagcctttgtccccagtaacctctcagcacatcagaagccatggaactaaccgaaacaggaagcattaacccccaaaggctgacgaatggtaaagagtgttaaacgaattaaccggcaccatcacaccttgaggtaaagcaactttaggagaatgctcatcgaacctaatatcaaaagcttctaaagtcgtcttcctagtgaagtaaaacaccgaatcaacatccggtaaaccgttagaaatcccttgctgtataaactgcttaccaccaaaaacctcagtgtaatactcctcatgattgatctcacctacattctctaatggcaaacctctaggccaaacggaacgttgcccgaaatgaatataaggattaaccacagtcctattggggttctcatgactatattgcaaaatcggttcttgcttagaatctagaccaactaactcaacatcaaaatgcttgcctagatctccatcaatcacttcaccacgatcatcagcatcatagatcttcttcgcaccgtgctggatcgcgaacaagtaaccaacactcttccttacgaaagaatcataaggcaagtgatctaaaactcgataacccaattcagcttgagcatcgagagacaaaaagatggaacctttaagactccaatccttgggtgtcgccgagtttccaatagctagaacctgccatccacgaatcttcaccaagctcttgagctcctcagttgggtacttggtaaccgacacaacaatccatttctctgtctggaaattagcgtacggggaggttttatcagggacgactgggatcgaattccatttgatttgagggcgagagagagattgaagaaattgagttgactgagactggaaacaaaggagagaagcagtgtcggtggtgttgtagaggaagaagaaagctactatggtgacgattaagagagagaagacagcaattctagagagattctcagagaaccaagtcgagaaatctaagtttttgggttcactgaatcgtcgtcggatctgttgatgagttggtagttctctgatctgagatttcggcggcttggcaggagaaggcgccgcacgatcctgaaccaacattggatcaataaagctcaaaactttttgaatcagaagaagctgagatttgtgaacaaaaatggaagttttggattcgtgttttgtttgcaagtgaaagtaatgcggttgttgtagttggaattgacgttgcttaagcttgaatgcaaatgtaaaagagctttgataggaaagccaagtctgagagtctctgtgagctgtaaggtcaatgcaattgcaaaactttgggttcttttcttctttaatcaccaaaccaaccaaagagacaactaaacagtaattcttgcttgctgtattctctgtaggacccacgcaaagccaccgcatgaagcaaagccttaaatattattaaaattgcattttcttatacggaaatgtttaatacgtttactttacccgacaaataaatactatttacttactatagaaataggcaaatagtaaataaaaataaaaaaaggatacgaggatgaaattattatagaatttgatctactaacgaatttccactataactaattataaacatcatataatacgaaaatgttcgtatcaaacaaaaaatcaacacagcttttatgcatagagtgaatagaaatggaccaacgagatccacaaagcctgcgttagtgatcctctagtataaccctaagaagcaaaaaaaaaatcttggcgaaatgatctcattatcatctctctgaaatcatcttcaagaaagtcaaaatcaaacactttggattgattcaaattccaagcctagaggtatcgttccgatgctgctggagaaacaccatcaagatccccaaagatcaaactccaagactttgcttgaggtttaagaaaaaaaaacgacaaaatagtagcggatcataaatgggctgattatgatatatacacaacacaaatcaagtttatcatttattcgcagtaacagttccaaaaactgaatagatcaatgtcactttcggagaggagctaaaaattagtgggttttgtttttctttggggcccattcgtaaaaggtatatactaaattctttattattagggttgagtccgtgtggaaccgaaacagccctagggattcccttctacttgaaacccgaatccgatctcgatggacgacaagacggcgggtggtaagattgtcatgaataaggagcaactgcttttgtttatggaaaacaggcggaagcaggaggatcaccgtctcgctctcgccaaggaagccaccagatctgagatggttgaccggaaggccagcggtaagataatcatgaatcatgatcagcagcttatgtttaacgaggatcaccgtctcgccgtcaagaaagccagcagatctgagatggttgacctggaggggatgggttcggaggcgagtgtaataatgagtaatgttccacagccaacttcttttagcgaggatcacaagctcgccatcaagaacatcatatctaagattgtcaaggagatccgcgatagagatcaccccgcttagtatctaagccttggtcctactcctatatctgacattgaagattacttttctcttacgtttccattcacgactaagtgttttagtcagtgtattcttatattcttaaacggagtcctgatccaaagtttcaacaagtctaattaaagccctctttctttttcattttgctttcaaataaggacttgtgtttcctcttatcttcgtgggagttatagattttaataataagaaataccattaaaagagaatatctcttctcttcttagtattcatagctttgattcggaattcatcaaggttgctcgagtttttccatatcaaaggattcggcttgattcagttttatcgtcttgagtgttcctcaagttttcttagtgaactaagtagagctccagcgttatgaacactacaccaacaatcctgtaaagcaaagattgaattcagatcgaacaaccaaaatgaaacaaaacactgatgatctcgtttaactgatcacatgcagcaacaacaagtatctggagggggtggaagacagtaccgcctttgtatatgcaccatgtctgaatataaaccacaaacacaagcatttctggacaactctattcatcaaatggattgttatcttttactatgcttctctctgctttaactcgattgcatggaaaacaaagctggtgcttgagagtttgtgatttatgttattaattgaggaacaagggttgcttagcgattaacttaggtacagcctcatatagcgaaatgcgtagtaatcaatgtttttctctttgatgattcaaacactgttttctaacaatttaaggttcacctaaatattgttattacaaccagaaaaaggacaaacgaaaaacaattttgtctttgtataataaagaagtgagtttcattcagccctcacagtttgggttgtccgcatcccctgaacgacccatgaagaggttgggactttctgaaaccaacaatgtcttcgatctcaacagacggtgatgggacttcgtctttgtcgcttgccatctccttcaaatgctggctcccgtatactcttatgctcagcgatttcttccgtgctgctccaaccttaatgtattcgtcgaagaaatctatcaactcttgcttttgaagctgcttcaacgcagaaacctgcaaccccattctctcatcgatcagtcactttcaacaccatcataccaacttgtatttaatcgtacaagtgatacaactattcgaggaagtatatatgcatgggtcatgcattcgggaggcggttttcttagtttatgagaaaatatagaaggaaaaagaagctgttccatgtacctctgcctctttacggttgaatttgagtgttccactttgaatctctcgccagtaaaaccgggattcctcctttaagttcttgtgtttttcaagcttcatgtctattaaagctgttacattgctctagaggaagagtaactcatatcagttaaatagctccggatgaggaccatattgcatagctagatcaaatgagatatataattaattggttgatccatcttaccttgaaatcttcattactcatctcgtaaagtttactctcaaagttcttcagtaatgactccaccctcgaatcaatatgtccaggaccctattaaagattaaacctcaaggaatttaaggagatgagccttaattagaaaaaatgactgagatggctggatggtttggtaccttaaccgaggactggataatgaactgtacaccatagatgccagaatcgttcctaagttgcaaaaaagcgcagttaaacagaattcaggggactatttaagaaacacaaggaaaattccaatgtacctctgagcaagtgcagtaatataaccaagttgctcgactgttctaagttggtgaaaggtggcttgctttgcaacgagaccgaatagctgaagtttaatattcatggaaaagtcatctctatgaacctgtttgtggcaaccaaagttacagttagacaaaacaatatgatctctggaaatatgttctaagatgataccgagatctacacaaagaaactccaaagaagaagtaaaaattggtagatgccaagaagaaatttcaaagctacctcttaatctgaataaggaattacgaataaggaattacctgaatatagtgcaccagagcagaattttcatcactggggttagagccatcttggtggtagaaatacttcattccttctccgagcttgacaaccctattagtgaggtgctgggacgggaacaaaggtcggcaaatcggttttggatcgttaaaaagaacatcttcaatatgtttgaccattgactcagcttcattattctccacattacctgatatgaaatatgtaagtattcagcttccggaaaaagaagaagacatagaaaagaacagaaaacatcacagccaaaaaagatcatgcaaaataaataaataaacacaaaatgttgatacctgctatataacactcaataaatgtccttgataacaacattggaacaaacttagctacgtcttcagcttccaaatgagaaaggacatccagttcctccgtccaaggccaggtttgatcttgtaatatcagtgagcagtaatacattgcttggtgatatggctgccgaaatttgtaattttgatactcctttgtgacagtttccttgtaaaagattcggaaacagaataacacagattcaattattctggtacagaggacgtcgttcaaccattaagtgaagttctaaaaagagacgaagtctgacatggttaccttgataacagcaaatctgtcaggtttaacctcaaaatttgctatctttccaacaacagtttccagcaagatcctcaatttgtgattataaccaagaagggtcaactaggaacaaaaacaggtagtcacaaaaaataagagaaaaagcattcagtaaaagatgagaaaatgtgtgtagtggagatgaggtcaatgtcaaactcacctcgaaaccattgtccgaaaggctcactccatagtaaagaccagcaacttgtgcataataagctacagcatagaagaagtaaagagtgatgggaaagatttatcaaaatagaagatttgtgtctttactcaaacattttattttacttatttatactatttttcatttgtcttcgagacatacaacgaagctgcaaaacagagccgaaaactagaaagcagtgaagacgttgtcaaaagctacaagaaatgctcaatcaacagcatgtaataaataaataaaaattcataagacaagtttggtgcttactggacaaatttaccaatttcagaagatcggttccacttaattagaacagagttctctgaactaaagcctagataaaacacctagttaaatggaaaatactgagagatgtatcgaccaaatcttaccgtattcattcaaatagtccatcagcaatcgtgtaaaaatatcagtaagaactgccgcgtcaggagagctgactgcaagtgggcagttgaaatccatcttaacatatgcctttggtttagagaacattgtatctggcttgtaccacaatcttgagaaaggcgtctttctcaacaaaactggaacggtttcctgttccagtacttgatcatataagatgcccgcttcatacattaataaggttaaaaaatcttctaatttatgccgtgaaattgaaccttgtcgtcagcatcctttaatgacaaatccgtaggaataaagacattaggcgcaggtaaatgcagatgtacatcaggcgcggactgcacccattcctgtaattattttacataaacacaaaaagatattaaggaaacaaaattgaagcggaggtagtagacgcatagaaaataaacgaatcatttcgagctaatataacatatcaaaaagtgaacctgaatggtggagctggttatcttctcaagagaataggcagtgttataccatggctcagccttgtcagtttgtccttcaaatttctgtgattcccaaaaaattctacaaaagcaatggcattatcaagattctttggaaacaagtccgagctgtgtctaaatatcagtgctttaacaagtaaactttgataacatgccagaaatggtgaaagtaaactgcagaaaagctaatgggaatagtacataaattagccatcatatatcaatagcaataaaatactctaatgcgatcctcagttattttcagaataaatggaacagatgtaaaattagccatttgcccaaatagaaagtatatgtaaaaaaacttanatagtaaaattagcttaggcgaaaaccaatgatttcattataagtttagtgtacaataggcagctacccataagttttatgtatgcaaagtaaaactcttaaaaccacaagacttaccgaaaattactaggagaaagctcatctacaaccttttgtacaatagctggattaaatttagtaggtagtgatgatccaaccagccaatccttggtcggatatatctgaagagtaattgcaaagtatacagaagatattaaaagaactattatttcttagccgtgagcttaggtttgcgctttaaagatataaattacaaaactttaatcacattgcataactttatatgcaagatttattgaaggaatgattgatgacatggtaacagatgtaagcatgtataaaaaaataaagcttaggtaaaaagagaaagagctaaattattacctgcatgtttgatgcaatatccactatataggacattggtggtattttgtcttgataatgaaatttcgtctcacaaatagctgagagcttcaataacaataaacaatgtattagcaatataaaagtcacaaggtcaaaaaatgaagaaaaaagggaaactacaatcttagcatatcagtggaaatacattagaatgagccgtacaagttaatgtatctatacctcatcaaaaatccactggcaaacaccagtctgttgtaatagctgaatgtagttgaacagcaaccccaaaatctcttgcatatgctctgtaaacccaccaaggagaaaacccatgaatttaatagttacaaaacaccaaacacacccatactctctagtcaacacaagaaagactgttgtgaacttcttagaatgaaaataaaaatataatagagaaacccaccatggccagcatcggtaagatcaatcgaaaccttgaagaaagaataatctagagtccactctccttcaccagcagacagtcccgttgcccaacctgcaagtaataagaagaaataagccagactactaaatgttgtaatcgagcatgtttcatacatgaatgacatcagcaacctgtcccatccaataagtttgtttacatgactagaatggaacctctagaagacaaagacgcccactttctacaatgattctataaaattctcctatcctactctattaaaaattggttagggcaccctaggctatactccatgtcaagataccaaaatattttatctataccaccaacgcctgaaacaaaaaagaggtgtagtttctgaagaatatataaatcattttagggaacctcaaaagagttttgtcagatttcaagagtgtaagagaaggagactgaagatcgaacttggtgtgtgcccatagaaaacatacccaacgtttttaaggcatgaaacaaacttccttcgccctcatggccaattagatggccaaggtactggcttggtgcttcgtcataatgatgaatgctaggagttacaggccatgaaacacccagcttgtgtccttgctttataggaatagccttcacaagaatctaaaaccaaagtaatacaacatcaccaaaaatacgacatcataatcattctagcatgatacacttcatgtaaaaatattctaaatatgcggaaagaaaaaaacctgcaaatggtcagcagtacatggttggccaggaaatctagggacaactttgttggtgttttggatttcctggaacatcctttccacaagatcttggattttatcaaggctttctgaagacatgcagagaaatagcaaagatgttacctatttaaacatcattatctccattaaaaaaaaaacaattgagtttcgtgttagcaccaaaacatacccttcccatatacaaccagatgcatgatgttggcagaatagtgttcctcatagaatttaataagctcactccttgtatccactcctttcgcttggggtcgtacatgaagtgtatccatgttccctatgcacaaacctcacttattcagcttgagaaaatattgggaatcgcacctgactattcatattcatcagaataaatctcatttcatcaatggcaaacaaaagcaattctagtaataaagagagaacatagacctgtggtaaatttgtat

SEQ ID NO: 36156 - DNA, 4557 bp, Arabidopsis thaliana landsberg
gagattttcctcccaaagaagatgtgattttgcaaaatttagttccaacagatttctacatattggtgagccggagctgttgtaagtgtttttcgtacattcctgacacattcctttatcatcatgtattattcctgacacattcctatgtcattcaggacataattgcacgtgtaaatggagtggagcaggcaagtctagcttttattataccgtttctttttaagatatgattgtgttcttctttaactttgttgcaattggagaaccaaaacatatttgataatgtttttgtgtatgtgtttctttacaggtagttagtgaagcacagagaggacatgtttttggtgaagttggggtactatgttacagaccgcagctgtttactgttcgtaccaagcgattgagtcagttgcttcgtctgaaccgtacagtactcttaaatcttgttcaggcaaatgtaggagatggagcaataatcatgaataatcttcttcaggtttgtaataactctgaacagtacagtttgtttcaacctgttgacacacaggaccagttccataacagatatgttgtggttcatgcagcatttaaaagactcagaagatccagtgatgaaaggcgttttggctgatacagaacacatgttggctcaagggaaaatggatttacctctcagcttgtgctttgctgcagccagaggagatgatttattgctgcatcagttactaagacgaggctcaagccctaatgaaatggataaggacgggcgaactgcgctggtaagcccggatttcctttgtatataccatcatcctccttttaatgcctaaaccaaattttctcactctctatgcttcttctttgaatatctcagcatatagcagcatcaaaaggaagccattatgcgttcgttttacttctcgaacatggagcagatcctaacattagaggtaagtagtaaaaaataatgtttcactaggtcaattagcttaggatgataggatcatgtagtactaaattatcggtggctcgtacattgtttacagattccgaaggcaatgtacccttgtgggaagcaatcataggaagacatagagaaattgctaaactccttgcagagaatggagcaaagctaagcttagactcagtgagctatttctctggcttagccgtggagaaaaactgcttagacgcactcaaagacatcatcaaatatggcggcgacgtcacactccctgatggaaacggaaccatagctttacacagagcagtgtcagaaggacacttggagattgtgaagttcttactagaccaaggtgctgacttggactggccggattcttacggatggactcctcgtggtcttgccgaccatcaagggaatgaagaaatcaaaaccttgtttcataatcacaggcctgtggagaaaaaaccgaaacctgtccctggaatacctcagagtcctgtgacagggaagccattgatgaagtatagcagtgagcctacaatgcattcaggagaactcgtcttagacgggggtcaggttgttgtttctcagaaacggaaactcaataacttcagaaactcgctcttcggaatcatttcagctgcaaatagcggtaaaaccacctcacctctccatctgctctctagatactcgttgctttctcgtcacgtaaccataattttcagaacttttcacatcacaatagtcattcttatatacaattcacaactttcattacattgttctgttcctcacaactttacaaatttggttttcatttctggcttttttccagctgatgatggaggagaagttccaagaagtccagcggttcctggaggaggaggtagtatggtttatccggcgagagtgacgataagttcgccggaaaacggtgaaactggtggaaaagttgttttgttgccaaattctatggaagagctattgaaaattggtgaaaataagatgggtttcgtcccaactaaagtacttacgagagaaggagctgaaattgacgacatcactcttatcagagatggcgattttctccttctatcaagggatccttgattcacacgcaactctctttcgattttgagtaatgaaaactattggtgttgaacgcatactgcgcaaccaccacagtcaagctttatggtggtgatatgatgctaatattaggggaaaccgtaagccccaatcaactccgggattgaaatatcttttaggttttttttttgcttttgtgtatatattcactgcttactatttttcacatgtatatatatatcctgttgactattttctgttaaaagaactctctaacaacctcatgatattaacatcgaaatctacaagaagtatggaaacaatcttgtttttttcagaaagcatacaaggataaaggtcctttcttaaacgtctagacaatcttcttctctaagtctctaagaagaagcaagtgttaaaatttataacttttgtgcgaggtcgagatttgagagtaactcctcactcatcttttccaatcaagcttaaatcctctctaggtgacttatcctatttctgagatgaattatcatctcatctttcatttttgtttagatccatgatggtaaagtgatattgatgggacttgggagccaaagcattaccgaaaatgagcacaatgattgagatagagttagagacaacacacactataatattattattatttcatgcttcaaatgcaagaaggtaatatttgaatcagactctagagagcttaatctgctcccatctctctgaccaatacgaaacatccgcaatctgctcaatcaacctaaagaggtgaagttgtattttatgtctagttgaattaaaacccttgtcaaattagacaatggtttaaggttgatgagaatttgatgttggaaaaaaaaagtgatataaaagataaaagcggttcaaaacggttttgcgattgatgttaaaagagtgcgaccggttgtgggagaaccggtcaactcctagtcctagaggctagagagtgttgtgttgtgtgatttgtggtgcagataatatcttaaccggcttcaacttttaaaatctagctcggttagcattttaaaactgttttctggtttgattccgtgtctatctctcggctccgttgtatcggaaggtagatattaaaactgaaagaccactgccgtcgagagcaactcaaaagatcatcagaaccgattcgaacgatgtcgtttgggtctctcgtgcttccatctccaccttcctccttgtctgcaaatgtcaagcatttcaatggctacggtaggcttaatcgtaatctcgtgcgagcttcttcgtccgatgttcccgatttcctctctgccgattggtacgcctttaaatctctttttcactcaaatttcgtcgattttcatatgtttcaagctttgggtgttgctgggttttagctaggaaacgaacagatctgaatgcgtccatcaattggtttgtagaattctggttcccacaaactaaaatgatcaaaaattcgattttgcaaagctatagttgtagggcgtagccattagagatcctttctatgtttctccatcttttttcttcataacttatgtttatggatggatggttttaccaggttggagagccgtaggaaacgaccttttggccccagacttgatgtaaatgaaacactatttactacataagcttggaacattaccttgctttgtctctattgtagtgtactgatccgagttttagatattcttttttggtcatagtttagtgcagaagacgctgttcgacatcagcttgatgcattgaagtataatgaccatcctcgtgatgattatggcattgaggtcatgtatcgggtaaaccacatcacgaacttccttgttgtttctttcagttactacagcttttgtaatgttttgaaatgttttgtcaaaaaaacaataacagtttgctggattcgatccatttgagagatccacctatttcggtcctttctttgatcttggacaggttaacttaaaacctttcttttaccaaaactttgatgatcattagatcatattgttccttagctaaggttcttatcccctggttctcatttgttactgcagtttgaaaggtttaggcgtatttttcatcactcgtcttaccgtgtgttgcttggtcacaaggatagaaaacttttaagcagtttgttcgtggaggaggtatcatctcttttgttaatatgttacaattattatagagctcccctcatgatatcctctttttcgatatgcagaatcgtttcaagcagaggatctggattcagggaaatcgacctgaagaggaagagatatttgaattcacaatgttccaggttggttcctatgtcagtatagagaccctatgactattgaatagttaatattatgtggatttatgattaaatgaagccatttgtgtgtaatgccagcgaataggcggttcatgggatggatattggttgacagaaagcttgcttcatgacggagatgtgt

SEQ ID NO: 36157 - DNA, 6226 bp, Arabidopsis thaliana landsberg
  unsure (1)..(6226): unsure at all n locations
tcttttgcttctcaacctgtgtttttaacatgtttttgtaattttgacaatcaagatcttcaggcagctaaaggcacaaatccataacaagtttagtggaagaagatgcgacttacttcatgtaccaacacttgtttcatcgctaaggcgagtacatgatgtttaaattggtgaccctgtcaaatgttggaaaggcgatgagtattatctccaaaggcagaatgtagtggacagatactaagaaaagaaaaagaaacaaaaccttgaaattaatgaaatcaaatagatgtggatctaaagcaagaactaaagcatctgaagcagcatcctccctgaggctacttagaacaggatcagatttcacattcttataagtcaaagaataagaacacataagcatgaccaaacccgccagttgttctttttgcctatctgatagcaaatgcgatgccacctgaggagaatagcaaagatgatatgcttagaagagcagcacagtaaaccatgaaaggaacaatgaatacaaagaaaaaccaacattcaacagatgaagacataccggtctaagagttgggggagaaagaatatgcaatagcggggaaatagagtcttctacgaaagacttgattgacaaatgccttccaatatagggaggtatcttgtggtgccaagaccgcagagactcctgcttttctaccaaaagtgttcgacatctggtacatttgatattgagaagcactagtaaaaagggacgctttgaatgttgcctttctttatcaataaaatatgacaccaaaatcacctgtggtatgacttaggccactcaatcattggtttttgaatttgggccacacgacggtgtataggtatcaccaggctaggaaagtaaactacatcataaggtaaaaagaaaatatcagtcttatttacaggactctgcaatcatctgagctttaaagcctttaccatagagaggcatttgctgagtgcgcattatgtatcgatgcagcaaatcagaagttccaagaccgtccaagcagctgatctttatgtaaaaaagaatacacatacgttatttcagaacatagccgcacaaacatacagaacaaaacagtcatagggattcaaagtcattaattagccttactgtcttgtccatcactggatcatggtagtggagctgcaaaatgttttcatgtataccatcgaaaatcaaatcataatcacccctgcacattcagttaaacttaaggatgaatacacaaagcagaaaagttattgaataatgaaagaaaaattcattgtctagtacataccgactggacacgagagagtgtaagaagtcaaagttttnnnnnnnnnnnnnnnnnnnnnnnnnnnatcgttctcgtttcatttttctcgtggtgaatatctagaaagaggaagcaagcttaaatataaaatgaaattatctgtaagcaaagattgctacgacactttaattgggcttacctctttccagatatcaaacagactctttgacatgtctttccgcccaacaacttgagatccaatgtcaatctgaaagacaaaccaggcgggtcttagcttatcagaagaaataaaaaccccaaggatgggaaaccaaattaaaaagttagttgcctatagaacaaaaatgttgaaaactgttacggtgttcctagctagatgggctagtacaaatcaaatcgaaagtggaaaacacagagccagtgcaagaagggtatcaaagtctcaccacattgatggtttctttcttcttgtagagaaattgcagagtgttcaagcaagagcgaatgtcccattctgtaaccagtaaccaccaaataaaaggcaaaagatagcagaattatgtaggaaacaaatacacgaccaaaaaatttctctaagaaaattaagatcacactaaaaaccaaattaaagagagaaagataccagtgtactccgcaagagcactaagagcgaatgatcttgctttcagaccctccatattacagatgtacttgagcctgtcatttacacatatcagcctagtaagacgattttgatagatatctaaaatcagggagaaattgtgactttaatatgaatatagttcaatggttcttatccaaaatacttcccaaccatgatagcaatgagatgtgctgcatcatttcatactatttaacaaatttagtcacatcttgtggaatgataaatttccagactctcaattcagagtggaaaatagtcttacaggtgactaacagttggattaatagttatcaatggccgtagcttcaccaaaataaaacaaaatagtgaagaaacttagaagagttcttcttcgcacacagtagagtaagaaatagttacctgtttaccacacgactcactgttggttgaacaaatatatgaaccctgcaacagaagcatgggggcttattatcatactaattactaagagaagaattctctagaataagcatatgataagcaaaattagctaacgtgtaccggagacagttaagcactttgaaagcagtatgctctacataataataaaaaaaagtgctagcttcaccacacaaacaggaactagagacccttaaagccaacagaacgttgaacttgaacttactttgctatctgtcgcagaggtcttagtgctggtgcatataaatcattacatatacaaatgacaggtcttgatagtggtgctgttcggcggtccttcttcgaggaagtctttacattctctacattttccttgcctgtagcatgttttctttctgccaacacctatgtagcaaagatacaattatatacttagaaatgctaatacatagtccacatagtcattcccaaattggtctccaagaggagaaaaagttcaagaaatgataaagagaatcaaaggaggtttagagctagcaacgtaagataagattaaccaaaaaccttcgtgcagttactgaaactgggaaagaggtaaaacaagcaaagagttgatactaagtagacccaaacttaaccaaagtctcagtaccagcatacatacacataccatcttaagaataacatcaactgctccttttccatcaccaagagctccatctatctcatcaatcacctacataaattagtgtcagtctcttccatttcagacaacatggagtaatacagttcgacataatgaagaaaggtcccaagcgaataaggagtatgtaaagcataccaaacatttaggtctagaatcagctgtgacagagttcatctgaactacatcaagaattctagtttcaatagctgatgctgatcgctcgtcactagcattgatctgcaaaataacacaggttgaattaaacataatacacaagaaaagaagaataagaaatgcacatacagaaacgttgctgcaacaaaatgatgaagaatccattcgttatcatggaaagtaaaaggtatacaagaatacctcaacaacgcgatatccacaatgcttagctgcaatgtgagcaagcgttgtctttccaagtccgggggcaccacagagcagaaggatctacaacaacagtgaaactacgaattttacaaccgatgcatacttatggttataataaaagacaaccagaagcagattataagaataaacttgaagtctagatcagtttatcgctcaccttttgttcaggaggaccagtaagtttggactttttgttccacaagtcattaatatctgcagtgttggtattgctcacttctgcatttttagaatatccaaaactctccttactccatctattgaactgttttttccttgtaaaagctgaatccgatttctgatgatgacttgtggtagaatgtcgtttcaaagctgacaatactgcctctgtcgtgctcctaatttcagatccaaaaacagaagcatcccactgcttaagccataacagaacctgcaaataacattaataacggtcaactagtacaacaaataagcctctattctaccgaattctcttcttcatctaattttccagattcatcaccaagaagtgaaaagtacctctcgattggtttgctcatcactgagaagctcagtgaaggagctcggagaatatttgtccacccagagtttctcatgcattacagacgtttctgcagaaatggtttcattctgatcttcagaactagcttgcaagaccttgttaaatgcctctttctctgattgctgcaaaagaacactgataggatctttaataagacctgcaaaaaaacaaatgaatgatataagttaactatcgagaaaattatagttcttgtcagaagattgagaaacgaatgaatacaagaaaagagtattccccagtaagaaatagataatacatggtaccattagatttgtctttcacatccaatttgttcacctcttcatctcccaaagcccggcagaatttcgcataaaccctatctcctccgtcaggtgctgtgattgggaagcattccccatctatctcagaagcgtatctgcaaattccaataacgagattactaaaaaagaaattccgagtcggtaagtctcatgaacagtatagtaacctggccaacatagtctcctggggaatgccaacttcttcttcctcctccataacgtgaactacttccttaaccggagagaagcgtaaccaatcctcatcttcaatttctacccggttatcatcaattttgcttctcttatcagaagctggagagacttcgtcgagattcacaatcggatcggaaattagactcctgggtcgtttacaacccttgatatcagaagattccgattgtcggacatgaggctccttgtgcgcgacgcgttcttcttccttttcttcatcgccgtcgattgggtaaggatatggcggctcctcaaagtttaggtactcatcttcttcttcgtagaaatgagaattggcttctagaagctcaagctcctccggcaatgggatatcgaattccattctctgatatgattgaccgtatcggaattttgttgggatttggtgctcggtgaacaaaagtgaaaatcggaatctggtgtgagcttgagcgggaatgagagtgttttagcgggaaagttttggttgcaggatctcaaattaggttttacggcccattaaatattcggcccacttaactaaaatagcccaaatatttataccattgtgactacagattgttgtttcttgacaagatgcttctgtatgtactactaaactctgtattggttgctcctactgatagcagagtaaacacgtatgtttgaactcataaacgacccgatggccgacaagatctactcaagcgttgcgggaggagtttgaacaaaacaaccttggtggtcggaatatgacgtacgtatatatatgtactaccatccctagtaacgatatagagagggcactactcttatctaaatttaaagtaaccagcacacatcacgccgtataatcgtcaatacaatctcaaatttttatcatcaccaccacaatgcaatcttcagtcaacaaaatcatttaatagtttcggatctcttgtcaagtactgactggttcgcaagggatcaatgtcatcagatgcaagcaatatagcaaatgagtagcatacatatatgtctatctatacaaaaccaattcaagcagaaacattagattgaagatcgaacaataaaagagaaggcactacgatgtaccgagtgagaaagatctcagaagttttgaattttctgggcttaacacttaaacccatggcaaactgagagcacgatgatgagaatcagtgcgataatgatggcgagcactatgagttttatcttcatgttctgaagccacatctttcttctcatctgcgttcctgttgttctgaaatcttgtgcctgtggcagtttgagttcagttagacacaagatatggtaataggatgagtcagctatgaactcaaaaagcatgttcatctttgtgtgtgagtgtaggcaaatagatgcaggagataagggtatgagagagtctaacctgtgagcgaagattttcggttttgtccaccaaaagctcaattttctcaccacggtcaagaacctgcaaataatgagtcgcatatgtaagcggtgttacattggtaaactggacatttcccgtaagatgtaatgcattgaattattagtaattgatttctcagt

SEQ ID NO: 36158 - DNA, 1950 bp, Arabidopsis thaliana landsberg
gttcaaattttgaatttttaaatataaaaagtaaataaaaagataaattcatcatttgtatagtcgaaaattgcgttaataaactttattttggtaaataattcacgtctaattaataatagtatcttcatgtttttacaccacggtggctcgtttttcaattcaaatgtgaaatgtttatcaatgagcattttaaaaaacaaatatatatatatatatatattatatattgattttttataaagaaaattgcgatgtgtaagggatatttgagttgttaaattttctataaattatatgttatgttacttaaaagaacgttcaattgataatgttgcaaaccttcctaccaaaaaaattaaaataatgttgcaaaccttttctttcattccaattcactaaccttctattctaaccacaacctaactacctaaatttcaattatttgattgttgatcaaaatctttaggaacacgttaaacaaattaattagcaggttctaaacaatgcagagcaattgtagatgacaagagataacggtagaagttcgaattttgttgctgtaacaagatactatgactatgagctccccccgtccattaagaattaagaaatttggttaattacaacatttgtttttatgtttaagccttttgttcgtaactgagctaatactggaatcactgatcaatgatgaatttggaaaaaaagatattttgaggaagacagagacagactctcttcgaccatgggacctgaacttgtcctaaagttggtaattactaatttgtgccatcggcagagtccacgagctttttggctggatccgggcgggtccaactttctcgacatttgtttgatctctccgttttgaaattgtttttttttagtccttaaattcaaggttttatactatttttgacccaatctgactaccttaaatgacaactttacccttgcccgcttttcaactttttcttctcccatgtccactttagtcctcgttttgttctttcatagtcttctagatctgtagtttttttccgcgaccgcccaaaaaattctctgatcagacggtcgattggatcggagatttaaggtaaagaaaaaatggcgcaacaatcgttgatctacagtttcgtagctcgcggcacggtgatcctcgccgagtataccgagttcaagggcaatttcacctccgtcgccgctcagtgtctccagaaacttccgtcctcgaacaacaagttcacctacaattgcgacggtcacactttcaattatctcgctgataatggcttcagtaagtcacttttcgtttgatctatgcataggttttaatcttacaccattcggtgcttacctcgatttgtttctaggtttatttgcctaacctatcgattcgtatggatttgtgcatcctgagtagtctgatttcactgaggaaccgcatgaaccaagcttttagggttagatctatatttattaaacgcaataaatctctgtagagtcttacctgtataatcactcagatttggacagaatccgtggtagctttggttgatactatgtggaagaacaccaacattgatctgagacagggtttttactggttgctttatttgcgtatagtttcctaggtcatgggttttggctggcttcatttttcaatgaaaatctggggtcttattgtaagcttttgtgactatcctttagttgttgtagccatatcaatttcatattaaatcaatgtcacctgattatcccgtaagggaagacaaggagattgattttgttcctgttgtacagcctattgtgttgttgcggttgattctgctgggaggcaaattcccatgtcctttttggaaagagtaaaagaagattttaacaagcgatatggtggtggaaaggctgcaactgctcaagcaaacagcttgaataaggagtttgggt

SEQ ID NO: 36159 - DNA, 1305 bp, Arabidopsis thaliana landsberg
ttgccaagagccttaggcttgaaccactagttgatatagaaaattgaggatttagtggttgaacaactagttttgtaattccatcgctttttgtctgaaacaagatatataaagaaaacgagtaagactcacaaagtgcaaactccaggtgttcacacatacttcaatcattattttgcaaatgctgtttgataaaaacacagaatgtagtggtttactttaaatgtaagcaaatatttgaagatgcaaatacgaaaagaaaactttgtgttttagccttaaatcaagatactaccaaacaccatattcaacatacctgttcaatggcttcctcagtgaacggataccaataccgcataccaacatatacctttgctggtacatttttttcccaaaggcattttcttaattcttcagcctggtgaaagtataacaggtacaacataagaatgtataaattttgcgtcatctcaataacatactactctcaagttgaggtgtctcacacaagcacaagcgatttacaaaataaagcaaactgaaacactttgggattataactagccattttacttggatgcaagcaaggagaaacttggacaaaacagagcaaaagacaatattgttcttgaaatttggtacactaactaacccgttttgatttcagtacttgaaacttggacaaaacagagagaaaagcttctaaaatgacaagaggataagaaaagcagagtaaccaagatcatattggcatattataactaacctgtgcatcagttatgtggcgaagaggagaacctccaccaatagatgcatatccttccttgcttttgggtgctcttgctactgatataaactgtgctaatggcttctgaagaaactggaataccggcggcaaccgtataatgtcctaacaaaagattgagtaacgaacataagtcgtatgaaacagacaaagattgtatctttacacaatcaaaaacatttttaatcaaaaacatttcaaggatgcagagaaagatatactataccgggtcggcgaagaggttaaacaaaaagggttgtacatcatctaaagtctcagggcctccaaggtttaataacaagacaccaattttggcatcatcagtgataacagaggaagatgaaatggcatcagagataactgaggaagatgaaatgtttaaagggttcgaagtaaccaaagctgctctcaaaggcaatgaatgtttcccaagaagccggtttgatgaagtagcagcaaatgcttcaaagggtaatcttgtgcagtgcataacaacagat

SEQ ID NO: 36160 - DNA, 995 bp, Arabidopsis thaliana landsberg
actctgtttagcctcaaacctcggcacaaatccaaaacatttcaattatctattgactttgtcgacaatttttgttcattattctgaaagatgaatatataattatataaagttaaatcatgttatggagttgaagataacaaatccttccattacaaagaaaggaacaactgaacaagcatccatgatctatcaccggagcaaactaaatatagaaatataactaacttacccttagttcatctcctcgagtgttccaattactttacatgcacgtatcaaaacatatctcccaaaatataatataacgaaaaaagcaaaagtagatttccatcacaaagactcgttggtgaaaggaatctcttggaatttaaatgaagcattaccggcattttcacgttcaaacctaaacacatcttcatccggtaacggcatcacctgtctgtctccgacttgtcgtggcggtaaaacctcaccataccgtgggaactccgtggaatccagcgtttcgttactaaacaacaagtgagtcccaccgctgctactccttggtggcgaggagaaatctgccgtggcagaggagtcccagaggaagacatggaggcctatgtggacttttggcgtgacggtgcatgtgacactttctggctgagcgatactttgtcgtcgcaccgaatcgctgctgtcgaggacaccatccaaggcaataccttttggttacccacacgagaaaccaccagacgacgtagtgccttggccgattctctgtacagtgtgctcaagccggatcttgcagctggtacacactcgtcttcctactacgtcacagatgagacggaaatgaaaccctgtaccagaaatgtttccaaatgttaaaatgttttgtatgaattcagaaatagaaatcgtgtgtgaaaacatctaatttcatgaaaaagtcatatgtgtgaaaacatttaaaagtcataacttcataaaacggagaacatgattca

SEQ ID NO: 36161 - DNA, 2733 bp, Arabidopsis thaliana landsberg
taaaaaaaattagttacacattgcaaagttgactaagaacttgtactcaaatactgaactgtaaccattagactacatttctatgcaaattcggccaaaactaaataataatatgattagcggccgcaagcttatgttttgcttgctaggccttgtggccggctaaataacctaagtatataatcaagaaattacgttaacgaccggataaatcagaacttaattataatgttaaaagtaattaaatgaatgatgaccctcgtcgtctctcctcttaaaacacaataatctcataaatacaatttttatatgaagtcttcacaaactactataaatttcccaaagttgttctctctctttgtccactcgaagactcatggggataagaaggcactcgtgttatgggcttcggggctttttattgttcgccctttcgaggactttctcacatgtttggacttttgagtctaaatgccttatttcctcacgaatgacgtgaacattttttcgtcctgaactcaaaagtatcaattacacacttcacactactaatggtcaagttttttcgtatttgaaactacaaatgtaagtaatatatgcgataaatttattatcctctgctagtaaaatccattaaaaaaaactaccaatgtgggtgtatgttttctttcagtatatataaagagttttcgcagagagcacatatcgatggtggtacatcaaatctgatcattcatatctaaataattgttgttgagttttctatatgtgtggaacgttagattgcttaagctagaaattgacacaagagtttgatcaccgagttcctgcctcctggcctctaaccggtacgtctcgggtgggaactgtctcccacaacttttcactatcaagcaaaaagtattacaagcactaatagaggtttctcttctccttgttacaaatttagaaattaactcacacacaaaagacaatagaaaaggagactataccgacacgaagactatgcccatatcttcacaattgtgctattatttaccgttctaatctgaaaaaaaaacagcgcacgtaggagaattgggcacgaagacatgaatgggacacataaaggatcaaaagagtcatcatgggtctgccatgatgaaagttaagaaagttccaatacgcgcgaaacaagattgaatgcgacttctctctataccaaaaacgaatctcccaagtcccaagtgaatattgtgagccactaacttgttattaacattttgagacaaaaaaaaaatttgtacgtgtttttgccaaacccacttggccatgaccaatcagaaaaagacaaggaagatgtgtatctatgtgtaatgaggaggccacgccatcagtttacttgcacttttccaactagacgtggcctctcaccgatctcaacctcactttcctctcatttctcaaattttattggctacgtgtttttgtgtttagcgttcaacccaaatatcgatatattcttcttttttttccacatttttaacgatttcgagcaaaataattcgatttatttgtataattttaatatggtagttttacaaataatgaaacgaatgaccaactgatttgttaggtgttacaataaatatggaaaaaatctcataagtttgaaaacatttattctgaggaaactttttcttccccaaaagaaaaaaaaagtttaaagtggaaaaaagaaaaaaaaggaataaaaagtttgaattcagtttttttcttttctttgatagatttctttctacttatttattactctactacacaccacacaaaaacaaaaataaaataagtaatcatagtatcccataaatcagtaaagataaataaaatccagaaaatactgggcctatcattttccttcaccaactctataaatgaagagataatcctacagttacacctcaaaccaactccatctcacttctcaagtcttatcatttattcatttctctcttcttcatcgatctttggcttttagaaaacctaatcagaaatggcaacggcgtcgtttaacatgcagtcagtgttcgctgctcctttccgtgtattgactacacgcaacatcagaaacacaaaccaactcttcttcaagaggaatgctccggtaggagtcagatgcatggctcaggtatatatatacactaacctcatagtccttccacttccctacgttacttatttgacttttaatcctgaccgttccttacattgactatttttttagggcgatcctatcaaggaagatccttctgtgccctcgacctcgacttcggccactccaccacaaatgccacagtctcctcctccaccagttagcaagcctaaggtatgatctaatgatcaaagtcattaatatatatcactagctaaaaaatgaagctaatgaataattttcttattgtctaggtgagtacgaagtttggagatttgctagcgtttagcggtccagcacccgagaggatcaacgggagactagcaatggttggattcgtggcggccatcgccgtggagttatcaaagggagaaaacgtgtttgctcagatctctgacggtggtgtcgggtggtttctaggaacaacagcgttgttgacgttggcatcgatggttccgttgttcaagggaataagggcagaggcaaagtcaaaagggttcatgacttcagacgccgagctatggaacggtcggtttgcgatg

SEQ ID NO: 36162 - DNA, 3011 bp, Arabidopsis thaliana landsberg
  unsure (1)..(3011): unsure at all n locations
cgagctatggaacggtcggtttgcgatgctcggtctcgttgcgttggccttcaccgagtacgtcactggtgggactctagtctaaggctaaagctttttgtttgctagtttaaggacaaatttggagaatgattatgtaacgcatagtttgatttaatactatgagttttaaacagtgtgtcaacatgaatcaaaatttaaaaccatgaaaaaaacattataaaaatttatttgaaaaagtacttcaaaagttttcttataagataatgtgaatggagaagaagaagtaaaaaataaattttagcttctatccaaggtttgagagtttatgcattcttttgaaatgaatcaagagccaagaataattaattatgctcttccttgttattatcgaccaatagagtcatcatgtgtctgccataatgaaagtaaagcaagttccaagacgaaacgaaattgaatgcgatttctctctaacaaatcacctcatctcaattctcaagcccatgggttagtctcatcaaagcccaatcaaagcgtcaatgcttcccaagaacaaaaaaaaagaattaagatgaacaaaaaaaaataacttaaagaggaaagatatggtcaccacaacactacgagatagtacgatcgatgaatataatcggaaagatttgagtggctcaattacatattgcttatacgacgtcgttttgagtagcatcatttcgttaatatttatgttcaagactgaaacaagacagagaaaagagaatctccgaggaaaacaaaagttgatggcgacgtctaagcttcaagctctctggaatcacccggcaggaccaaagacaagtgagttatcacattgtttcatcaataatatattactctttcttcttccgtttcaattaagactctattgaaacgttactattggaaaatgttgaattgtttatagtacagttcttgaccaaaaaaaaaatctatatcactttaaatcctctaatgaataatatattctaattgtaaaaagtttctctctttttttgttgttgttgttgggtattaatcagttcatttctgggctccaacatttaagtggggtataagcattgctaacattgcagatttccagaaacctccagaaaatatttcgtaccttcagcaaattggtaaataactactactcttcagaaatctctaatctttcttgttacaatttttgttataatcatattatccataattattgtattagctgtgacatgcactggaatgatttggtgtcgttgcagcactataattactcctgtaagttttgtttgcttttcgagttttacttttgtgattggattcttggttttggtttatcgatctgattctttggacttttgtttttttttaacagaaaaactggaacctgtttagtgttaatnnnnnnnnnnnnnnnnnnnggatataccaacttactcgcaaaataaagtgagaatcaaacccacttttttgttttgcttgtgttttaacatagataacaaattcatcagcttactatataaaacatttcttttgctaagttaaacgcaatcagaaaggtttggtttggcgtttacaatcagcaaaggaaattttgcttaatatgtaatgcaaacaaagagtcgaagctattttaaactcgatttttatgatgattgtctatgatagtatgattttatcttttgatacatcaatgaaatgcttattaattttttttttgatattaggtatgattatgtatctgaagcagaggctgctgttgaaattgaaggatgatgatgatgaaaaagatgaaacatttgacatgtgaaaatgttcgttcattagtactgtcttgttaatggacctctagctctttttcagcatatgccaatgtttggatttttgtttagatagtggatggtacgtttcatgctcttgctaaagatttttatattatttgggagaagattgattgttgggtttatgtaaacccaagattaatcagtaattagatcaaaataactctttatctcttaaaaatgttacctctttatcaatgattcaatgtatattaaaatgtcaaaggaactaaatatttcagtcattagtcaatagtcaaattataatcttcaaatcaaattcaatgaatatttttctctttgtttctgttttaaatacaaaccaaaattattttcttcaaaagaatctcttacccaaattcatttccaaacttactgtctttctataaatagtttcacaattttttatttttcgggcaaacatttcccgccaaatttctgagtaaaatccctcttcttacacatctccctccttctgcgtcaccatcttagagcatccatggcttcttctccgagttccaaggcaaaaaccttcaaatccccaaccaaaactccaactaaaatgtatcgcaaatcgtatctatctccatcttcaacttcactcactcctccccaaaccccagaaactctcactcctcttcgtagatcttctcgtcatgtttcccgtaaaatcaatctggaaaatgacccaatcgatcttccagaaagagaatcaatcgaagaaatcaatctaattcgaaaacctagaaaacgaaccaatgatattgttgttgcagagaagtcgaagaagaagaagatagatccggaagtttccttctctcctgtttcaccaattcgatctgagacgaagaagacgaagaagaagaagagagtttattacaacaaagtcgaattcgacgaaaccgaattcgaaatcggtgatgatgtttacgttaaaagaacagaagacgcgaatccagatgaagaagaagaagaagatccagaaatcgaagattgtcagatctgcttcaaatcacatactaacacaataatgattgaatgtgatgattgtttaggtggatttcatttgaatcgcttgaaaccgccattgaaggaagttcctgaaggtgattggatctgtcaattctgtgagggtaaaaagtcaggtca

SEQ ID NO: 36163 - DNA, 2039 bp, Arabidopsis thaliana landsberg
  unsure (1)..(2039): unsure at all n locations
agttagtcatgttcgtctttttctcacgtgatgattgtctagtgtttgcttagttggtgattacgcttttgttttttacgtggaggactcatgtaaacgtggaaaactttagaaatatttgtactatactaaaaatatacaatagtggtttctagtggcatacaagttaaagactcagactcagacccacctattatttgattttagctntggtaatccgagactagtagctatgtgagctattttaaatttcttgtataatgattatttatgtgtacatgtgtaatcatgaagacttagcatacccaaaaaaaaagtgaacagagatttcttgtgacacaagttaaagatttgcataatattaataccaaaaacttgagcactttcgtcatgggcatgtgaaactaagaatatggactagtctgcttaatttctctaggagttttgatttttcttgatttcaatggttatgataaatgttagcgcgtctgctttttcttactttctatatgtttttggcttttctaaagtcctagttcttgtttttttcttgataatatccataagcgttcttgcttttcttgaatttcaatgtttttgttcatttcttaattatgtttctactgtatttcagaagtactaggtagagtctagagtcactataggtgtcaacgcttttgagaaggtaacaacggttcttgacgaattgcttgaaattgcttaatcaggatttccaaagagactagaagttagcccaattgtatgcattcactctgcaaactatggctcggtgttatcaccatattaagttggaaaaacagctcaagaatttaatagatggaaaatatataaatgaactttaagttggcataggataaagtcttagaaaatcactatttctttatttatgtatatcaagcataatgttcatagacagctggagatatatgtagtgtgtgaccaaggaaataggtttccctgaatcttaacaatgtaaataaattagagagatctatttacagcatcaacgagattatttactaaattagagataataatattcggatgctgcccaatgtttctttgtaaatctattggatgttgaaagcgaagtcgtgcgtgttccatgcaccattctgatagaaatagcaaaccacgactcctcgttcctttggcaccgactactcaatacgtcgtcatataaaacatcccaagacgccccacttacgagcctattaacaactcatagaaagatttgaaaaaaaacgccaactaagtacttatcaacaatgtcgatgcacaaattaagacaaaaaaacgtccaatgaatattaaacatgcctgtgtttgaaattgtcttggttcatcagcagcgtcagttggttgttgtctccctctccccattggaaaactacgctcccactcattgttttgaaagaatataagttttgctatttctatctcttgctttgtgttgttctattgtagtgattttgtgctctgccccctctctgtttttatagccgagagatgattcaactgtgctctgctttttcctttacttgtcaacttcttccaacgtaagtaccccaacgcgcttaagagattctttatccaaatttggatattatagcttttgctgtttcctgtcaccatcattcatactctctcctccattcactaaccaccagaagccgtgtctatgtgtttctactttactttttacagattcttgtatgtaaaacgaaaagattggcttctacgtagcataaacttgccatactaagtaaaatggaagaaacagagagtttcaacattctctaaattgttccactttgctctataggtttttctgattgagtaaggaggactcaagtctatgtggaaccatttagaaaatacgtttactaatctgagtaaaattgaattgaagacgttaaagaaaacacgatggagatgatgaggtgacagctaggaactttctttaattggtngtgtgatgagtttatatatgtcatatcggttagtcacgctcgttt

SEQ ID NO: 36164 - DNA, 2596 bp, Arabidopsis thaliana landsberg
  unsure (1)..(2596): unsure at all n locations
aaggccacctatctactattcttataaaacaatgccttgagtttgttgacatatatctcataattagcaatgttgaaatttttcttaaacgcttttaaaagaaacttatccaaaagagtgtcagatttaaggcaagagacagagattggttttaatttgtgttatcttgattaggcgttaaaagccataattatacaaaaagatgatataacctaaagtacataatgtggttaccatggaaaaaccaaaaggggcaaagtagagttgactaagcttgactagtagctattgactaagatgcactctaataataagaatataagtagcaaatatatttaacacccttccttaagttggagcatatacatcaagaatgcccagcttgcagagaaagaaatggaagtctctctttgtcccaacgccttagtgagaatgtctgctaattgttgttgagaggacacatgggtagtagtcataataccagcatggatatcatggatatagtgaccatccacctcaatatgttttgtacgtttatgttgaaccggattggcacttagagcaatagcggacttattgttagagaatatgcgcataggtcgatcttgagagacaccaagatcatgcatcacctttttaagccaaataagttcttgagtaagaaatgtcatggctcgatattcgacttctgcggaagagcgagtgatagtcagttgtttcttcattttccatgagatttttgtgtcaccaagttgtacaaaataacctgtgagagagcgtctagtaagaggacaggcggcccaatcactatcacgccaaccatgaagctgcaaagtcgatgagctggaaagcaaaaggccttggcgtggattggattttagatatcggaccacacatatcgcagcatcccagtgttctgaaagtggatgttgcataaactgagccagagtgtgaaccgaatatgatagctcaggacgggtaacagccaagtatataagtctcccgactaagcgacgataccttttaggattgggaagtaaaacagacttggataaggacagtttgtggttctgttccatcggaaaagaagaaggtctggcgcctaacagacccatttctgatataatatcgaggacatatttcctctgagacaagtagaaaccatcagcattccttgccacttcaattcccagaaaatatttcaacagacccaaatccttcatatgaaagcaagattccaaataaactttgaaacgttcaacagcgatggagcaactgcctgggatgatcaagtcatcnnnnnnnnnnnnnnnnnnnnnnnnnnnnnnnnnnnnnnnnnnnctgaaaagagagtagtccgatagagactgtgtgaaaccatattgaatcaaagccgtggagagtttcgagaaccaacatcgcggagcctgcttcagaccatagagagatttatgtagacgacataccttagtcggatcatcagaatgaaagccctgaggcaacttcatgtatacctcctccgtcaaatctccgtgtaagaaagcattatgtacatccatttgatgtacatgccagtcacgggccgcagctactccaagaaacactcggaccgtactcatcttagcaacatgagcgaaagtctcatcatagtcaacaccctcttgctgacgatttcccaaaaccaccaaacgcgccttgtatctctctattgtcccatcagaacgatacttaatcttgtagatccatttgttgccaattgcccgcttcccagggggtaaatccacgatggagaatgtttcattggcttggagagaggtgatttcatcagacattgcatcacaccaaactttttcaatcacaactctattatacgttgtcggttccacaccagcagttacagccgcaagaaaagctttatgagccgatgagaaactgctactgtcaatatagtgctcgattggataaagagacgatgaatccgcaactacatcaggttccacggtaacagtatttgtaacaaagtgttttagagttaccggttgctgttttcggcgatgaccacggccaagcggttcagcctctgggggatttggctcagagttcaccggtgttagcgttggttccattggaagtgaaactgtggattctattggctgttgcgactcttctggtgttgtgtcgagagagacaccaactagggttgaaagagaatcatctacgtgggcctgagtgggagataaagttgctgggccttctgaagaaacaatagtcggcccatttggtacaagagaaggaattaaacttgttgtgtttaattcctggcccatacggcccaaatcgtgatcatcttctccacgagggacttctgcaaaaggaaactctgtttccttaaagatgacatctcgagaaatcatgaacatttgatcatcgagatcaaacaaacgccatcccttttgtccatgaggatacccaacgaaaacacatcttttcgttcgagaggcaaatttgtcgcctttatgattctgattgtgggcagaacacaaagatccaaaaacacgaagatgagcataattcggcgccttcttatgcagcagct

SEQ ID NO: 36165 - DNA, 6715 bp, Arabidopsis thaliana landsberg
aattttccataatataacgatgatctctttcgtgtcaatgcccattttccatataatctcaaaagatgaaaaattgatatgaaaatcaattgaaacaagatccttttttttcagagatctagcaaagaatctggcatcaaagaaaaaaactgataaatggagtatctaaatttagagaagttatatcgtctggagatcctctgtttcaggatgttaatttttctttctttctttctattgtttacttaagagggaatttaaacgacaaaacagaaaaaaaaaagttttgttagttaacgatttttttttttttgtgtgttaaacgccgaatctatttttctagaaactaataaaaaaagtatacacaattatgaaactatttgaatcttaatggtctagactacgagaaacccaaattagaaccaaaaattaaattttttgattttttgacgatgttaacaaaattaaatttctatgaaaaatattcagaaaatttatagccatgaaactgaaaatgattatcttttgggccattctgtgagccctagaagccaaaaaaccagattcgtggcccatatccaccgtttaaaacctgtggtcaagaaaaaacctaaaatctcatcaaccattacctttcatccacgtcacacaaaacaccattgctttctatacatctcgccacattggattctggccttcagataatcttcttacaaaacagaactccggcgttatcaacggtggagataactctctttattcaaatccaacggttcatattcgaagtcgttgttcccagtaaacctcgcgttcatgacccaaaaagaagattagataaacccaaaaatgtgttgcaatgtcttcctttgatttcctcaatttctagggtttcgaaagaaaaaataatgacttcaatcgaattgctaagtccattgattcacgataagtttcgattctcaacttgttgtagtactagtagtttattgtatttgcatgcttcgagctttttccgagatcgatcttttggttttcgtcagaatccgaatcgattcgtctccaattcatcgattcaacttcctcaatcagttccagggtcgataaaccaggaaaggtttaatctttggcaagggttttcgaggaagaagagtactagtagtagtagaacgattgtgaattgtcaagaaggtgatcagaaagctagctcaagtgaaggagaaggaaagaccaataaggataaaggacggaagcaaggtaagaatgagttatggtggtctaaagggaagaaatggcaatggaaaccgataattcaagcgcaggagattggtgtaatgttactacaattgggtattgttatgtttgttgtgcgattgctccgacccggaatcccgttaccgggttcggagcctcggacacagacgacgtttatgagtgtaccgtatagtgatttcttgagtaaagttaataatgatgaggttcagaaagtggaggtggatggttttcatgttttgtttaagttgaaagatgatgggaatttgcaagagagtgaaactagtagtagtagtattaagctctctgagtcgtctgagactatgcttagaagtgtggctccgactaaaagagttgtgtattccactactaggccgagggatatcaaaacaccgtatgagaaaatgcttgagaataatgtggaattcgggtcgcctgataagcgctctggtggctttttcaactctggattggtaagaccgtgaattataatggcttgttggctttaggaaacacttagattgaaaaggtttcttcttttcttgttttttgtttttgtttcagatagttctgttctacattgcagtgcttgcagggcttctccaccgatttcctgttaacttttcccaggtttgcatattcatgataccgtaatgtggttgtttaagttaaggccatgtgcacttttcttaaaagctgtgaggtatacacagagtacaacgggacagctgaggacccgcaagtctggtggtcctggtgggggaaaagtttctggtgatggtgaaacaatcacttttgcagatgttgctggtgttgatgaagcaaaggaagagctggaagagattgtggtaggttcatttatccttatatatgctctgcactttgctgaaatgattgtcaaatgtttctgtaattgctttgtgttcatgctcttgttaatttctcttacacttggtttaactgttgcaggaatttctcaagaatcctgataggtatgttcgtctaggtgctcgtcctcctcgtggtgtcctactggtgagtttaataatgtagttacaacttatggccatttcttaggtggtttatgcgcaatgtttggttactatctttagaatttatggctttatttccctgttttggtaggtcggtcttcctggaacagggaaaacccttcttgcaaaagctgttgctggggaatctgatgttccattcataagttgctctgcaagtgagtttgtagagctgtatgttggcatgggtgcctcacgcgtaagggatctatttgcacgagccaagaaggaggctccgtcaattatatttatagatgaggtgtgaatacaaaatcagtgttagattacctgctactttgtatcgatgtaaatctttacaaatgtatttgtgtttctttcaatttcagatagatgctgtcgcgaaaagccgtgatggtaaattcagaatgtcagcaatgatgaaaggaacaaaccttgaatcaattgctcactgtaagtttgtaattatgcacttttcctgccagagttgctttcttgatctttgcattatccatttatatgttgggaactgttttacaggagatggatggttttgacagtagctctgcagttattgttcttggagctaccaatcgagctgatgtcttagaccctgccctgcgtcggcctgggagatttgatcgtgttgttacggttagtagaatatctggctctgtatgatcatgcaatgtaatacattgtcaaagctatctgacatttaatttcaggtggaatcacctgacaaagttggaagagaatccattttgaaagtgcatgtttcaaagaaagagcttcctttgggagatgatgtcaacctagctagcattgcctcaatgacaaccggttttactgggtaaaaatttgtattttattcttgaccgaaagtttcttacctgcttttttctgtatatttcgttaacttttatgtttggtttttatagggcagaccttgcaaacctggttaatgaggctgctttgctagcgggaaggaagagcaagatgactgttgataagattgacttcattcatgctgccgagcgatctatagcggtattgtcttattctttctgagtctctatcgtacctctcatcagaatttgtttccttacattgcatcgtttgcttcagggcatagagaagaaaacagctaggttaaaaggtagtgagaaagctgtggttgcaaggcatgaagctgggcatgctgttgttggtacagctgttgcaagtcttctttctggacagtcccgtgttgaggtaaagcagtgagaaccgcatgttgcttgatactcattttttacatgtgttaatgctctgctaatacatattgtatttttagaaattaagcatattaccaagatcaggaggggcattgggctttacatacattcccccaacgcatgaagacagatatttgctctttattgatgaactacatggccgcttggtaactcttcttggaggtcgtgcagctgaagaggttgtttactcggggcgtatatcaacaggtgcacttgatgatatcaggagagcaaccgacatggcctataaggcagtagctgaatatggtctcaacgagaaaatcggacccgtctctgtggctacgctttctgctggtgggattgatgactctgggggatcaccatggggaagagatcaggtaactctattctacctaaacttcttgttggtctttttcaaaatggaaagcaaacttaacatgtcatgctgaatttacaggggcatctggttgaccttgttcaaagagaggtgacaaatttgttgcaatctgctctggatgttgcgttgactgttgttcgcgctaatccagatgtattagaagggctcggtgctcaactggaaggtaacacatgacacctctggatactaaaactataattactgaaacaaaacataagaccagtattctaaagaacggctagtttgggcttataatctctgagatgggctggttcattccaatggtatcaaaacaacatggcatgatatggtcactagactcacatgttgatggtcttatatcgtaatttttatagctcctaaagtagttgactctgtttgaaaacatgtgattggtttcagatgaagagaaagtagaaggtgaagagttgcagaaatggttaaatagagtagtaccctcagaggaacttgcagtgttcatcaaaggaaaacaaactgctttacttccagcacaagctagctccagttaacatctacaaagcctataaaatggaaagatgtatgcatcgatgatgattctgcctcacttagaagaatcaaaaagctaaaaggagctgcgaatcctgggcaacgatgacttagtatgtatagaagaaaaaaaaagcttttacttggtatcaaacagagcatgtgttgttgtatttgctacctttttctgcaaagttattggcaattgtattgttgttccacttgtatatatacagagaccatttatgttaatatacaacttcgtatggggaaagatgattccatcaagtccaaaatgccaaaaccatgcacgatcttgtctgatcaagtatgataagatgtgagattttaagaacgtgaagcttttcatattgtattctcaatgaacgaagaattaataattagagttagaaatgcagattacagagattacacaatttgatctcatttcttggcaaagaggcccaggccaccgaagccaccgtccttctttggattcctgtgtgttaattttcgtgtggctttagttacaaagggattagattgtcagcgaatctgagccgttggatcgttttgacatgagctttccataagtgtcttatcctttgtttctctcatttttcacatatgtatcagacatttaatcaagcacatatctacgtgttgattatgttgatgatgctgagattatgttgatttagagaatgattagtattgctgatgatggtacacgttagtaaacatatgaatgtggaactgccacgaaagagggagcagagttttgggctttcttttggttatgtatttgcattcttgttgtaacaaattctcttataatattaaaagcattgtgaaagaaaccaaatatattccacatagtctatgcttgaagaattttttttcatactataattttctattacttaagtttgtgtaatttttgaaaagagaaaattgatattttttaggattgggtgatctgaaatttgactacaaaaattttcttggacacagacacacagtcacacaaataagctaattactaaaattttatcttaagttgcattcactttgcaaattaatattgaggtgtgtattatatagactattagtgtatggcgtgatggcaaacaaaaaaatcagtgtgtgatattgtggactagccaaaaaaaaattctgatgatttttctgcctaaataatttgaattgttgagaccgaaactcttactaatatactaacaatgtaacgcgacaaataaaacattgttgagaataaaatctgaaccctcataactatagtctatagtaaccgtccgaattcaaccacatatgtatgatctttgccatttttgatcatattttccgttgcgttttctttgaattttctcaatatattttagtgttttgatttgtacttttatctaatttatataattgtttttcaaatgtttcgcaattgtgcgtttaagtattcgactcgaagtaaacccagtttcttagaatgggctaactgccattgaccaaatctttatccgcgaagaaagatctttagcagcgaggcttatttcatatcaacaaaagtatatatttatctctaactaaattcctacaattatttcaaaaacatagaaattaaaatttgaaatgcctattcttttttggttatacattgcaaaggttatgtatgtaatttctgatcttgaaatttaagttctttagcccatatctagttgatgttcacgaaatattgtcgtttactctcgtttttatatataaagcatgtacatataacatataatcaatgcttcaaaagaaaaaaataatcataactaaattgaaacgggaaaactaatttgctttcgtgttctattatgccaaactgtactcacaatagtcttatcttatcgacccaaatttaatcttcccaactacttactcctaattgaaacaaaaatataacctttcttactatagcctatatttaaaaaatatctatgatttctacatttatatatatacgcacacggcacatacctctcattcaccatatatgcctcttaacaatctctccacagaacaaaagcaaaaagcctaaaccgggataatggaagctctaaactctatcttaaccggctacgccgtggcagccctatcagtctacgctctttgggttc

SEQ ID NO: 36166 - DNA, 2218 bp, Arabidopsis thaliana landsberg
aacaggttctaagttatatcatgttggtccaaaaagataagtgattcatctaacacacgtcaacatgcagaactggcagattaacaacataattctgttagtagcatcccaatcagctccaaattctaaattaccataagaaaatttgaacctaaaagagtgaatcacgtttttgtgaatatagtacaaagatagaaacgcctgtgacagaaactgagccaatttcatcattgtgagctctttgttgcatgtaatattttaagctacgtctgtagtatcatcaaagaacaacatatctcaaggaacccacttatagataaattttgaagtatgatcactcttctattagataaaaaaaaaaaagcttgatggtacataatgccaaaaagtcagtgcttatgctgtacctttctccatggacctgacttggctgactttggaacttgcttgtcagtctgttccagaaggaatcaaagaagagtatacattattttccttatcaggagcataaaaatcatctgtgataccaatatttcagtatatacatcatgccacatcatttggtggcatatattgcaccaatatttcactatagacatcattagctgatagtatcagtgtgttacctcttcaaatttctcaaaattttgggtgtccaactcatcattaacttggggaataaaggcagctttcatttgatacaattttccccattctgtgcctctaaaccaagggtgaccctgaaagaaaccagtcaaatcgtttttaagaattgcacacaatgatcttacataagggaactttgaatctcaaagttgaacaacgcatacaacaccttaatttcatctgctccttttgttccaagcctttgttcaacattgcataaaagcctacaaataagatccttggcttctggtgatagtctaacctcatctgggaatttcaagtaatttctccaatttactatctgcataagggggaagataatgaatcgagaagaggtaagtttccacattagaattaccaaagagatacaaaaagactaaaattaaatgtaagacttgaaatcgccagtctgccttcaatattaaaatgaaagattcaaaaaggaatggattaattacctttctacatgttgttacagggtcatcggagtaaaatggtggataaacaacgagcatctcatacataatggcccccaaagaccacctgcactcaaatgaatgcatatgagtcgatgatgaaagaaaatagatatgtgtcgatcaactagtagataagcagcaagaaaagatgaaaagctgatcatgaatattttatgtaatgttaacgtagataaccctaatgatataataaggaagggttctatggagaatatctataagatcattaatgtaacgcaccagtcacactctacaccgtatcccttcttcagcaacacctctggtgcaatataatctggggtacctaccgtagaatatgcctgtttcaaaacaagagcacaccaaagccagagagtttagacataaacccaaaggagcagtttaaagcataccccaaagattgatatgataaataaaaggttttaaacagagttttgtactacaccagttttcttctgtttatctgccaatgctgcagctgttccagtgggctcttccaacgccttccacgacgtcctatcgagcagttctcatcaccatcgattgattcatttatattctcatcattcaaaggttcatttacgttcatagccgaaatatttctacaatcgagaggcttacaaagaccaaaatccgacagcttcatatgaccatacttgtccaacagaagattgtctggttttatatccctgcaaaagatctacctcaaatatatatacaatttaattctccattcagaatgatgagaccagaaacaagtagactaacctgtgaacataattatgcttatgtatggactcaatagccaaaacactttgggcaatgtaaaaccgagccacagtttccgtcaaagtctcttccctcataagcaaagtcatcacatcaccaccagacagatactccatgataaggtacaaatattctggatcttggaacgaataataaagcttcacaatacagtcactagcaacttcggctagcaagttcctctcagctctaacatgttcaacctattcagaacgatcaaccagatactatacttaaagcccgaaatt

SEQ ID NO: 36167 - DNA, 1909 bp, Arabidopsis thaliana landsberg
tatataataagtataaacgtatgtggagatttagaaaatcctccgtaacccatgaaaattaagatagtcacacaatctcatatagtatatgtatgactatatggtcctatgaacaagtttcaaactaaagcaataagcaatatgatagtcatgaagaggcgtatgcagcaacgagctcgatgattatattgtggcataagctgcagatggggctttgacatactgaagcgcaccggcttcagacaaagcttcgataatctgcttaagtgtctgttgcttcttgtggctgtccccaatgacaacattcttgtaatcaagagactcgtcagtgtaaatgtccccccatttcttgaccagcatcttaatgtcttctctgtccatgttctcttcttctccagtgaatctgatataatacaacaaacaccttttagaaaattcaaatccgcaacttttctataaacaaattaatattaaaatagctcatatagtataattattactcctaaagtaaagctcatgagaggtatgtttgtgaattttaactattttcggtagataaaactttgttagaacatatttctaatgtgaaatttttagatatcccaataaaatttgcaacatttagttctacgacttggtggtactttcaacttattgttagttatatgcaaagatattattttctgatacatcaaattgaatatattaaaattttggcctacagaaataaataaacttgattggacgtcaatatataaacttgattgaaaattatttgaactagtaataatcttacctccaaggtttagcaccagcagcacagtagtgaacaactttgacttggtcaagctctatattctctggatgcctccaaagcattgccaagaccaagttatacactggtggtattggcttgtatatgtccttgaagtacatattcaaaaaatcctataacatattcaaatgattataatttttaagttgcaatatccataattaataactttttgtgggtttctataacttaataattttatctatttacctgttcagcaaaaagagtgggaggcacaattttgaccttctccaagaggttatgataagtggagaggttaggctcgtaaacgaacataccggcgttgaagtacaaaggcggcttaagaccaagcttggcctttggccatgtcaccttgtccggacactgttgccagtaaccgatcttgtactgtggcgagtgactccatgtcttctcgcaaaaacagtccataactgcatagaattggccgtctggcagatcatacacgtgatctatgttgtcgaacacttgtatgtcaccgtccaagtatctcatcttgttgtactccacgaactgcatccatatataattttattatatataagaaattagagatataaaaataatcactataagtttttttttttataaatatcaacttcttttggaacaaacaatgaagtacataataatattttggtcatatatagaatttactttgctagattttatattcttataaataaaaaacttaacaaacagtacatatttatatttgtacctcccagatacgaagcttagagtagttgatgacatagtaagccatagcaaactcggtttgattctccggtggataaaccggctctatctccttaacaacacagccttgatccaccaactgtttccggtgatcctccggtacatccggcaaaaccgccaccacgagtgggtacttgctcttagctttccttagccccttagcaagacccaccacccctttcacgtagtctccagttccagcaaggaaagtcacgtacgccctcttttctccgccggttgctgagtggaccggtacggtgagtttggtattgatctcaggtgccatcttctttg

SEQ ID NO: 36168 - DNA, 3128 bp, Arabidopsis thaliana landsberg
aaccctggaagcatacctgatcagcccacacatggagcaatataccctgtcacatctgttatgcaaactgattacaaagcttttgtggagattgttttcgagaattgggaagatattgtccagacctggcacctcgacggttactctttcttcgtggttgggtaagttaaacaatcatatttgcatccacacggtaaaatttggtagcattctctaaaccaagatagagttcttaagaaaatcgaaagttgtgtacattttcaagactattgactgatgatcacttggtaacaattaggatggaacttgggaagtggagtgctgccagtagaaaagtctacaatctaaacgacgcagtctcacggtgcactgttcaggtgagagtcctctaagccttatatattttgatcacacagttagccataaaagctcagtatgggttataaaaaggtggatcattggacgaattcgtgtaggtgtatccgagatcatggactgccatatacatagcactggacaatgtaggaatgtggaatatgagatcagagatatgggaaagacaatacttgggacaacagttctacatgcgtgtttacacaacctctacttctctcagagatgaatacttgatccctaagaacgctcttctgtgtggcagggccagcagcagccacagatgagcgatatgagtggaatggaatatattgatagacttgtaatgatttgctaagtttatattttttttatatttttattttgggattcatgtttaagaaagtcttgaaagagctgtacggtgtaggcttttatcctgcgtagtatcaaattgttaggaacaaaagggttcgtctctgaatagttagtattttactatttttagtcaatattacgacttggtgaattctgaaacctagtgagagtattacttctaaaatccagtatcttttggattttcgtttgtctttgagagtattactttgggaactaacttcttatgatattgtatgttcaaagatttttcaagtcaacaaaatataggtgtgaagaaaacgaaaattgtttgactgcatctttgaacatgttattcaactttgcatttccattaatatttttttctcccaaacatgacacaacacatatataaacgttgtcacatcctcttcgtcaaacataaaaaatggaggtcaaaagcgtgaacaccacggcgatgatacttggtctattttttctaatcagcttcgtcgctgcggaagatccgtataaattcttcgaatggcacgtaacttatggtaacatatctccgctcaaggttgcacaacaggtgatttatctttaaccgtatccacaccaaattatttgttggtttgttaattggatttaagtttgtttaccattttatctactagggtatattgatcaatgggaagttcccaggaccggacatcgccgctgttaccaatgataatctcatcattaacgtattcaaccatctcgacgaacctttccttatatcatggtatatatgtttctttttccttatacaaaaaaaaaacgaatgtctagttttcctttgtaatcaatctcttgcttagagttaaggctgtaagaaaaagacacataactttagtttatttatgtgttcaaattcatatattagatatatatgtcagttgcatctatatggtataaatcgttccgtaatagataacaaccaaaaatttgggatcatatatataatgcttcaatttaaatttagacggtgtatatatttgcatggcgtttatacatgaaattcttagcagaggactcattgttcctatttgatgtctttttgtaaaggagcgggattcgaaactggaggaattcataccaggacggagtgtacgggacgacgtgtccaatcccgccggggaaaaactacacctacgctcttcaggttaaagatcagattggaagtttctactacttcccctctctcggctttcacaaagccgccggtggatttggagctattcgtatctccagccgccccagaatccccgttccattcccagcccccgctggtgattacaccgttctcatcggtgactggtacaaaaccaaccataaggtacgattcccctcttacgtatggcgcaagaaaaggggaaagaaatagtagggcgataaaatgattatattttgttgtcgggttagacttagagaatgggacaaagtgtttgtgtttttaacaaatttggaaagctgcatgcatgatgtatatctgtacttaaacgttgttgcttgttggaattttggaattaaaaattgtaatctctccttataggacttgagagcacaactcgataatggtggaaagcttccattcccggatggaattctcatcaatgggcgcccgtagtggcgccaccctcaacattgaaccaggttttgctttttcacctttcttgtcttgtttattggtgattctctgactgtaagtgttaataagttatgatgtgagtttttctgtaggtaagacttatagactgaggatatcaaatgttggattgcaaaactctctcaacttccgaatccaaaaccacaagatgaagttagttgaggtcgaagggacacacactattcagactccattctcttcgcttgatgttcacgtcggtcaatcttactcggtccttataacagctgaccagcctgcaaaagattattacattgtggtctctagtaggtttacctcgaagatccttattaccgctggtgttcttcattacagtaattctgctggacctgtttctggacctattccagaagcaccaattcagttgcgctggtcttttgaccaagcacgagccatcaagtattgtttcatttttttttattatttttttttttttttgtattgtttcattctttcattgacaattacaatctttgttagttacttagtggtatacaaccgtgtttgagcgggtttgtttgtgtcttataggaccaaccttgcagcgagtggacctaggccaaacccacaaggtacataccactatggcaagataaaagtcactcgaacaatcaaacttgctagctctgctggaaatatcaatgggcaagcatcgatacgcggtgaatag

SEQ ID NO: 36169 - DNA, 4885 bp, Arabidopsis thaliana landsberg
atgcacacaaggaggtgtgtggcgtcatcccaccaaatatgatgtaagatttattggtgatttattcatctagaaaagaatgatagtcatagtagtaatcgaaatcatgtgcaattgtaattgaaattttgttctagtggatttgttatgagataggtccaagggacgtaggaaaaaccgaaccctataaacaaactttctgtgtagtttactttatgctcaaacatacacgcacacaaacgtatatgtattcggaaatattatagacgtagccaaatatgcgtttccaaatttgacacatttaaacagcgacaaatattttatagaatcatatattatacactagctacaaaacagataaatttgttgtacaaatatattttttcacaattttatagaatgagattaaatatgactaaaagtggaagtttctttagtaaagtgtttgaccaatggtttgattaataattagacaccaggtatgaagtgcaatttttagtgaatacgtttttttacagattactatataatttttaatgcgtgtgaagttgtgaaccagtagattgttagagaaaatagatgaatcatacataagctgaaggcctaatatcagcagactaaatatgatcgagtatgtgtgtaaaagggtgtgtatccatgacattgatagcatgaaaacataattaaaatcaccgtggaaaaagtcagacggaccctagttttaaaaactagcaagataaagtactcttcaacgacgtctcaacaataaattagggtttaaacttcacaaaaagtgttaaataagaatacatcaagtataataagaatgagcttcttaatgaatggtgtcacagtgacagcattaatttagcaaagacctttggttttcaataattgaattagtctggattaattatttttaaaaaaatatatttccaaaatccctataaatagagaagggaagcaccctcttaggtactactacaaagcaaaacaagcaaagaaacacaaagagaaagcaaagaaacactttgagaccaaaatgacttctactgtgattctgggatccccctccgccgaggtaaaagcttcgtactggttcccagatggagagacccaggaccccataacctcggccgaaaccattccctcagctctcttcactcaccttttctgcgccttcgccgatctcgacgctaactcccacaaagtttttgtctcccaagcgcacgaattcatattttccaccttcacggaaaccgtcaagattcgaaaccctcaggtgaagaccctcttgtccatcggcggaaaaaatgcaaacaattctgcgtttgcgtccatggcaagtaaccaccagtctcggaaaacgttcattgattcttggatttttatcgctagatccaacggattccatggtctcgatttagcctgggagtacccgaacagtgatcatgagatgaccgactttgggaatctagttggagaattgcgagcagcggttgaggccgagagcagacgcagcagcaaaccgactttgctgttgaccgctgcggtttactactcctcggtttacaagacgtttacctacccggttcaagtgatgagagaaagcttggattgggttaatattatagcctatgatttttacggaccggtgtcgtcctccaaatttaccgttccaaccgccggtctgcacgtttcttctaacaacgaaggtataattaagcatatatagttgtagtatataagttaagaagggatacttcggtgatcaatttttttttttttttgtttaacttggaactatatattggtactttggttgataggtccaagcggcgtctctggtttgaaacagtggattaaggacggacttcccgagaagaaagcagtcttgggattctcctacgttggctgggcctggactctccaaaacgataaagataccggttataatgcggccgctgccggcgtagccaaatctgaggatgacgtatctgaggacggttctataaactatgctcagataaacaagttcataagggatgaggaagcagcaaaggtttatgaccccaaggttgtcggacattattgtttcgccaagaagatttggattgggtacgaagatactcagagcgtcgaggccaaagtgagatacgctaagcagaacggtctgcttggttactttgcatggaacgttggagctgacgataacactgttctatacaaagcaggttcgcctctttctttttttttacataaatattcttgtttggttacgatactgaatcgcagcgcaaattataaagcctatatatgggattaattcagcactaccgcgtctgtgatatatgtatattgagatgtacagcatccaaagcatggggtgtttaattgacaaccatcggaggaggtgcggacacaagttatagagattgaccacaataatcaaagacgagtgaggaattagacatgtcggcttatgtgagatcgcaaggacatagataaacacccctctctacttatctcgtagaccgacataaaaataaaacatgcttgttgtatcatatccttgtaaacaaacaaaaaaatatttatccaataaataaaaatgtttgatttctatatatatacttctttcttaaagaaatgtttgattctatatgaaaaataacaaacaacatgcttgctttatattattaagagatcatctaatagaaaagctaaaatctttataaacccccaaagaaaagaaaagaacaaaagagctgaatcgatatacgagaaaaacattgaaattctctttaactaatcactcaaaggtgaactaggcctggcctttggcacaaacccaagatacaaaggtattgagcttccaaaataaataaacgttttagtaacaaagttagacctcccaaaaaatttgttattgcaaaactaggtcctatgtttctgaaacttaatatttaatcttaattcttaaatttatctatttgttattgcaaaaataggcctcattcccgaaactttaagatttggtctcaaattttaacttttatcaacaagacctataacaaaaaaaaaatgttttgtattgcgcctcatatttatcaggaccgacactgggtgaaccacaatgaaaagagattccagaatcaagcatgcagcatatcttttattatctatctactcccttctgactaacttgtacgcaataaaattgtaataaaggtgcttgtttttaaacatgcattcttttatgactaacagattgatttacaatctgatttccacattttaataaaaatgttgtgacaattctagaccaaatctagttattacattttgaattttcaaagttatatgagttacgataatgttgtacacatgcacggcttatacaatagtcttataggaatttctcaattaattaatgtccagtttaatgaagaatgtacaatattattgtaatgcatgtgaaccagttcattggtagacaaatagacttgttaatatggagtcatggacgatgaccggagtctttttttattctatggactataaccaagtctttttttatattattcctttttagagtattaatttcatgttggaaaaaactataatataaaaattcccactctagagatatgacatacctattagacgtataacttggtaaaatattcatatgttgttgatctgtaacatatgttgttgtttatatattcttgccagttgccaacgttgattgaaatcataatgggagtagtcaaaccaaaacttttataattatattatacgttaaaatcttcaactacttgactaccataaattaatttttaaacttaaaaagagatttgtgaaataaaaaatacatcaactatgatatgaatgcgctccttgatgggtctggtgtcacagtcacaacatttaacaaagactttggcagtctttgaaaatcaacttaaatccactataatccttctaaattcaaagttgaaaattttcttttcttttaatatttataatacctcttcccaaattccctatagatagagaatgaaagcaccctcttagtttgtactgcaaggcacaacaaacaaaataacacagaaagcatttcgtaaaagactttcagacaaaaatgtatacggaagtagttaaagcatcctattggttcccagatggtgcatcatccccaaccaccggaagcgtagtcccacaatcctcagccgtgctaatcgattcaactctcttcactcatcttttctgcgcctttgccgaccttgaccctcagaccaacagcgtcgttgtctccggcgcttacgaacaagaattctccaacttcactaaaatcgtcaagaagaaaaaccctcacgtgcaaaccctcttgtccatcggcggaagaaacgcagataaatccgcgtttgcgtctatggcaagtaaccccacttctcgtaaatccttcatttggtctgcgatctccagcgctagatattatcgatttgacggacttgatctggcttgggagtacccaaaagatgatgtggagatgagaaactttggtcaactacttgaacaatggcgagaagcgattgaggacgatgctgaacgcaccgaaagaatgcctttgatattgacggctgcggtttactactctccggtttacgattctgtttcctacccaattcgagagattaaaaattttttggattgggttaaccttattgcctatgatttctactcttcatccacaaccattggttcacccgccgctctgtttgatccctcaaacccgaaaggtacaaatattagtatgtgtgttccagtggggtttgaaaaaaaactaatattacatactttggtttcgggtctagaggtt

SEQ ID NO: 36170 - DNA, 2611 bp, Arabidopsis thaliana landsberg
caaataagtccaaaatcaaaccactgaaggaaacaaaccccaacaattttttattcaagataacacaaacaaaagatctaaagaaagtgcaggaaataaaatcctaccctgtcatgatcagttctcacctgttgccagcgggattgaattggcctgcaaaccgaaaaaaagaataatgtaagtaaagtagatgtagacatcaaaagaataacagtgggttacactaaccaaatcacgaaatttcaatgagtaaaacatctctaggtaacgtcgtgtttctctcctttcgagcttagacacatgtttccagaatgcatagactccagccagggtaagcagtctctctgagtacttcttccatgtgtacctatacatgcaaaaatccttattaagccatcatcttgttgaagcgatacaagttgtattgttaagcctgtcaaggagaatgggccaacctttcatagattcgcttgagccctccttcagagattttaacccaatgatttggattggtgttacaggtctcaaagaagctgaccaaggtagctgcaacctggtctggatgatatgggtcaatgtggaacccagaaactccgttttcgataatctctgcgggtccaccatgacaggtagcaaacgttgggagtgcacaagtcattgattccacaaccgtaagcccaaatgcttcatagaaagcaggctgtggtggaaaaagagagattagatggtctgctaactcaacaaaaaaaaaaatccaaatacaagggaatttatctcatgttacctgaacaaaaacaccttttgtgtctgcgatataacggtaaagctcaccatttcgagcacggttcatttgagcagctatccacctaaactcaccgtgtaaatcatactgctcaatcaggctgtgcatcttttgtatctcagccatttcctctctatccctggactgattcacatcgatgtagccaccgactataaaaagatttgcaagctctctaagctggctattcttggcatagcattcaactagcccagtcaagtttttcaccctgtcaagtcttgccatagagaagatgattggcttcgattggtcgctcagtaaaccactgcatcaacacaagaagattgagacatgcaaaccaatcttaatattatgtggttgtctgagattttttttttaattgctaaatcagaattgttgtaagaggacttacacatgctcatcattctgttcggcactaaagaggagttcttcaattgactcatgaagggcagtgagtcttctttccttgtcagaatatggaaagtatatggtcatatcagctcctggagagactatattaaacttaggatcaaagacatcaattccatgaacaactcggtaaagaccaggcatagtgaaagctgtgtggctctcgtattgcccaacattgttcttgctgtgacaaaagcaaaatagtttctgttggcatcaaaccacaattccagaggcaataacatgcctttgaatagcggatgaatttttaccttcccgcaatctcttggtatgtgctggtgatgatgaaatcggcattattcatggcaattagatctgcagtgaactgacttgaaaagtgatacttatcttcatggtttctccagtaaatgtcagactcggggtacttggttttctctaaagcatgagcaatattacactgcatccgaaatggtaaaggagagatcagaacaaaagacaacaaaaaagaatttaatattacagagagcataaaacccgtcaacctgtatcacacctagcttactagctaacaaagaagcaacgagatttccatcactgtagttgccaatgatgagatttggtacaccctgcaactccgcagaaatttcatttgatgcatcctagtcacattgatagaagtaaagtgttagccaatacatagggcatgcatacacagctgaagcagattgtcctatgtgatacgaacaagtatattctttaattcaccgtaactttaagctaaccacatctaagtgaagaagcaagaataatctgcagaagttacatagaactctagctactaattaatgctaacctctgcaaaagtctccaggtatggccagacatcaaaccttgagatccacttgcgaagaattcccttttcagtcctaaatggtattcgcagaatgtgtgcgtgttctgtaccactaactctttctaacctctggttgcacgttgttccctttgcttcgggtagcagtcttgttacctatataagccagcatagaagcataaaattttattggaactcgaataacaaatactttcaaacatgaagaacgaagtagatgatagtgagcaagcaaatatacaatgagaatctttggaataacttccagtccttgcttctgtatcctaaggagcatctcattttccaatgcacgtacttgatcaagaatgtagacaacctgcaaatcagaacagtagattgtaagttgaatcaacagaggatcaccaagttctaagatatggaagtttccaactaaatactgtatacctgtccaccagtatcaggcagacccaagacattggcttggccaaagtaaccataggaga

SEQ ID NO: 36171 - DNA, 8067 bp, Arabidopsis thaliana landsberg
  unsure (1)..(8067): unsure at all n locations
acaaacaaaatcacaagcaatccacacaagaaaataaaaagatagataaaaaccattttcacgtcggcttctgaaatctcgtgatttttttttgtttctcttatgaaaaaaaaaaaagagtaaccaatcggaaaaaaccttttagtcacatagaaaaagattttggcggttggaaacagaagggctctctcttcttcgttaccgttttggacccgattccttctccttcgtgtttccttattactgactctgactcgttctttcttttattcattctcttgctttttttttctttaaagattttcatcgggaaaaacaaaacaaaaacatgggtttcttcaccagtgtgttggggatcatcggttttgtaatcggaatccctatcggactcatccttggtttcttcgtcttgatttattctcagccttcacaccaagaggtaacatcaatcaaacacacttgtctcatctttcgttttgattttgttcatcgttcatgtctgaggcctgttctgtttgtttgaagatggtgaatctgagagcctagttttgaattaaagcttgttacttttcatcaaagtttgagactttcgtttactgttcatataattactgattacatctacttagtttatgaatctgagggttaatgatttaacacattgcagtatccacctgcgaggccactagttgagactagtatcagtgttcttcttgatcttttaccagacattccattatggatgaagaatccagattatgaaagagtgagtcacattttaataggattctgttgttagacttaagcatctaagctagattactttacttgactgattctggtttctattgtttacattaaggtggactggttcaacaaatttatctcatacatgtggccttacctcgataaggctgtttgcgggatcatccggagttctgtacaacctttatttgcagattatattggcaccttctgtattgaatccattgagttcgaaaatttgagtcttggaacgcttccacctacagttcacggcaaaaccttgtctcatttagctcttgtgatctcttaccgttgtttctcaggtgttaatggttaagagattcctcctgcaggtgttaagttctatgagaccaatgagaaggagcttctgtttgaaccatcaatcaaatgggcaggcaatcccaacattgttttggtgctaaaggttctgtctttacgaattagagttcaggtcagtgagagtgaaactgtcaaagaatggaacataggcatctccactgctgaatatctaaatgttttaactttgcagctagtagatctccagttttttgcaatagtgcgtgtagctttgaagcctcttctgccgacattcccttgtttcggaatggttgtagtttcgttaatggaaaaggtaagctacctctcacacaagagtgacacaaaatagattgaaagtggcctgctctgctaaacatgattctcttttgcagccacatgttgattttggattgaaagtgcttggtggagatctcatgtccataccggggcnnnnnnnnnnnnnnnnnnnnnnnnattgatgatcctcctatcggtaggagttggtttatctagtcaaatgagatgctcattcatcggtctcgttacagagaacttatctttatctaatgatttttgcaggaaactattaaaaggcaagtttcaagcatgtaccattggccacaagtgcttgagatacctattcttgattcttcaacgtaagtgttgtctcaaggtttatcaactagaaatcagaagatctttctgtttcttttcctctgatgatgtataagtttaattctgatgtagagcgtctgtaaagaagcctgttggattactacatgtgagcattcttcgagctcgtaatctcctcaagaaggatttgttgggaacatccgacccttatgtcaagcttagcttaactggagaaaagcttccagcaaagaaaaccaccataaagaagaggaacttaaacccggaatggaacgaacactttaagctcatcgtcaaggacccaaactcacaagtccttcaactagaagtctttgactgggacaaggtccatgcatctaatgatcccatttcttctctagttcaacattttatgccattcttactaaagcggctctgtatctgtataggtcggtgggcacgacagattaggaatgcagatgatccctttgcaaaagattaacccgggtgagaggaaggagtttaatcttgatctgattaagaactcaaatgttgttatggattctggagacaagaaaaaaagaggaagattagaggttgatctcaggtatgtgccattcagagaagaaagcattaagcgtagaaaagagagcagagaagagaaatcatcagaggacgatgattttctcagccaagccggtctactctcggttgcagtccaatctgcaaaagatgtcgagggcaagaagaaacactcgaacccttatgctgttgttctcttcagaggagaaaagaagaaaactaaggtaaaattctaaatctgcattttgctgagaagctacttaagaactattttgagttatattggctacctttttcttgatcagatgctgaagaaaacacgagaccctcgatggaacgaggaattccagtttacactagaggagcctccagtgaaagagagtatacgcgttgaggtcatgagtaaaggaaccggctttcactttcgatccaaggtaaagatctcatgcctgttaaaatctctgttaaagcagacagagacatttcaacttattatacctttgcttaatctctgtataggaggagctaggacatgtagacataaatctggacgatgtagttgacaatggaaggatcaaccagaaataccatcttatcaattccagaaacggcattattcacattgagatccgttggacaactagttaacaaaactgataacaattctggcatgaagttttgttctagtatggcctttgtaaaatcttgcatgtacttgatcaaaatcatataattttaataaaatttcgaagtacatattaaatgttgatgttttctgtacgtacgtatattggagtaaatcttcttcttatgttttaggaattagttagcgctaccaatttcgtctagttgcttgtatctacgtggtctggtgatatattgattgtttgtcttcaatgtagttttttatggcccaaattgaggataaaagtaggaaactagactgcataccaatttgtcctttattcgacgctggtcgccagtgtacaagaggtaccatgtgtctataccgccatgagatcaacagaggcttagattgtaatggtcgttctgggtaagctattctacatacatatatagatgtatatatattctcgagtctttgtttgtttgtgtgtttcatgtatttttcttcaccgcaggttagaaaacccatttgtactcgaggtgcttgcaagagcttgtaacacgggccctttgaaaccaccagaggatcaaagtattaaaactctttacatccgtagacttattaactccagtgtcctcgagcaggacatccgagaccatttctgcccctatggtgaaatcgaatctattgttatcttcccccaccgaggaggaggcacctgtgccttcctcacttacactacccgtctagctgctgagaaggccatgcttgagctctcctcctggactgacatcaaaggccagagggttaaactcttgtggggacctactgaaaaatggcagcacaaaatgactggtgctgccatttcttcaacccaagaggttggttcttctagctccaatactgctgacttggtaactaaattagtacattctctagaaaagctttaattaaacctttttgtgccattaaaaaagataaatgttattaaacaagttttatatgtcctttttccttttagagtacaccacagagaatagaaaatacacacattccaccagttaacaatttacaacaaccccaaaggcaaacgtgataaaacaaataaaagaaaacaacgcaaacgtttaaaattcaaggttgagaaaggaacgtcgcgtctgcgttctggtcgctgcagtagagacaagggtgttgatgaaaccctagtctctcaagcacatcccttgccatcatcactagttgcttgttcttcatggcaccttcattttcgttcaacaccctttgaatcgcgttgctaaacgctccgtacgctttcccgttcccaacgccgacgtcagcagacgtctcatccgcctgacacccgctcatcaatatccctgagtccacgtgtttttcacgggccgtcatagtctccaaaagatccattagatccattgccggtaaccgaaacttaagaccagcatcgcggccaaagagctcaagtagatgtgtgccgatgtcggaagttgtaattccggtgagagaactcaagtggtcaaggactgccttgaagggcaaggcacgtgatgttatagtcttgttcgttgtctcaatagccggagatatgttgctggagaccgaagagggtccgatctgttctttctccttgtcgatgagaccaccactatggcaagaatcagagatcatggtaaagcttgttcctttaggaagttgattgaccaattctcggaaatcaacatctgtgatgagattgaaatcacaaggaacaatagcttcgtcttgtttaaaaggatgagcagatttaaccgaaggaatacgagttccatggccactgtagtggaagaacaagatgtctccagatccggcttgagctttatccaccatcctacgtagagcagccttgatgttggcacctgtcggctttacctttgattctggctcgtccgttagcacctcaatgtcgtcttgtttgaatccgaaacgtgacaaaatagtttctttcatggctagaacatcattgatgcaaccgtgaagctcgttccttgtgttagggtagttgcagccgacgagaacggctagtcttttcttgaccatcccttgttgatccattgagtttctggatatgatttcttaaggtttaagaggtaatttaaacaactttctaggcaaaatgttttggggtttcttgtgtacgtgtgtttagttttcatgtgcagtgttgtggttttggagctaatgtgtatttatgattgaggtttcgtgtagtgaagttcaagttacatacgatattagtatttatattttcaagtctagtttgcttttaagctatggaacattttttaatggcttactcttgacttattaatgctttcaagcaagaaactaaaccttaaatcagacttttgagaaagacataattaatcctaagtcatggattcatgattaatttggttaacttggatatatacgtaacttcaaaagggaagtcattttcccaaatatttagacctaatccatctagctatctaagggaagagaggagctaattaactttaaatgctatgatatacgaatgtatataacgtatacattgttgaaaataatgtcaattgaccaaactataatttgccttaatcctaaaggaccgtctatatacttcgtgcacgcaacggaaaagtctttttgagacgaaccatttatgctattagcaccatcttcacttcacctacgagcctaactcttgacttcatatttacaagttatatccccaaaaaagcaatcaaactttcaatggtaaactctttaacaaaataaaaagcattcaaattaaaagataaagcttttagtaaacgaaagactaatcagaaattaaacgtcttcatcaactgagaatttttctttttggttttatgttataaaaacacatgctggattatgtttttaacaaataaacgaggctaaagcgatgtccgataatacagtccgttatattgcatagagttgtttatattcctatgcatgcgtttattatctcttgggtaacggcttggaatcatctcccaagttcccaactcgtgatagattaaggaattggggcatgaatattcttgaaatttttgtctcctctgtaatgcacctgaatccaagaaccacttgttttctgaatgtacctacaacaaagacacatggggcatcttcttttgctcaattcagcccgcctacaatctttgaagattgatgtttccatgggacctcaaagaagtagtggatgaggtttctaaagaaagaaatcgtataaccaagtgttttgtggtccattggtttgttcgagtggatagaggattcgctatgtgggtcaaggctacgaatctatttcttgactatagacgccttaaatacaacatacaagtattgaggattagtttgggtttcactccgggatttactccggttattacaaaaaaatgtgatcaatattgtgataaatacaggacacattgattttgtttacttcacaaaccataatcttcattaatcattacacaagttatattaaccaaaaaaaagaagaagaaaaaacagagcaattttacacgagaagcatccaaaacacaccaagataactggagaaaaccggatctaaaccaagaacaaagatttggtatccatcattgccttggtctactcgtcacgcttagtttagaactgccattgttgcacaacacctttcccgcgacgtcgttttgaacaccaacgctcttaaccggttgcactaaacgcttatcgccgttaaccataaccgccttctcacaatgacagttcaacaaaccggttctcttcttatcgtaaccactaaatgctgtagacgatgacgacaaggcaattcttgagaagttagctgcaacggccgaggccggctcggcggtcataacgctccaagtaacacttcgttcgcttggctcgtaaccgtactcagacacggtctcttccatcgagtcccgtactggtggagcccatggacgagctgcggtttgagtagagaagctctctatctcaaaaagatcggagcttgcgtcgcttgtggcttcttcgtctatgatgactcccttgggactcgtaggattcagaaccggtttaatcggaagcagagccggttcaattcgtaccggtttaatatgattcaaaaccggattcttgggattttctgataattgtgaagtttcgtttagagttgggaagctaaaattactaactggagctctagcttctttgtttgcagtgtaatcgatggaccgagtcacagtgtttgaagggatcgttaatcttattggctcaggtgaagatatcgtctgatgactatgaactattcggttcgagacgattcggtcagaaccggttttgggcactgcgattcttggtttggattcttggacctgaacggacttggagctagaacatggacaagtcctgcgtctaaaaaaccatcttggtcctttcttgctgcttctacgtccatctctgtccgatccttggcggtttttgttagagagcaaaccggtttggctgttccagctagcttcagaggatgccgtttgtcccacggtaaaagaagacacttttgcagatgcgaccgaagaaaatcttggaccacttagattcctcgtctggcatcgactatcgttgcttccgttttcgctaaagtaacttcgagcttcgaagatacttagctcagtatcttcattctccttttgttgttgttcgttgttgtctggtttgaggtaagaagagaaggagacatcgatgtcgtttgatcgattctgaagaatcttgatgtaaggatcaagagcatcgcgtttggtcgcgactacagtgacagtagtttgcgccattgaagtatcttttgcttctttttctctttttctggtagaagttgaaaaaacagagttgcaagttagttcagtgctctgtctcaagtctctcactttgtgtatatatatatatactcgagacttgagagaagtgttataagttagttatgtacggaacagttatatctacctcgtttagatgtcatcaatacattctttacatgtaaaaaatttaggtctatataggtttcc

SEQ ID NO: 36172 - DNA, 2317 bp, Arabidopsis thaliana landsberg
caagagaatacatgtctatgtttcatgtccacagcccacaggtaggtaaaaattaagtcctttagatatgcataccatgaactagagcgagtagcagagaagatacttttaaggatctccatcacgcctttctcgggattacctttccaattgaatatacgaaaataactcagttatgaagctccgaagaaataaggagaacgaaatcaatttggtgacacagagtcacatctatattgttgagcaaaaactatcaaacagtttccacgatttacctgggatcattaccaagaggctgcacaatttgcatataaccgaggccatactatctatatcaattgattttaaacctgatagagaaaaatgtacaagatattataccatcaacatatcctatgcatattcattcattaagacatatacatttatctggagaaaaaataaaaggccctgaagaacaactgaaaatggaaaaaatacaaagctagagtgacgaagaaaaagataatcatctatacttgaaaaaacttcacaagtaaaagtgtatgcaggccaccgaccatagaatcatcattataatatttaaaccaagtattctctttgcagtaactggtcttagggtggcaagatatgtcagactagttttattacttttcagatatttatttagtatccagtagttaaattaaacatttgcagactcaccatctgtcagcgctacattctctagatactcaacagctgacatgaccagttcatctgaatgagaaatcaaaccacctaaaagtgcaacctataaaacaaactttagtacgtatattgctttgaagtgggagtgtaaaggactgaaaaagacaaaaatattacctcagcagtttcaagataaagatttaagtgtttcgtgggagatgaaatagatgggatggtcacttcgctaaatgctaggcaagatttaacaaagttgatatgcttctttcctgctttcagtgcttttactgccaaggtgttgcttgaacgaacaagtgtctcctgcagccagtgaccataagcaggaaaaatgatcaaaatgtttgataatttttgtttgtgtcaagctctaatgcaaataaacgaaaaataaacacacccatagcaagaaaaaaagcatgtgggaagcatgtattgctcttgttccctctctagtctctatacttaatatctaatagtctctgtactcctcccttctcataaatgtaccatatcatatgtagccaaattttgcggtaatttctagagtttttaccaaattcacattaaccttcaaattctattatgtataataaagatcatgcaccagatggcagatacattgctgcttgaccctcaaatccaaggctaagtatccgtcatgaccaagcaagaaaggactagataaatagcaatgcaccataattaacttgattaccagataatcaactctctttaagaagtaaaagaatgcacaagactggaactatacagggtcctccacaggtatagcagtattaaaagttaaaactgataccaaagaataattaactttttgctgaccttaagttcatgtatcccattaaaggcctcacgacactccgccaaaaacaataaatggcgttccatttctgccccatagtcaacctaagcatcaaaagtgaagtcaaattcaactaacttgacaaaaagggcaagtgctcactgatttcgtaataatgtaagtggaacttaaggtaccatctcaacaaaacgagaaattaaatgtgatgtctgtctattgtcatcatcctttatgttaacgaaatctgtagcatcataaagagcctgagaaacttcaaaaagcaattgcactgctgttgaatcacaaatgcatccatccctgcttcaaaggaaaagaaacatgaatactttaaccaagaaagaaagaggatcacaaatgcttccaaatacataaacgttatgtatgtaaattaacgttcatcaactttacaatggtctatgtccccatccagtaagtgtgagatatttaattcaaattaagaacgttggaaaaacaaacaagccttaccttgtacccatgttaagaagatgtttgtttaggctgctctttgaagtcccagacataagatccagaatctcgatgaaatgattctagaagataaccaaagaagttgtttagcgaaactagataatgatgtcatccaaagaaatacaaaacagctctatttggatgctgtgtactgtttcctgaaagcctgaaagtttataaaggaaaagagggaggaaaagttttaccagaggaagtact

SEQ ID NO: 36173 - DNA, 2930 bp, Arabidopsis thaliana landsberg
gattgagagtggtgtcatcaagctaggagagaaacaggttttcaatttatttggattagtcttcacctttgtttttcctgcaaatggcatttaactgatttttgttgttcaattctttcatttttctaatcatatcagtctgagagcaaatgtgccctagtgtatggacaaatgaatgagcccccgggtgctcgtgcccgtgttggactgactggtttgactgttgctgagtatttccgtgatgctgaaggccaagatgtcttgcttttcattgacaacatcttccgtttcacccaggtgagccttattttcatctagattttcagcacctttgtgccacaagcatgatctaaaacactctcttgtgtaggccaactctgaagtgtctgcgttgctcggtcgtatcccgtctgctgtggggtaccagccaactctggcttccgatcttggtgctcttcaagagcgaatcacaaccaccaagaaaggttcaattacctctgtccaagccatctatgtccctgctgatgatttgacagatcctgctcctgccacaacttttgctcacttggatgccacaactgtgctttcaagacaggtgtgaactttctccttctgatgcttcttttcaatataattctgcatatcttgtaatgcttcataaatctgtcatctttatactttttctttcctatgtgtagatttctgagcttggtatctaccctgctgtggatcctttggattcgacgtcccgtatgctctcgccccacattctaggtgaggagcactacaacacagctcgtggtgtgcagaaagtgttgcagaattacaagaatttgcaagatattatcgccattttgggaatggatgagctaagtgaagatgacaagctgactgttgcccgtgcccgtaagatccagagattcttgagtcagccattccatgttgctgaaatcttcactggtgcccctggaaaatatgtcgaccttaaagaaaacatcaacagtttccaggtatgatacatacaacaacattttgctataatcatatgattatcaaacattttgctttgaattcctgaaagctttcaatgctgccttaacatgtccgcgtattagaagtttagctacaactgcctttcagtatagaagaattcattgtgatgtctatgtgtagatggactaaatttactctggcgtagatagatttgttattatcaaatagaatatttagagtaagagtaagtgaccaaaatcatcttgtgtttgtttcagggtttgttggatggcaagtacgatgatctttccgaacaatcgttttacatggttggaggtatcgatgaggtggttgcaaaggcagagaagatcgctaaagagtcagcagcttagaagctggatccatctcttgcatatgcttaatacctgtctgtttcttgtgacaataacgaaaagaaaaaaaccactgcctgtgagttacccacaccaagcggaatttgagttccgtatttatagtttctttcgaattccttgagagctacgagatgatgctgaacatacccttcattcccttgtactcagatttttggttcatttacttccttgacttgttgaaataaaggttaagcaagtcttgcagattatgatttcttgatctcagactttttctttcagaaaatgctgcaagtcttggtacgccaagcaagtataattatatctaatgtccgaaaagacaagcaaaatagcatcccataattcgaaaaatatcacgatattcaagtattgcatctacgtatatactactgcagcactacatgcattgttcattataaagtgtgttgtatatagatgactggttaagcaagtcttgcatatgatgatttattgatctcaggctctttgttttatcaagcaaaatagcatctcataattcgaggaaatatcaccaccatattaaaatattgcatacaacgacggcagcactacattgctcaggataaaatgtgttgcatatctcggtattttaccaaaaatatgttgatttttatttgaaaaataaaatacatactatcattttaatatttatcgtgtctaaatgtatttttttaaaaattatctttatacttttctaaagatagttaaatgaaagcaacttggaaatcttaaaatcatcaaaaatatttgtgtttaataaaactttgaccttgcaaaatatatttttgttaactaaaaatctcaaccgatcccccaaaggtcaacctcatcttttttttttttttttatcctttagttttctattatgataaagacccaaataaataagcccattattctgttttgttcaaaataagcccattatctgagcccaccaaacattggaaagtttgagcttagattcaggtgctgtagttaccctagcttgcatttcctcttccacacacccactcatggcgtctcgaagagttttatcatctcttctccgttcatcttccggtagatctgccgccaaattagtcaaccgaaaccccaggcttccttctccttcacccgcgcgtcacgccgctccatgtagctacctcctcggccgcgtcgccgagtatgcgacctcttcaccggcaagctctgctgcgccatcctctgctcctgctaaggatgaggggaaaaagacctatgattacggtggcaaaggtgcgatcgggcgtgtttgtcaggtcatcggtgccattgtcgatgtgagattcgaggatcaggaaggattgcctccgatcatgacatctcttgaggttcaggatcatcccacaaggctggtgctttaggtgtctcatcatttgggtcaaaatgtcgttaggaccattgctatggatggtactgagggtcttgtccgtgtaaggaaggatctcaacactggtgctccgatcacggtaagtggcttctctg

SEQ ID NO: 36174 - DNA, 2686 bp, Arabidopsis thaliana landsberg
cctaacttgttttacttacaaacctctacaggaacattggtgctgatatgttctttattgcgcggctagttcgtcccatggattcagtctcttcagagaaggcaaagctggcggtcgtgagaagctgaagcaaaaaactaagttggaatcatccaaggtctctctctatatactctgttattagctgaaaacagaggattaagaaacagagcagaacccttgctgaaacatttgtattttcttcactgcttcaggaagtaaaagctgaatcaatcaagccggagacaaaaacagagagtgtcaccaccgtaagcagcaaggaagaaccagagaaagaagctaaagctgagaaagttaccccaaaagctccggtaagcttactctttctgctgttttatctacataatgatccaatctacataatgatccagtagtggtcaattgtgttaacctatggaacaggaagttgcaccggataacgagtttgagaaacggataagaccggaagtaatcccagcagaagaaattaacgtcacattcaaagacattggtgcacttgacgagataaaagagtcactacaagaacttgtaatgcttcctctccgtaggccagacctcttcacaggaggtctcttgaagccctgcagaggaatcttactcttcggtccaccgggtacaggtaaaacaatgctagctaaagccattgccaaagaggcaggagcgagtttcataaacgtttcgatgtcaacaataacttcgaaatggtttggagaagacgagaagaatgttagggctttgtttactctagcttcgaaggtgtcaccaaccataatatttgtggatgaagttgatagtatgttgggacagagaacaagagttggagaacatgaagctatgagaaagatcaagaatgagtttatgagtcattgggatgggttaatgactaaacctggtgaacgtatcttagtccttgctgctactaatcggcctttcgatcttgatgaagctatcattaggaggtctgagagaaggtataaaagaaattttggtaaaatgcaaaagctctaaatcagtctttacactattttgactgatttttgttttgtgttggatataacagaataatggtgggacttccttcgattgagagcagagagaagatcttgagaactttgttgtcgaaagagaaaacagagaatcttgatttccatgagcttgggcagataacagaaggctacagtggaagtgatctcaaggtctgtgtcttctctaaccataaccaaagactgtcgtgtaaaatcgttggaaactgactgtttgttgaacttttgtacaaacagaacttatgcatcacagctgcttatagaccagttagagagctgattcagcaggaaagattgaaagatcaggtaaaagactaagaatggccctctcttgcgctctatattcgatcaaagtctcttaggattttgaaatatcttggtggttttaggagaggaagaagagagaagaagcaggaaaaggcacagaagaatcaaaagaagaagaagcagaagcttctgaggaaagagttattacattgagacctttgaacatggaagacatgagaaaagctaaaaaccaggtctaactaaaatcttatctgtttgacaaaaaaaaaactaaaatcttatctcattttgtcaagaaaagacaagaaaactaaaaaccctaactagttatgttgtcgtgttattgcaggtagctgcgagttttgcatcataaggagcaggaatgaatgagctaaagcaatggaatgatttgtatggagaaggaggctcaaggaaaaaggaacagctcacttacttcctctgaaaattgcaaacagatattgatgtgtgtttcttgatgcacacgatatatatataacaaagagatcccgcatatcacaaagaaagagtcttcaattacttgttaggccattccatttttagataactttttaggtttcatcttattctctttctttttgtgttttatagaattttctacaaaactatgattcttttttatatgttcatatttatgtcattgtgaatgtgtagttaatgtagtaaagatattttataaaaatattatgattgtttgttacatagaaattttcatatacatttgaactagaaatcatatgaaaagaataacacaaattataccaaaccaaatattataccggttccggtttgatttggaattaagtaaattacacaaaaccgatacaatgattaaagaaccttgacgttttcgatgtttgtgtgatctccccagaaaagagaaatgaagagataccaaaatctaaaggtaggagaagctttctccaaaaatcgtatttacccatttgcttgcaatgaactaagctccatattgaatcttgcttactctctatcacccaaaaatgtcaaagctttgatcttccaagataccctctccgcttttcgtcttcttcccgagtaagtacttcaaaatttcatctcaattgcgagtatttagagttttttgaggctttaatttagggttttctgtgttgagattctgttcatgttgtagttgaattcttagggttgttagaatcgattaaaaagtcaataaagttgggaactttcagctaattatgaagcagaggattgatctttgaatggctttactttgt

SEQ ID NO: 36175 - DNA, 7876 bp, Arabidopsis thaliana landsberg
gccacggctaaatggggaacggaagggagtctttgctacgcggtcccctcatcgaccttgtcccattggcctcaccgttgctaaggttttctgagcgtaatccgttcctcctgttgttaataaagacatattgaatatcttgaccaaaagtacttaatggtgattaatccttaggtggaggaaatccaaaaggataaggttctcctctctggtgtcgatctggtggatgggactgtaattctcctttcccttactcatgtcagctttttgagtaatgagtagttcgttgattgttttgacggttttggacagccggtgctcgacatcaaaccatatttaccatactcggacagtattcaaggagcctcagtgccaaactgggtaaaggtaatgtacattcttgtgaattgatctttctaagtttttcgtctatgtaactgaatactgctgagacttgaagatcattgtgagtaactgcgtccttacctgagtaggtacaagtaaagattaaaacaaattgaatatgaatttcaggaggactgctcattggctgtggcttctgtgactttctcagataccttctcttcatccatcaccagctgctggaaactgatagtgagtgacttctgacctgatcatctcttctccatttactgttttaacataatagttgctatgcgcgcaggaaaagaagtctctatatagttcagcagatgagtttaggagcttgatcacgcaggtcctgtcatgggacatacgatcaatgtcgcaacggaacaagccacaagatacattggatgaggaaattgtttatcacttggttctggagggactagacgtgtcttacatgatagataatgaaagtaatattctcgttcaggatgtttctcttcccaaaaacctgcaagatgttgcaggaagctgatctttgtaagatttttagtggatcctctggacatgaaatttctatagagtagcttccccttggcaagagcattcaccatctcttacaataaataatgtgaaagtatgacaatgaccttggtaagacataaacagttaaaacgttttataataagaatttcagatacaagagataaatcatttgtacatgttcctattgacaagtatctccggaactaatgttaacaagcacgagacgatgaaaataggagtggatgaattttatagtaatagacttgtacatttatcctggagccttcatctccatacaaatctccactgcttgagttcgttcatcccttctccttctgcaaaactagtagcaacatgcaaatgcaaaacaattagcattttgtgcatgattgcaagatcatcaaacacgcttctttcaggtcttccatgctcaaagctctcaacgttatgactctctcctcaggtacttcttcttttgcttcaaatccctcttcacttgctccttccctgaatttaatgaaaaccaccattgagatattcattcaggtctagatggttgtatctgatcctcttcattgcatttacccatcattccaatgtgtaaaaatctatttgccttcgtaccctcatgccatagataattaaatcacgaattgaagcaacaactgccttgcaatgagctcatcagattgcagcttgggtgctccaccacgaataaataccacactagtcaaaaacttctttgcaaccatccttctcgtctgccagtcatactttgttgcatctgtcacttcggtcacatgtccaacatagcattcaaaatacacaatgattctcccactttatagtcttcaagttagcataagtgagcatgcctatgcaccctacttatccctttcttctttatcatctgtcactcttagcaaccgctttgcaagatccatgtttgctgagctgttacacatgtaatccatgaccgtacacgtaagttctttgtccaggacaatatctttatccaccagtttttttacaagttcagtcaacttgtctgtttctccctgtgaaatacaatacttcaacacagaatcacaaatatgagcatccggttcaaagccgctatcaaccattttgtcaaagaaactgatagcctcgtctaaatatccaagtttcaggaacctatttatcaacttcgaataagtaaataaatcaggggaaagaccagcacgagacatcccaacaagaagtgactctgcagacttaatatcccctgctttaagacttccatcaatcataatattgaaagaaacaacgtcgggaaaattgttatcacgctgcatttcctcaaataatctccatgcctggtccaagcttccctctttgcataaagatgacaatagacagttgtagtcaaaaacactaggctgtagctcagacactctcattttgcaaagcaatcctttagcaacattaagcatgccagttttgcaaaacccatcaatcatagcggtataggtatctgaatttcgaacaattttggaatcagatatttgtttccaaagttccattgccttatttacatctccagccttgagagtgctattaagcaatatattagtggttactctatctccagcacccaatttctcaaccagcaaatcataaatatctaaagcttgatgaagacggttttccttgcacagcccgtggattaacgcattatatgatataacatctggatccgtataactactatctttcagcatcaaatagagaagcttacttgcttcgtctaggtcacctttggcacagagtcctcccagtaaaatattgtatgttatgttatcaggtcttgtacgcctcttcttcattaactcaacaatttctacagcatccgccacaaggccatccttgcacagcttgttaataataatgttataagtcacagcattcggttcttcatccttctctatcatcagattcaaaagttgcagggcttccttagtcttacctactccgcaaaggccatcgattagacccgtgtacgtgtaaacatttggacgaactccacgctctatcataaactcaaatatctctgaggcttctttcaactgtcctaacttgcaaaaacctcgaattagagtgttatatgtaatcgcacagggagaatctcctctttccagaacctcatcaaagagcgccttccctctatctaactcaccacaatcacaaaaccctcgaatcagagaagtatacacaacaagatctgcctctaaacccataaatttcatttctttaagaaagcccatcgcctcatccatcttaccagccttgcaaaaggcatctatcagaatcccccaagtcaccaaactccaggaacagccactacctttcatttcattagctaattccaatgctttctctaactcttttccctcgcagaagcctctaataaccgtgttgtagctaaaaacatcaggcatcaaagaatttcgtctcatttctctcagtaaactaacagctttaccacattccagattcctacataaaccctttaagaggatattgtgattgtacacattgaaagcaaacccacgcttcaacatcaacgcgagaaccccgaacgcaaacccggtcttacgcatttgcacataacattcaagcaacccactcagcgacacgaaattgatgaaagtatcagtctcaagcatcttgcggtaaaatgaaaatgctagttcgtggtttctagagcgtaccagctttgccatgagattatttccggcgaaagcaagagagctaccggagtcgactgcttgttggaaaactgaaaccgcattcttgagctgaggatttgaatcctcacatagcgatctcaatttggtttcagtttcagagaatgcattaacgagtttggagtacacacgagggttcaagagctttctcactacgtgctcatcacgtcggagaatctcagcggcggccgccgatgtccaaaatctcatatcggagattttcagaatttaggttttccgattagactctttgctctgcttaggggtgggttatccaaagtaaagcccgttaatatatttaggcccatattgaatgggccaaaatagacaacgcattaatctgaaaaggcataatttgatttcgccggagagaagcgtatctagcggcgggccggagatgttccagcgtgtgatcggtcggccattattggcgaaggtgaagcagacgactgggatcgttgaggtcagtgctgatagacctcgatagcaaaacgctaaaggaaaatcctggtggttcctgaatatgaagactagcggaaagcagtggggagcttcatgcgccaccgtctcaaggtgtgtccggaagaagaagactggggagtgattgagaagcgacttgcttgtggtaaagtcgaggagctcatcgaggaagctagcgatgagctcactctcgttggcaaaatgatcggttcgttacaccctgttctgttctgttttgtgatccatattcttgatcttacttgttgttaaagatgcaatattgcaatgtttgcatatgcagaatttgatccttgcaccgatacctaaacatgttccgcatcaccgtcccgggcctcttcctgaggagttctacagaaccctccaagctgtaaattcagaatccaaaacagagattacagctactagctctagcgatccgcagttgaaagagtgattagattcaagtgtggcgttgtatgtgctggtaaagtctcagtctttacacttgctagctgctttcttgtgttctgtgtggattctaataataatttcgtaagctacacatgccacatcattgaatattgtgttgcaactagaattagtataaaagttatgatcagtacatctctaagcaatacataaaccgttaatctttatataataagatacaagatatagattaactgtacatgtttttatttacaaaatctctgaaatcaaatgtttaatatgataatactaaattactaattaatgaaataacagaacttataaacacttttgagaatatgtcattgtagaagatgttgataggagtgggatggattattaaaggaagtaagagagctgttcctttttcctggagcctccttctccatacaaatcattccactgcttgagttcgttcattcctgctccttctgctgcaaaactagcagcaacctgtaaacgcgaaacagttagtgttttgcgcatgatcatcatcaacaccgcaactaatctttttttaactttacctggcttttagctactttcatgtcttccatgctcaaaggtctcaacgttatgcctctctcttcagatacttcttcttttgcttcagatccttcttcactattcttctctgcttcctctctcttcctcctctcctggattttatgagaaaccaccattaaaatactcattctagcgctagaaagtagagaaataaaggaaggacgagttttaggagttcttacctggtctttcaagcactcttgctttatcagctccctcactggtcgatatgctgctgttgtgcaaaagttctgtttgtataacattcacaataattagttcataaagagaagattcagatgtttgtaaagcgagatgggaactgtgacaaaccttgagatcacttccactatagccatctgtcatctgcgcaagctcttggaaatcaagattctctgttttctcttttgacaataaggatctcaagatcttctctctgctctcgaccgatggaagacccaccatgattctgtctcccaacaaaacaaaagcagaagctggagttagtacagctcaagttcagggtttcaagtgaaaaggcgtaccgggcctgcttaccttcgctcaaacctcctgatgatagcttcatcgagatcaaatggtctgtttgttgctgcaagaacgagaatacggtcacccgcatttgacataagcccatcccagtgtgtcatgaactcatttttgatcttcctcatagcttcatgctcgccaactcttgtcctctgtcccagcatactatccacttcatccacaaatataatagttggagacactttggccgcgagggtgaacaaagctctcacgttcttctcatcttctccaaaccattttgaagtgattgtggacatcgacacatttatgaaactagccccagcttcgttcgcaatggcttttgccatcatagtttttccagtaccaggtggtccaaagaggaggattcctctgcagggcttgaagaccacctttgaacaggtcaggcctacgaagaggaagcatgacaagctcttgaagtgattctttggtttcatccagtgaacctatatcagcaaaagtcacaccaatctcatttgctgggataacctctggtcttatgcgcttctcgaattcattatcaggagccacctcctacattgacaggataaggaaaatcaaacctatgttcaggcaaacacatcaaggtatcaatgctgaatcatatgtattagtttacatgtacaggtgctttcggaggcagggggcattcattttttgctgccgggattgatgtatccgattcatttttgttttccggaacagttgtctcagattttgactcgctctttgttatcccttcaccttcttctacctgcaccagagccattcacattttactcactttaaaattttaaagtacatggtcaaaactgtattataccttggagtcgatgtttgtgtccagcttcaaggagtcctcaaagcatccttgaccttcctgtaatatattcagtccatgggacaagctgttgcagaaccatttatttagttagctataagaaaataataattacttagttttgttgaagagataactgtggttcttagtacctattagaagatattacaagcctcccgtttttgtattcgggttctttgttgttcatcagatggtaggagattgcagaaacaacaatttcctcaatgtgactgcttaggaacattgtatctgcatggcatatggaacctaagtcatcacactcaagatcattagccgctagaacctcggctatgtggttcttgttgtcttgaaactgtatcactttcatgtcatcttcaaatctcgttttccagctcatgagttgattttcatcctctggcggtctgatctcgatgttgtaaggaaacaaagcagaaatgccctctcctacttcttgacagtcatcttcgggttccaatagtcttgagccgagaaccaaaacagggccagaaagcttcgtcaagagcctctggaacaacttgtagaacctttctgactgacaaagcttctcaacatccctcaggtatattattataggattggtttctgaaatcgaaaccaagacctgtaaaggtaacaaccgttcagtttaagaattgcacgagaatagaatctttccctgctgatttcattttaagtgttaccttgtaaagtgactgaaggaaaagtctctcatcaaagcacaagttagcactgcgtttgcttgaagctagaaagatataaacagccacaaatgaacaaaaagggtttagaaatctaaactagaataagacttaaagaggatctagaccttgttaaacgtaagaaaattattcatttcaatgctttcacacacctgaaacagaagttgcagaacgggatgatatgctactcatatcagaagcagcagaagcattccgcttgagtcgtggaggctgacttgtaacgtcaaagcccctgacgtattacgtgagagcaattagtgagctagcataaaacatataaagctatattccagatgacaaaacaaacaagatatcaaaaccaacacaatgtaccttgaatgaagatcgttgccacttgtgtgcaaacgcaaggtccctaaattttacaagaacgcgaa

SEQ ID NO: 36176 - DNA, 3572 bp, Arabidopsis thaliana landsberg
agtcaatttggctttcctttgtggatattcatatttttggagcctacatgagaaagaataggtgtcgggctctctttcgcttatatcattcggtcgatttgcggggaatttatcgttggatcggctttctcatcataagaaacattcaattgctattcctcttttgcttgtatccatccattcgatgattaaaaggcgttacatcgatggagcggcttttgcaatttcattaggttcaggagatctcactgtttttctaataataagagatattcaattgctattcctctattgcttgtcaacatttgaagattatcgctattttctcgttagatcggttttcgtgattttaggtttatgagatctcgcaatttgtctcatcacatgaaatattcaattgttattcctcttttgtttgtatccaatttgtcgattttcgctattatattgtttgtcggctttcacattttttcagggttaggagatcccacaatcatttgtatcatcgtttctcaaattgctctgtttttcttgatgtgctcttctttaggttataatatttttaagcctagatcttgttcttctgctcgttcttcatttatttctatattgtattccgatagataagaatttgtgtggtttagaattacagcgtatcctgatagataataaagtgtgtggttaagaattacaacgtatcaagatagattataatttggatagtcaaggattacattgtctagtaataaattttgattcacttttatgatattgccaattgttatgcatttaaaatcctctacaaatcaattctttgcaaattgttttccaaattcgcggtaggtaaaaatgacagctaatcatatttgtggccctatacaagtatagtaatttatctcggtacgacctgaatatatggaaatccaaaattttataatttggaaaaccaaaaatttcgtaatttggggtattttgatcttatcgatattcgagatcttatctctagtatttctttagatatgcaacattggaatttgccttaatttgtccataggttgagaataaattcactcacacttttaattttttgaatgtcacaaacttatatacaatctagtagtcgaggaccatttaaaaacatttttggaatgttaacaacttatattatctctatcctttttctccaatggcagcataggaacgactttgagttcttgccgagtctgttatgggaatctaaaaatactgtgtacatcatgttgcaggttaagtacccactactttggttatttcctttggctttttaaaactgattgtttctaaatcaagccataaattttctgtataaacttctctatatttgtgacactcactttaaatttaattcaatctatgcaggaggtttttgaagcctacagacacctcgcaggacacatctcacttcgattgttccctcatccgttgaatccacttcgagtgtacaatgttttgcttttgttccaggttttgttttggtctcacacctttctttttttcttaagtttaaaaaccatttctttcataaatgcttaagcctaaacttgctctgtgatgttatcatcgtttttcctgttacagagcatggcttgtcacccagacacaagccgtcagtttcttaggggtatttctttctcctcttgtgcaacaaaccatatgatgttgcattgtctttgaaatttttctgcttatgttggttgatttgttgcagctaagatgccaaattatttctatcctctgatggacactggtctcattgataaacgtgacgaatgcatgaggcttgctgcgttgggtgtcattgctcatatgttgaaggcggtaccacatacatattctcttacaatataatctgtttgtgacaaatgctattgaaaaccccactaaattactttgaacatctcacttctctatagtctgaagatggagctgttaatcgttacctaatggaaagtggtgttgttggtttctgcgttaaacccattgagtttggctctacagaaacaaaaaaagtaagtttctttcgcacgctacttctactcattttgactataaatcaaagaagaataaagaaagcattttgaaacttaatacttgttgttcaggttgctttatacatactggacaagattatgtcgacggatcaggggctttattactgctgcgtcttggctgatcggttttacgttatcgatgagctccttaagaaggtgctcttctatctttctaacatggtcagacctccttcatccttgttcagccttgttactggttgctacgtcaagctctcccagaactccaggttttcttgctaaacctcttgataatattttgatattgatacaaatggttaggttttgtaaaagcaaacaacagtttgagtttttggtatatgcattagggctcgtaacggaataaggcgatacacgcctttcttgctgtttgacggcaccttttccagattatatgctgtaagatttcaatctcttgtgttttttggaatttgtatggttttggttcatgcagggaatagtaaagcttatgtgtgtcttgtctgttttttttgtaggaggatccagtggctgctaacaatcgaattcagctgcttcagaatctggacaactaaagcaatgaagtactcgagacactgttttcaatgaggcaatgaaaacagaacagcccccacagagtacgggtttagtacgcctacgcgtaaacgctaagtaataatttactaaagacataaaaactctatgaaaagtcttatgttgttgtttggtttaatatcttttggatgactctcgttactctttcaacattgttttctctcttttggaatacatttcaatgcactttgccattttctatctatctttttcaactggttgatagcaatcggatttagctaatttgcttaactatttgcaacttgatgatcttgattgatataaaaaataagttagggtaatgttatttagatgtaaagcttctggaagttgtggttttgagttcctctgagttagtttaagcaactaggacttttagaaaagagacctgaaggtgagagacatttcattgcatggccagggcccagaggaatattgattattaaggggtcttttgagttagccaaacttgcgaaatcattccacatccatagaagtctagtatgggggtttttgtttgccatagttgccccattcctattatgagtcagtaccattgccaagcaaaatcagctagaaaccaatccccaactttggatagaataaacattttaaagaatttgtcacattgaattatggatagtatttactactgactgtgaatgttacccgccacatgcctctggagattagtcggaatttggctccggaatcttttggagtaaaatagtcaaaacatgacggagtaaaaaactaaaagcatattaactcaatttacattttcttaattcttatgggttactttacccaaaattgaaccaccgtcaacatttgagtgaacagtaaaaatcagtctctcgaatccattgg

SEQ ID NO: 36177 - DNA, 8908 bp, Arabidopsis thaliana landsberg
cttttttcaagaatatgtcagtactaggagttagactactatgactttccaagtttcaacgaacgtataagatgtggctatttattagaaacattgagaaaatacagaatggcaatttaagaattttaaccagagataagcatctttatcaccacacctaaaaatagaaatgtctttccaaaagcacttaaaactagagagaatgagtcataaagtaaaaaaaaaagaaaaggctatagagcttttttcaattcccccaagtttggtgatcccttcttccttcctctggcaacaaaacttttttcatgtgtgcctcaattgaacaacaaaacctcactgttgttcttccatggactctgaaaattgtgacattttagaggttttgttggttatttaagaggcagatgcagccaccttcttcctcactatcctttttcgccgagcctttggaggtggaggatctgatactgaatcttcttgcttcttcccgagtagccctgagacaattgcattctttgagatgaaccattttgaagatggctttgctactgcttcctctgagggtcggttgtatgcttttgccagcagatcatctgactgcgccagtgggtctgcctctacacctagccatacttgtcttgacttttcccctaattgcacattcataatcctgtaccgcatacatccatccatattcatcaacgatcttgatccccagattaaaggtttcctaagtcctaagacagttttacaatacaacatccaaactgccaacatgtcttgtttatgtatgttatgtacatatgtgggagaaagagaatacctcaaggcagtgccaaagaagagtgctactcctatgacgtcaaagtggctgctcactcctctttcaaatccacataacagctgatatctcaagttcgcatatattccaagaaatgcaccataaccaagagcatttgtgctgatagatgggaccgtcacagatactctgtcagaacaaaggtacaagaaattaagcatgagctggaaaaaagtagagatgctgcctgagtgaatcaagagattcgtaatcctaggatacaaacagaagatatgtgatgacctgttcttctttcctgccagaaagtttgacaacgaaccctggagtgttcctgctgcgagtccaagaatggacaactctgcagccttgtagaaaagagaatgaaatctcttttgcaagtcgaactctctaagaggatagctcatttcaaacaaattatttggtagcttttgtaatgtattttgcaggtcaaaccggaatgtgtttccataggaacgacatggagctagcaaccaaacagcagctgcattgcatgctgatacagtaagaacatttataagtgcaagatcccattcctcttctagtctgcaaatcatagagaatacaatttaggacaagaaaccagaagctacaaaaccttcaaagtataggtacatggaaaggaacatacctattcttacgattcttcacctcccaccaaactgagcatccaaccgtggcagcttgctccaaaagaagtttatagagaaatgcaggatccgccaacatcctacacaagacagttacttagtcaacactgcatttagtatgacaatacagaaacttataacttaagagacaatgaattctcagaagaaacccaaaaaatacctgccaacaaaggccctcgacaatccctgaggaagggcacgggagatcattctagtcgttgtaggacgggcatttatggcaaggaatttcaccatttgagctgagctgaccaaaccctgcatgaaagtttccgtaaattcaagtatgtcagcatcgcaagatcaccatttcataataacggaaagctttaacgatgtctcaccatttcatatgcttgacggagaccggcaggtaaatccatcattgttttttgccattcattcaacacagcatcaacaaatttcctatcaaaaatctggacaataacatatatgtcgttactgtgtgacaccatgacaataaaatacatgaacaaaaaaatcaacaaaacacaagcgtaaagttctcatacctctgcgagaaacatcctacgcctaaaaagtccatcatcatctccctcatcaccatcatcgaattcatcaaagtaatcatcatcatcaccattatcgtcacctccatcgccaccaccattattgatactctttccaatgtttccaccacctcctccagttgcaatctgtaatgaaacatgaaataaaaattcacaaagctactcttttctgatcggtgcaaaatagattcactgcaaactgttatccccaaggaagatatcattattttttggaaatactaatactaatacacattttttcagctactctacttcatctccttgaccaacttctactacttcatactaaagaaatgatcaacttctcaggattaaaatcaagttatttttacttagagcaaagatgcaggactaaaatctagcacttcacaaacactgttacttgctactcatagttcccccacaagtagacgatggaaagagaacaaattctgaacctccaagaagaatgatcaactctctaccctcaataacaaacttgatgaaccatcgaaaaaatcagaacaaagaggataaaacaagcaacgacatggtcatagccatacgattggtaaaaggcacagcctttagagagaatttcaccaaactaatctaaattcttgcaattcaccaaattatctcttaacaagaaagaaaagaaaggagtatgagagagagacctcagggctagtctcagaaatcttctgggtcatatcaagcttccctttttccaaagtaacagctcctaccgaaccaaatttgcctttcatcacaggacacatctgagtacttgcagagaaagagccagaggaagatgtgcctaactcaactccagaaggtaactgtaagcaacgctcgagtcctgaaactgaatcatcgacaagaaacgaggacgaagaagctctaacgaagccacgacggagcttacaaggcagagtaacgagtggacgagggataggtaaacagggtttgagaggagataagggtttgggagcgacaacgctctgaaacaccatatgtgacatggctttaccaggattaaaaacccaagctttgattccgataaagattcaagctttgaggtgaatttcttgaagaaaaggcgcagagcagagcctatttcttctctcttagggctgagagagaaagaaagagaggaagagagagatgagaaggaagagaggatttatcgccaatcagacgatttcagaaacaacaacccaatctcgcttttctccttttgcaccaactcaaatgcttaaacacttctgttgattcagagggtttaagtcggctattgacatttacacctgtcaactggaaataaaattcaatgatttttacatgaaatattacaaaaaaaaacaaattcatatcgaagtaggaaaaaaaataaactactactcagtttacacgcttcacaatcatagataatctcagagaggtttgtttgataataataatgacacaaaccatgtgataatatgccaaataaatgataaaaacacaaaaaaaacttgacaatacaaaaagactaaacacattaaactctcaattaaattataatgaacataaagctttgattatgaaatatatctaaaagatatacactctgttgtcttcgttttgggatcttctgtgaaaacttggtttagccattcaagaaatcaaaatctattggctggcttcttattggagggtaattggttactcgtctctcggttgctgcattctctgttggtttcactgctgttgtcgtaacagtttcaggcggcgctgttgtaataggttcaggtggcgctgttgtaacactttcaggcgttcttgttgtttggctagtattttctgtggacgtagctgtttctgtgtttggagttgaagacggatcgcttttttcttccaaagaagtttcctccttctctacgggaggaggctcagacacagtctccgtccctggtccatccacaggtgctgctgcagtctcagatgctggtgcctcagcaacggctgcggttccaggtgctggtgactcagcaacggctgcggtttcaggtgctggtgactcagcagcggctgcggtttcaggcgctgattcggtctgtggtgcctcagaagatggaggagcttcaatagccaatggtttcgtaggttcttcgagcgccaatggcttagctacttctggctgtgcagtcttctgcgtgagtagaggttttttgggagccgtaatggaagcaaagattgaagacattccaggaggtagaatctcgataggaggttttctagatgcatcagataaactagtgagctttggatcctcgagagaagccagaaacgcacttgcagcatcggttttagaagacggagctttctcaacttccttctgcagcgttttattccaagcctggaccaagttctttagagttgggcgaccatgtgcctgtggaaataattacagtaggcgtagtcagaaacaatacaagtttaatttataaactgcaaaaagaaaaaccaaaatgcaaaaacaatcttacatgggcatgaagcacggcttctgcgagcattcccgtgtcttgccatgccttctccatgagcgcattgtctcccagaactgcagcagaaaatgctgattctcgtccaaggcctatggagatcagattgtttacaagtccctgcaacaaagttaataaagtatttcaattaggaaccagaagatacaaagtataaaatcaaagcataaattcgtctatagttatgtcgatcctatctagtgaacaagacaaaggtctttagatttctgtaggtatcctaaaatatgagaaaccaagttagaaaccgaaagaaagagaaattgcagacatacacttaggcgtgtcaattctccatggtttgctaggcgtaatgaaaggcctcgcaactcatgaccctgtaaagcgcctttgaccgaacctgcagttgccagtcttttgagagcttcgcgagcaatgtcggcgtgccctgtggcatctgcagcatctataaggtcaagaaactcctttgcaaatttcactattccttccacagcttcaacaacatcttcttttttagtagctgtcaaagagagaatgtcactcaaatcaaggcctacaccgtcctgtccaatgtccttgctattactcattgtgagaagacaatgaagcgccctcttaagatcattgctctgcattgctaggtcaaactccagcctgagaaaacataaagttaaatcaaactcggaacctaagtcaaagtgaaaaaaaaatctttgatggcattttggttgagttgaacgctaggatgaaggattcaatacatgagtgaaatactgaattctgtttactgtccagcataagcaattcagagactaaaaaaaactgtctatagtagaaccaaattgaaggaaaagcggcaccaaaatattatattatttacctcttagatattccaggcaaatgaagagcttctgttgcgtatcccatccctagcataaactgtgccagatcgtcatgatgttctctcccaagcctacttgccctgcgcataaaaatgttgtataaggattccagctacttaactactcacataaacacgagattatgagaaacatatccataccatttaactgcactaacagcatccccgtaagcagcaagacagcgacagcggataccaggatgattaagggatatggcatgggcacacatgtacctaccaagaaatggaaggaggtgtcagacaataacttctatcttctgtctaatatttctttattcattcaagcaactaaaatgactatcatggcaagatattgtattcaagcttagtgctcgaggaaactttggaatgcagaatgtcagattgcataatataaatggaaaggaaaattcataatctaattaaatataaatatctcaaatgaagataaaacgattcaccaattcatacagtcagcatcgaacaaggaatgtattaacaagagtcagtcttgtcgtaaggtaagaacaggagactcttagtacctgtcaatgagccaaagaactccatctcgcacaccggcaacaacaagaggccccactggtcgtttttgctccactgggaaacgagtaacagcaactgagactcctccaccacccacagctacctcattgacccttctttcatccattatgtcatcgctatcacctctggattgtcttggcaatgataagaatggtggaacagatggagcattttggaaagaagctaaacgcaccacctacaattaaaaggtatagacataaggaagactcttgctagtttgacatgaattgacatagatgtcgacacatatgcagtacaaaacaacacgcttagaccttaaaaattatgcttcccaatagcttacaatattttcaagtaaaagtaagaaaaatctacctgcagcatggggggccttaaagatatcctttcttgctttgcagcctgggaaccttctactgtgattaaggccaactctccatgctctgcaactgctctagcctgcgcctccttaagtttcatttcttccttcatcttcctagtctctatatcaatttcggaaactcccgcatccacaaaaacacatctggaaatccaggcatggaagaaagtattagcattcctccccagatatttgttttaaaaagtagcagataaaggtagccatgcgtttaacaaattcagaattagagcaattcttttcaaaacatagtaatctctgaaaagttggattatgcaccatctgaataatcaataattgttgatacacatccaccgcaaaaacacagattcaatttttagtttgtttcatccaagtggaagtagcatttaaggtaactggcagaagacagaaaaaaatcatgtatcatatatagagcaatatgcttactcaatcgtggttggtgtagccacaaacagctgtctgcgatgccaaacagctccagtagcatgtgcaatggcaacatcaccaagatatctatactgagggcgcaaggacgatatgaccatgtattgttgataagcaaaagcacagtattcaactgtttggtcccatgccgtccattctggctgaggtagcataccacctactggctcaaaattttcccaactacacattaaaaattccatttagataatagagaactgaaatccttcaaacaaaattagagctagccaaaacataactatgggaatcagtacagattggtgaacagtgcttattattccatcaaacaagagtaactatctcccagacatctcagaggaggaaaaaagactctgatttggtcaatatagctaactaaagaaaatgaaatgtaataaaatatgcccaacagctagctgcctgcacactattttagtaacaaagagtgctaacagaaatgagccttgcataaaaataagaaggacaacgctaattttacctgtagagctggtagtttaggggtgcagactcagcagacttctgcgaagaaaacccatcatcatagctagaaaacgaagaaacattgctgtttccaaatcccgagagtggcatcgactgaatggttgaaatagctgttgcagcaacaggactaatccttcgggatgtgcgataacctatgccaagtagggcaccaccatgcagaccaatgacctgaaaggaaaattatgaagcatacgaatgttgcttaacctagatgtccagcattgcatactgctctatgatcaatttttcaaagtaacaaagatagcccaccacttgaagtcaagaagaactctcaagtaagattctcacgtttagcaacctttctttttggtcaaattcaattaataaactactgtgttccaagtatgacatttttttgtactaattttacagtattttcaatgcaaaccaaagcacacaaattcttaggagcatgattagattaaatattcaatggatctgctctagaatacatgcagatgatctggtataaatgaaaaaaaaagacacataccggttcagagcgacctcctacggatctcatgagtatgtttgaggtaccatcatccaagagaatacgaacttggacactagccgatgaagctgcactggcagcagcagcagcttgagctgcagctgcagcggcttcttttgcctttctcgatgaaccacccttagggattataggcattctatgaggtaacacagattctagaatcgcaaatctgtctcgacatgtatcccacgccaacagtcttgcacttccagagtcaacaatggaccagtcactaaccttgtagatagagaagtatagaatatccggccatacaactgccacatacctacaatcagagaataaagttagctggctaaaaaaaaaacactcaacaaattagctgagttaagaagaaaattatattcataaaaaacaattagctaaggaacttacttccctgaactgctcacagaaagaactgagtatgaatcatgtggaactggtgccacgatctgctttttggtttgctttacagttaactgttcacctgggtctcccttagaaagccctgattcggacaaggcactattattgccaagggatgggttggctgtgttggatagttgaaagttcaagagctttaattctcttccaaggatatatatagctgaattctcccgacttccaggcagtgctggtagaggagctgcagacgggatagcacgaggatcaaattcactaactataataccaacattggtaccagttgcgacgagatgtggttgtagagga

SEQ ID NO: 36178 - DNA, 1679 bp, Arabidopsis thaliana landsberg
tggcatctttttgcagtgtgtcacattgctcctcattttatttatacagattgtgtgcttcgtttatggatgggcaatgaagatcgacaacaatcaaagcctgaagagaaaactctgcaggaagacaactgttcagattgtttcactcatcagtatctctctgctgcatcctccatgaataaaagttgtatagagacatcaaacgcaagcactttccgcgagttcttgccttcacgggaagaggtaaaaaacaatctttcattgctatttgaggttttaagacgattagtacttttcatgaaactaaaaccgtgggggaataacagggaagtcagaataacagggtaagaaaggagtcaaactcagatttgaatgcaaaatctctggaaaacggtaatgagcaaggacctcagacttatccgatgcatatccctgtgctagtgccattggggagctcaataacaagttctctatcacatcctccttcagagccagatagtcatccccacacagttgcaggagattatcagtcgtttcctaatcatataatgtcaacccttttacaaacaccggctctttatactgccgcaactttcgcctcatcattttggcctcccgattctagtggtggctcacctgttccagggaactcacctccgaatctggctgccatggccgcagccactgttgcagctgctagtgcttggtgggctgccaatggattgttacctttatgtgctcctcttagttcaggtggtttcactagtcatcctccatctacttttggaccatcatgtgatgtagagtacacaaaagcaagcactttacaacatggttctgtgcagagccgagagcaagaacactccgaggcatcaaaggctcgatcttcactggactcagaggatgttgaaaataagagtaaaccagtttgtcatgagcagccttctgcaacacctgagagtgatgcaaagggttcagatggagcaggagacagaaaacaagttgaccggtcctcgtgtggctcaaacactccgtcgagtagtgatgatgttgaggcggatgcatcagaaaggcaagaggatggcaccaatggtgaggtgaaagaaacgaatgaagacactaataaacctcaaacttcagagtccaatgcacgccgcagtagaatcagctccaatataaccgatccatggaagtctgtgtctgacgaggtacttacttggactaaagatcaacttcctttatttcaaatcattttctcatataaatattgtacattcagggtcgaattgccttccaagctctcttctccagagaggtattgccgcacagtttacatatcgagaagacacagagaggaagaacaacaacaacaagaacaaagatatccaatggcacttgatcttaacttcacagctcagttaacgccagttgatgatcaagaggagaagagaaacacaggatttcttggaatcggattagatgcttctaatctggggagtagaggaagaacaggttttaaaccatacaaaagatgttccatggaagccaaagaaagtagaatcctcaacaacaatcctatcattcatgtggaacagaaagatcccaaacggatgcggttggaaactcaagcttccacatgagactctattttcatctgatctgttggttgtactctgttt

SEQ ID NO: 36179 - DNA, 1626 bp, Arabidopsis thaliana landsberg
  unsure (1)..(1626): unsure at all n locations
ctatcaaatcttattccatctatcagcattcttcattcatttcttgtgaaaaccaaggcatttaaattaaacataatcacaaacaccaagttctatacattacatatgtcttccactgaataaagaggaagaaaaggctattccaaaaaacattttgagctctttgttccgcaagagaaggaacagcacaagtgaaacacactgaaaaacaccaagcttgcattataacatatgcaggtaagaatcacgaatcatgggcgggtcttgtattgtctgagaacgaatgagagccagatgagggatcatgcttctgcgatgtgaagagattagggtatgagtaatagggatcatcttccattgaaggcagtctcatttgctgatggtcctggtcagggctgagtctgtcaagtgatgaagtctctggcctttggagctctggcagatcgccatagctgctgactgatgagttctgatgatcaaactgcggtttctccattgacgggaatctatgtggtgtaagatcgtcatagttgctgcctgatgagttctgatgatcaaactgcggtttctccaatgacgagaatctctgtggtgtaagatcgtcatagttgctgcctgatgagttctgatgatcaaactgtggtttttccattgaatggaatctctgtggggtaagatcgccatatctactgaatgatgagttctgacgatcaaactgcggtttttccattgaagagtgtgtctgtggctgttggttgttctgctcagagttgaaaagtgacgaagtttctgctctctggagctctgtaagatctccgctactgctggccgaagaattctgatgatcaaattgaaggtttcccattgagggagcatggaaagggttctcagacggactttctggaaactgatcagaagtcttcctggtaagctcgttgattctgagttgtgccaggcttgcagctgagcgggcagctgatgctgcacgttctgctgagtcagcagcagcttgagcagccattaagacatcatgcaagtctccatcggatattttccttggagtatctctggaagcaccactctcttttgtagggaaggcccctactgcatcaatggatggcggagagtaattcttcttttcgaaagattccatcaaaatgggtgaagattgttggccttccacgacagttttgcttgcttttgcaggatgttcatctcttttggaagccgttttttcgactcctgcattctctgaatcaaagggcaagtcgtgagaggtatgttcataactggctgatttcgctgcatccggtgcatttacagaggtagcaccaggagttggtcgcagcaagacatttggaacctcgggaaagtccaatatatcatactctgagtcagaatcagatttctcctttgccgctgaaagagatgttaaatttgtcttttcattttgnnnnnnnnnnnnnnnnnnttagatcccccaccaaattgttttggtccatcctgaaaataaagaaatttagaaaaaaatagagagactggggccaaatgaaacttaaggccgtggatatctggacacagaggtccaagaagggaaaaagatctatgccacagaaaaaaccatgg

SEQ ID NO: 36180 - DNA, 4328 bp, Arabidopsis thaliana landsberg
aattaacaacgtgttgaattgatgactatctttttgttggttacatgctattgggtgattggatttgtattagtatctgataatgtgattgaagtttgagtcttttttatatgattataggtttggccaacaaaaagacagtgaccattcaggcggctggcaaggaccaaggtgttgtactcggaaccaccaagactaagagacaaaacaagcctaagctctctgttaacaagtctatcctcaagaaggagttctcgaggatgagtaaagttgttgccaatcaggtactactcatcttcttaagatcaatgtttgtttgctttatctgcggttatacatgttgggttatttggaaaatcttacggataagtgctttagtgaatttgagacttaggattgagaatagtttagttttatgagctgtgatgagaaagctaacacgtaagaagaggtattcctttgtggggtatttcttcaatgaaatacatttgttacgcttggcttctgagctataaacttttaccattgctttgggacagttttctgtttctatttgtgacaaattttatcagtaatgagtaatctaacataaaaaaattctaatgaaatggaacaataggtttgataatagtttttggtccttttgagctgtgatgagaaagctaacacgtaagaaggggtactcctttgtggggtgtttcttcaatgaaatacatttgttacgcttggcttctgagctaaatccttagctatttgtttcaatttaatgatttcgtctattttttctgtctaattttagctgtgatgagaaagctaacacgtaagaagaagtactcctttgtggtgtatttcttcaatgaaatacatttgttacgcttggcttctgagttaataataatatgaattattgtagcatacctagaatttgagattacttttatttagtctgcaattcgtacctatcagtgatgagaaagctaacacgtaagaagaggtactcctttgtggtgtatttcttctatgaaatatatttgttacgcttggcttctgagataaatctttcttctgtgcaccatttcatattgcatctgttttgttttctatcagtaaaagtactaaccgattgattgtcttcaactttccaggtagtggacaactactacaggcctgatttgaagaaagcagcacttgctaggcttagcgctatcagcaaaggtcttagagtagccaagtcgggtcccaagaggagaaacagacaggcttgaagaatccactactgaacatcttgtttactttttctaaaaagcttgttgtgagccattaagagtttcagacagcagcttgtaggttaagatttttcctgaacagctcaaggattgtaccaccatccttttttcactaaatgatattaaaactaccatcattggcttttatcaaaaaagatctattcttggctgcctgctctcacttctcaatacttgtcattgcgcaagtgctacaaagattaactgaacgtgaaaatatgattctaatttcccataatatcacactgctctgatttctcaatacttgtaattgcgctagtgctacaaagatgtaattgaacatgaagatgtgattctaattttccataatatatcacagtgcaaatctaaataaacacatatgtgaactcttgtggcctttgaaacagctgtaatctaatgggtgtgtgtataagatgttaaatcttgtggactctgaaaccagattcctcggatgtcatattctccttccagctctcgaactcagatccaccaaacacaactttctttatcccgacataactagaaacaaccaaaacaaataccacgttagagcttacacacatttcaaacatgtccatctcaaaagcttaattcagttaataaacatacagagagaaggagagaattgaactcactctgagctgatttgtgtcaatgcgtttatcagaacatcgagaatcaacggctccgaggtcccaatatcgagcctgtcaaaaccatcatttatgtgatgagtaacaacaagacttgcaaaaaatgtttttagggtgtagtgagagttatcaccatattcgagcgacattgtcttgaacctcaagatccccgatgttataaaacgtggtgggctcgacattagctccaagtatggcatcatagtttggcctcttatccagtggtgcttgtgataactgcaccatacgagcaaaagataaaaaaacagcttaatgcttataatgcgagaaaacaaaaggaaaccgaatagataaatgctttcactttctcaatcatagacatacttgcatattcatggagttgtatccaccaagtcgtccaaggatatgccaggaccggattgtctgcaagattttagccatcaaaagaaaacagtgagtgatttgttaagattttccctatctcctcagattagtataggaatgcaaagattcagtttgaggactcacatcagagatcaaggctatgtctttgtccagcggtgtgttgtaaaactccaaccacatgtatgaattcgaatactcaaatcttacaaaacaacaaaaccaagagtttaataaacaatgagaagaacaaggcactgaacatcaacaactactgaacaagcagatcaaatgagcaagcaaaatcaaccaagagaatcacatataacttcaaaagcaacataggatcactcacttgttaaacgtcactggcatcgaagttgcagaaccagtcttagtatgaagaattttgttcctcttcttcctcaatctctcttccatctaaaaagagttcattgataaacaacccatttcaaaataacaatcaaaatcaaaagctactcaaaaatttcagctcaataaacgttactttgtcaatacatcagctcaacaacagcttctcaatcgaaatggtaagatccaaagatcaaagtttaaaacttcaccttcttttgagctttatctgggttatctaaacaatctccaagaatatccgcaaactcagggtctttatcgtaatcaatcttctctttcttcgctctgtaaacgcctctcttcttcgccgagaactcatcttctacctcatcatcatctccatcatctacttcttcgaattcttccacaccttcttccatttctctacctattccatttactcgcaactttccactctccctcgaccgattcgcacgtaactcctggatcttctgtacaggaatcgtgtcggtgacccgaaacggcgccaaattgtgtaaacaaatattcgagtggttgctgttgttcttcgccatagaaggctgaagaaggtgaagaaaacattgaaaccttagcattattttttcttcttcttacttaacctctgactctgttgcttgcaagtattttagagaagactgaagaagctaatgggtttttgtaagagatgatagtgaaggggtttatcatagctaacggtgagcttgcgcgtacacgaatattaagctgacgtggctaacaaaaataactagtgagatttgatctaaaccatctgtgactgtcacaatcggaccgatatcaacccaactaactaggaatctaaatttcgttgcacaggcttccaaatgataacaatataggcccattaagaaaccactaatgggccgtatcagtacagatcgtcttcatcacttaaatatcagtcatagaaaaccctaatctctgagaagagttaaaagcgttgccgtacactataaccggagagagcgccgattccgtcgtcagaagaatcctcgtaaacaatcatgggtaattcctctttaacgtttgattccatatgaatccgtattcaattttagaatttaccaatctcattctttgttgctgtcgttaatgctttttattgtctttgatttgctttggaatcatcaggtaaggtacacggttccttggctcgtgccggtaaggtgagaggtcagacaccgaaagtggcaaagcaggataagaagaagaagccacgtggccgtgctcacaaaaggttgcaacacaatcgccgtttcgtaaccgccggtaatatattccgtttcatttgttaacttgagatttagttaagatctctgatttgagttgtttagttgagctagtgttcttaggctttgaatgaaagtagccaagttttagtaacttcagatatcagctcatactgtagaagaaatgctaagttttgtatcgtgcctttgttagagtatcaattcttgttaagattttgtgaaacttttgctgaatctgtctacttcattcatttgttagtgattgttttgtatgattcttt

SEQ ID NO: 36181 - DNA, 5375 bp, Arabidopsis thaliana landsberg
gattgctcccaaattggacaaaacttgtcggttccttttaatggatggttacatgtttacggtttagcatcttttaaatacttatcaaaccataatttctttactaatcgtctcaccggtatgggtagactcgtaaataaccactttcatcttcttccccaatttttcttgctttctctaaaccctagtttcagacaaagtagtgacatttttctaacaattaaaccaatatcgccgtagtcaaccaccgcataacgttttggcgccgcctgaggctgacctggggctgctaaagatttatcgcgacgactctctttctctctcaaactggtaactaatcacttatttgcttgtttcgatttcgaatgtgcacacatcgctatctattcaatatattcgctttatagcaagacttagcaatatacagtgtaataggattgattatatactgattgagtaaaaaagactaatgatttcgtttagagtaacaatctcttaattatctcgttaatggcggaaagtagttaagtctcgtgaattagatgttgatagcattgtctactcctttgtgttgtaattcctaatctaaatgttccacagtttcagctgcttgcgaattggaaatggcttgtaattcctcaggctgtgagtcaggttgctatgaccgtgagaaagataatggaagtaagatagtggatgatgcagtatctggtggcggtaatcatgagagtgtctgcgtcaagtgtaaatgcaatgcgcctatgacatttggtgacggtggcttcgacgatggaagattctgcgcagattgttttaggaacaatgtctttgggaaattccgtcttgctgttacttctcatgctatgatcactccttcagataacgtccttgttgctttctctggcggatcatcttccaggttttgctctctttttttcctttagtttctgttttttgatatgttattgattggtgtctaaacgtagcaagtatgatgttagggtttctcttcaatttgtgcacgagttgcaaatcaaggctttgaagaattacgaggcgagtcgagatagatctttacctgtgtttggtgttggtgttgcttttgtggatgaaactgcagcttttcctgctctttcccctgaaatgattgatgcaattgagtgggttcgatatactgtctcgtgtttgtctccacctgctaaggatctccatgttgttccagtcgaaagcatatttggttcagactctcttgacgcacgggatagacttctgaagctattagattctgttcctgacgatactggaaaagaagaccttctgctgcatctgaaaatgttatctttgcaaaaggtttggacattatattgcttttgtttctgtctgggaaagaaattcagatttggaaatatcttttgtttaatgttgtttgataaacctttttaggttgccgctgaaaatgggtacaatagattagtgttgggatcatgcacgtcgagaattgcttcccatgttcttacggctactgtcaaggtgtgttgcttagtgccctgacttgactcgtgtttcctctggcttagttattctatagattgcatcttagagtgagaacttcatgccagaaagcaatcaatggctaccttaaagaatgtagatattttggacttaaccaattacatctctaaaaattgaagttttggtgtaaagattttatttcagtacacaatgttttgtgtactttatttggacattccctttagactatgttctatcagaattgtgagttgaattgctttttcttgaaacagggacgaggttattcactatcagcagatattcagcatgttgatgctagatggaaggttcccattgtacttccacttcgagattgtgttcgactggaaataactagactctgccttttggatgggttcgtttattggctgcctagtctacattgtattgttatagtgaaccttattcttgcataatccaactattgagtgacgtcacatattctgggcagggcagacttaagactgtggagttggcttgtcgttctcaatgcggaatcaatgatttggtgtcttcatttgtcgctctgttgcaggttcagataatgttcatcttctgcatatgtttaagtgcatgcatggttacctgttactttgtttttactgattcatttgtctctgggttctgttgtgcaggaagaaaatccttcccgggaatgcacaattgtacggacagctgcgaagctgactccattttacttcaataaaattccggaaacagacgactctaatgtacctatggccactcagaggcgcctaaagagattcaatctcaaatatgatggatcaatgactactgaagctttctgtcctatctgcaatggcccgctaaatagatcagactcatcagagttggatacttttgaagaaggccaggaatctgatgtcctctatgctgcttgctgttcaagttgccggtttcaaatacttccacaggatggatcatctcttgagcaattcagttcatttctaccagatcacatgatttcccaagtgaaacatcaaaaagttgatagtcaagcttatctgaggtgagtagtatgcattaactctgatctcaaacttggattccttttccattcgttttatctacattattggtagttcatgtctctaggaagcatcagatttaaaacaaccaagatcaagactgagtgaaacactatttgagactcctaacattggtttccatttatttcagggagaaaattaaagactgtctgctcttggacgatgaagaggttgtctaaatctgcattcggatgcttgcacaaggtatgagaggaagtttaaatcctgtcatgcttatcaaggattattcctagaaacctaagatcatcttagtttaatgtcgatctgatatcatcgtagatgttaaaagtgtttttactcattcgttacaatgattgtctcaatgtgaagcaaaatcactgagcaattgaatgaagcatctacagttttacacatataatacaagaatcatgggaagtttacaatttgtaacacaagtagtaaacttgttaggggtgatgcgagaatcaagttttgtaatatttctatgcgcagaatcagagattcaggagcattaatctagagtgcaagtgatcaacatcttccaatagctggataagaaatctgtgtaaattctaaccaatgtcccatagacattataacacgaagcgcttaatgtttgatcaatttataaagtccgacggacgaatggtcaacaaattagaattgagggcatcaaacaagaactataaaatatagaggcttatatttgaaaattttctcccctagctagaataatatatacacattgaagggaccgtttgtgaaacataaaaattgaggggcatggttggaaacttttaaatttataggggcgttttgcgtttttactcaaaaagtccaaaactatcgctcaacgccggtcgattctaccggagatcggaaaaaaggaaaaagtccggagagagctaaagatcaaagctttagaatggtgagactaaacagagtgctgctaaaagacgccgggcaatgtaattgacaagaccctctccgagattctggtgtgccctctctctaagcaacctctgaggttcgatttctctccttcaaaatgtacatagcttaaattcgattggtcccgaagaacttgtttaagcaatttggtgaattgattgctgataggttttgcgagaagacgaaatcacttgtcagcgatactattggtgtctcttttcctgtaagcttctatccaaagctttttgattttttcgattcagatgcttgtgagctgttgagctccatgaaagttagatttatggcgcttattaactctccaaacagtgaaattgtacgaaatcactatcatatatgctttcagaatcatgctctcttattcagtgaacatgttctcaacccaactttgatcttttaggaattgtctaatcaaagattgagatgtgtatatatatatagactttgattctttcattattcttcatttgcttcatactaaataatgtttaaaatgaatttattcttggtgttgatttgggattcactgatggaataatcatatgctaaagtgattggtcggctgttttcttcttaatgatattcttcttgttctttttagatttcacttcatgttcacgattcaatgtttaagacttgattttgcttctcttaacacgctagatcaaagatgggattccatgcttggttccaaaggatggaaaaatacttgaggaggaaggtgatgcatcaaaagcttaatgacttttgcttttgcacccaaaaagaaataaaatggtcagagtgaaggtatcagcttgtatctgcagcaacttatcaatggttcgttctgtcctctgtactagttacctgatcatctcttctaaactctcttttaggcttgtggccaagttctggtagcatttttaagtatgaatgtttgatgggaaacattgatgtaaccaattgaaaaacattataggtgtgtagtttcaggtgaataaaccaactttttcgtttaaagtttcttgaagtctaggattcttattgactggaatgaaagtagaagcatgatttaaagtattggatgcctatttgaggggctctaagtgtaaccatataatgtgaggatagattctagtcatagtcccacttttggtaactattcttctttatcttaatgtccactatatttacaccatattagctcttgatgtccacttttggttgcttaaaagaatacacagcaatatatcaacaaccaaaagtggatcaacaagacttatcactgtcaggtaaatgaaattgggccaaaagaagataaaaactattctcttgataaaccaaatgaatacaaacacacacctagtgtttttgatggtgaccagttagagcaaaagctacaatactatgtactatgaatataaataaaacgtggggagtgaccatgctgaataagaaacttatcatgttctctcttgaccaacccgaaaagtggtgaacttaattcccattggcttggaggtttcaaaatcatattgcaagttgttggcttgtatggtagacagccaaaggattggatatttatgtgataatgtgatagggagaaaattaaatgttcagtgataggtccccttctcacttttctctggtattgtcatcatttaagtggagcactgttttgtctattggtcatttgatcatttgcttcttttaagaaccaaattggttaaacagtaaaacataaggtttttttttcttactagtatttaaaagaggaag

SEQ ID NO: 36182 - DNA, 4468 bp, Arabidopsis thaliana landsberg
gttacacaaacacatgggttatgctgatcaatgcgagttcttaaaagcaaacccaatttgttcccctaatggattctttgattacctcagcttcttttactgctcctgtagagatttcagtatcttgagttacatgatgttaggtgtttggcttgttgctttgttttatctgttgggtaatactgctgctgattacttttgttgttcactggagaagctttcaaagcttttgaggctgcctccaactgttgctggtgttactttacttcctcttgggaatggagcaccagatgtgtttgctagtatagctgcttttgttggtacagataaaggagaagttggtcttaacagcgtcttgggtggtgctgtgtttgttacttctgttgttgtagggattgtttcgctttgtgttgcggataaggaagtcaagatcgataagaattgcttcatcagagacttgagtttcttccttttctcgcttgtgtctttgctggtgattttgatggttggtagagtgacagtccggattgccatcgcgtttgtctcaatatatgtggtttatgctttccttgtggcagcgaatgtgattctgagaaaacatgctaagaggtttaaactagaggctcttactcctttgctacctatgcaaggaagtgtgttttccccgagtgttggagaggatatgccaatgaatacccccttgatagaaactgagactgaggatggtccacctcggctacagagtcttcctcagtggatgtgggcgtcaaatgtggccatctattcaaaccatttcgcaaaagttagtgtacatgatgaagacaggccaccttggggatggattgatgacactgcagaagtagagagctcctcatgtactaaattcacttccttgttggaaattccgctgaccattccaaggagattaacaattccatcggtcgaagaagatacatggtcaaagacatatgctgtggccagcgtctcattagcgcctgtccttttggcgtctctctggagtagccaagacgatgtgagtctccaagcttgtggtgtcgcatactttttcagcgttgttataggctccactcttggctttctggcttacaaaaacacagaacctgatcacccacctcgaagattcttgatcccttgggttcttggtgggtttataatgagcatcgtatggttctacatgatagcaaacgaactcgttgctcttctggtgacatttggtgagatttacggaatcaacccgtcgatacttgcgctaacagtacttgcttggggaaactcaatgggtgacttagtatcgaatatcgcattgacaatgaacggtggggatggtgtacaaatcgctctatcgggatgctacgccggtccaatgttcaacacactcgtcgggctaggtatgtcgatgctttttggcgcatggtccaagagtcctgacacatacatgctaccagaagacaaaagcctattctacacacttgggtttctagtactcggtttggtttgggctatggtgatactcccgcgcaacgacatgcaacctagcagaaccttaggtgttggactcattgcaatatatctgatattcgtcactttcaggctgagctgcgccatgggattcataccatgggctgcttaaagagctatgtataaccttgtttagtctctaaccaacaaactaatcagaggcttattgtataccaaagaattgatcatgacatgagagtcgtagttttgaatcttagtgtgtttgtttgttattggtttgtccttttgtcatacctgcccattttcataaccgcaaacatttcttattatcctcgtgtcaacattaaagcagtcatgtgacccacgtctcctccttgattattccattattcactgttatcttttcgaagaatcatttgggaccaattattgataaattgcagacgtggcatatagacgaaatacaagattcagagataataaatacgtcaccaaaagttatcacccacaacgaatcttcttcttccatcgccattgccatggctaagctctctctttcctccatcttcttcgtcttccctctcctcctctgtttcttttccccttcttcttcttcatcggatggcttagaatcctacatcgtccatgtgcagagatctcataagccttccctcttctcctcccacaacaactggcacgtatctctccttcgctctctcccttcttctccccaaccagcaacgctgctctactcttattcacgcgccgttcatggcttctccgctcgtctctcccctatccaaaccgccgccctccgccgtcatccttcagtcatctccgttatacctgatcaagcgcgtgagatccacacaactcacacgcctgccttcctcggtttctcccaaaactctggactctggagcaactcaaattacggggaagacgtgatcgtcggcgttttagatactggaatctggccggaacatccaagtttctcggattcaggtctcggtccaattccatctacctggaaaggcgagtgcgagatcggacctgattttcctgcctcatcttgcaatcggaagcttatcggagctcgagcgttttacaggggatatttaacgcaacggaatggaacaaaaaagcatgcagccaaggaatcgagatcgccgcgtgatacagaaggtcatggcacgcacacggcatctacggcagctggatcggtggttgctaacgcgagtttgtaccagtacgcgcgcggaacagctactgggatggcgtcaaaggcgagaatcgccgcttacaaaatctgttggaccggcggatgttacgattccgatatcctcgccgccatggatcaggcggttgccgacggtgttcacgttatctctctctccgtcggagccagcggttccgccccggagtatcacacggactctatagcgatcggagcatttggagccacgcggcacggcatcgtcgtttcttgctccgctgggaattctggtcctaatcctgaaaccgcgacgaacatcgctccatggatcttaaccgttggtgcgtccaccgtcgatagagaattctccgcaaacgcaatcacgggagacgggaaagtcttcacgggaacatcactgtacgcaggcgaatctctaccggattctcaactttctctggtatattccggcgattgcggaagcagattgtgttaccctgggaaattgaattcatcattggttgaaggcaaaatcgtgctctgtgacagaggaggcaacgcaagagttgagaaaggaagtgcagtcaagctagccggtggtgctggtatgattctggcgaacacagctgaaagcggtgaagaattaaccgccgattcgcatctcgtcccggcgacaatggttggagctaaagctggagatcaaatccgcgactacatcaaaacatcagactctcccactgcaaaaatcagtttcctaggcactttgatcggaccatctcctccttctcccagagtcgccgctttctccagccgtggaccgaatcacttgacaccggttattcttaaaccggacgtgattgctcctggagtcaacattttagccggttggaccgggatggttggtcctaccgatttagatatcgatccaagacgggttcaattcaacatcatctccggtacatcgatgtcgtgcccacacgttagtggactcgccgctctcctccgtaaagctcatcccgattggtcacctgcagcaatcaaatccgcccttgtaaccaccgcttacgatgtcgaaaactccggcgaaccaatcgaggatctcgccaccggtaaatcatcgaactcattcatccacggagctggacacgtcgatccaaacaaagctttgaatcctggtttggtttacgacatcgaggtcaaagagtacgtagctttcctctgcgccgtgggatacgagtttccggggattctagtctttcttcaagatccaactctttacgacgcatgtgaaacgagcaagctaagaaccgccggcgatctcaattacccatctttctccgtggttttcgcatcgaccggggaagttgtgaaatacaaaagggttgtcaaaaacgtgggaagcaatgtcgacgctgtgtacgaagtcggagttaaatctccggcgaatgttgagattgatgtttctccaagcaagcttgcgttcagcaaggagaagagcgtgttggagtatgaagtcacatttaagagcgttgtgctcggcggaggagtcggatccgtgccgggtcatgaattcgggtcgatcgaatggacagacggtgaacacgttgttaagagtccggtggccgtccaatggggtcagggatcagttcagtccttctgattgatcattgaaattgggctctggttgtatgttttcattaaaaagaaaaaagtcctgtcgggtttgttaaaagggccatgttgtaatgggccgct

SEQ ID NO: 36183 - DNA, 1712 bp, Arabidopsis thaliana landsberg
ctaatgatgcgctgctgctcactggtttcttttgatctcgtttctctctgcactaacgaatgaatttgaagcaatttagtcctgatggtatacagcgatatgtgtctttaatctcttctatattttgtctttgacaagtcatgatcaccatttactccgcccagattgctgaagggattaaatcctttttttctccaggtgaggcgcttttgagttttagaaatggagttttggcttctgatggtgttattggtctgtggagaccagaggatcctgatccatgtaactggaaaggagtgacctgtgatgcaaaaacaaaaagagttatagccttgtaagtttaaaatttctttagtttaaattctttttttttcttcagtatgtggtgcatcttttgtcggttcctgaagtttcttgtgtgcaggagtcttacttatcacaaattaaggggacctttaccccctgagcttggaaagctggatcagttaaggcttttgtatgtgctcctaaccttttaattaatattattgatgtctagcatatgctctactactcattgtatgtgtattcccatgtcattgcagaatgcttcacaacaatgcgttatatcaatcaatacctgcctcattgggaaattgcacggcattagagggaatgtaagggctttcccaaatacttatgctgattagtgtgattacacttcattgctgatcgaattctcgttttgtttttccaaattttatattatttcctaacaattactagtgtttttctttatttgcttctatatagttggtgcataatattgatgcgtcttgtgagtgatgataaactcagtcacaagtttagctagttgacaagaatcgttgtgaatcttttataatttattgtccttttattccttgcagatacttgcagaataattacatcactgggacaatcccaagtgaaataggaaacctgtccgggctgaaaaacctgtacgtggtttttttcctcgttcttccaagtggatttgttttcttagcctctctaggatctgctatttgttgttctgctatctactctcaccatttagtatcctctataattatattgtgaactacaagaggttcttctgctcttccatgcagcaacaacataatgttttcgaaagtacttatttctacagtcgtggtgaaccctaaaaattatagggagtttgacataacttatatttaatcacgtattgtgttattttttccgggtgaaaaactctcaaatatgatgatgagaattgtaaatctatgctaggcttctttcatattaaatgggcatatcatctacattcttctgaactactatgatttttgactctcatttatgaagggacctctcaaacaacaatctcaatggagctatccctgcttcacttgggcagttgaaaaggcttactaaattgtgagttgctaatctctaacttgcgtattttattttgcagtcctgtagatatatgagtgtcaatgttactaactatgttgatcttcttttgaagcaatgtctcaaacaacttcctggtgggaaaaataccttctgacggcctactcgctagactctcgagggactcgtaagtataattgatatatacccatttccccaccaaatttttgtaaattatggttgatatatctttctacggttgatctggcatagcaaatataatttttttgtga

SEQ ID NO: 36184 - DNA, 2347 bp, Arabidopsis thaliana landsberg
tgatgtggtgagaggcgccccagtggttcagcctggtgatgacctcttctggtttggcaagccacgcttcattcttttccttattcacttggtcctttttacggtacaatacttgtatccttcaccgctcgttttttcgatctttttcgggggttttctcctaacggtagaataaattttcttatctttgcagaatgcatttcaacttgcattctttgcctggagtacggtaagcgagccatttcattttctttgaaaacatcgctgtttcgggctatactaattgttatgtcataaattttctgtatttgcagtatgaattcaatctcaataattgtttccatgaaagcactgcagatgtggtcattagacttgtagttgggtaagctaacattatcttgactgttgattcttctgagaattgtgtctttaactgaaaaagtataatcccctttttataaatcttgcagagctgttgtgcagatactttgcagctatgtgactcttccactctatgcacttgttactcaggtactagaaaacattagtgttacatggatgccagattttggttatatgatctttagttttttttacattgtgttgaatgaaaattgtgtgcagatgggtagtaaaatgaagccaacagtattcaacgatagagtagccacggcattaaagaagtggcatcacactgcaaagaacgagacgaaacacggaagacactcgggatccaatacacctttctctagccgtccatctacaccaacacatggctcatctccaatccatctccttcacaatttcaataaccggagcgttgaaaattacccaagttctccttctcctagatactctggtcatggtcatcatgaacaccaattttgggatcctgagtctcaacaccaagaagctgaaacttccacacatcattctcttgcgcatgaaagctcagaacctgttcttgcatctgtggaacttcctcctataaggactagcaaaagcttaagagatttttcttttaagaaatgatgattcttgtttgctatatttgatttcgtacagtgggaattttgtcatatgaaaataatttcttgtacattactagtttgataagaaataaccatatctatatggatacatgatatgttattctctggcaatgcttaagagtttcacgaattacacatacatttgtatttctgcaggttttaacgtcctgagacatcagtgatggtgacattgttgatagaggctttaagagcaatgctctcagagaactcagcttctaaaccaacgtttctaggcataaaagcaggctgtttcggttctggaatgtctgcaacctcactgctaagcatcatacacactgtagaaacacttggcctatcattagcagcgtcttgcacacacaaaagcgcaatgtgaacgcattttcgtatttctttctcaaaaagttggtcaaaaatctcaggatctaccataccattaatctccccttcgttccagattgaccacacctatgaaacatagaagctttgatggcttgatgacaatctcaagagagttaagaaactttacgagttaaagtagactcacatgagccaaaagagttgaatgtgagtttcttcttccactgataatctctaagagtatcactcctaagctgaaaacatcagatttctctgaaaacagtcctcccattgcatattcaggtgccatatagccactgcacgatacatttattttctcggttttaggactcttaatggaaaaaaagatgtaaacatatggttgaatggagttacttactatgttccaacgacccttctggtgtttgcttcatcttcattccccgggaatatcctggccaacccaaaatcagatattttcggaatcagattctcatctagcaagatgttgcttgctttcagatctctgtgaatgattctcagcctagaatctctgtgaaggtacaggagacctctacatatttcattgatatttaaaccgcgtcttccagtcaagaagttttgcttcccttggatctgaacaacaaatttgcttctgttaattgacctgatgataacactgcaccagagtttgaaaacaaaaaagagtgataagttaccaaatatataaaagtctaagcttttcttgggcatgaactcatagactaacatcctttcttcccctgcaatgcagcaaccaaataatttcaccagatttcgatgttgcaacttagaaatcacaaccacttcagtgacaagatcctcatgcccttgttctgatgcttgtgacagtctcttcacagcaatcttttgaccttttagcatcatcccctgca

SEQ ID NO: 36185 - DNA, 1601 bp, Arabidopsis thaliana landsberg
cccggcagatccggttagggagccgccgattattgttgtgaacactgtgctttcgctattagctgtgaattatccagcgaataaactagcgtgttatgtgtcggacgatggatgttctcctctcacttacttttctctcaaggaagcttctaagttcgctaaaatttgggttcccttctgcaagaaatacaacgttagagttagagctccttttagatatttcttaaaccctttggttgcaacagatgattccgtattcagcacagattggaaaatgatgaaggtaatgaggttgattatttagtattcaacagacgtttgaatttgtttttcataaccgaaggtcattttttttttcaattcgtttctaatttccacttttactagaaaacaaaaggtatgcactatcttgcttttcattttcatctctttgtttttatcagatttataaggctttttattatgtttattttatattaatatgaagagcgagtacgtgaagttatgccggaaagttgaagatgccacaggagattcccattggttggatgcagacgatgattttgaagctttctcaaacacaaaaccaaatgatcattcaactattgttaaggtattactagaattgtttaaaaagattactataatattgtacaattttccaaagttatgtacatattaaaacttataatagtaacaattgcatggaatcttgtcttatgtgtgtatatgaaggtggtatgggagaacaagggaggtgtaggagacgagaaagaagtccctcatcttgtatacatttcaagagagaaaagaccaaattaccttcatcataacaaaactggagccatgaactttctggttaatgattttttcttacgtatctctctgtttttggttaatgactttcttctgttatagactactactatacttatttatatttcttaataacaataataaaatttcgaatagatatattaatatctcctaaaaaataagtgtcaatgattgtagatctgtttctttttgttattatgataaaaatatgatgagcctaatatataatttaaacagttaagagtgtcagggttgatgacaaatgcaccatacatgttgaacgtagactgtgatatgtatgccaatgaaccagatgtggtgcgacaagcaatgtgtgtattcttacaaaactcaaagaactcaaaccattgtgcttttgttcagttccctcaaaacttctatgattcttacaccaacgaacttgtcgtcttacaacatgtgcggtttctcattcttttaccttttttccttgaatctttgcttaatttaatgttatttatcgaccaatatttactctctttttttttttttgtaattagtatatgaaacgaggagttgcgggaatccaaggaccgatatatattggatcaggctgcttccacactagaagagttatgtacggtttatcttcagacgatttagaagacgatggaagtctttcttcggttgctacaagtacgtgaaatttgattagagattttcatctaacatacacttcatcataattttagttattacactgttcatacatcaactcattcacg

SEQ ID NO: 36186 - DNA, 1662 bp, Arabidopsis thaliana landsberg
taggtcgactctagaggatccccctgtgggttttgatcaagaccggcgttctcggtgaagctacgttacctctttacatttcaagttcatcggaaacacccaaaatttccagtttaaaagaacttctagcgaggctacagatcggtcacttggaatcaaaacacaatgctctcgaaagcctccttggtgcaatgcaagaagatgaaaagatggttcttatgcctttgatcggacgagccaacgttgcagctttagttcagctgctaacagcaacttcgacaagaatcagagagaaagcggtgaatctgatcagtgtattagcagaatcaggacactgcgacgaatggcttatctccgaaggtgtattgcctccgttagtgagactaatcgaatcagggagtcttgaaaccaaagaaaaagctgcgattgcgatccagagactgtccatgacagaggaaaacgcacgggaaatcgcaggacacggcggaatcacaccgcttatagatctctgtaaaacaggggattctgtgtcacaagctgcgtctgcagctgctctgaagaacatgtcagcagtttcagagctgagacaattgcttgcggaagaaggaataattagagtctcgatcgatcttctaaaccatgggatattgttaggatcaagagaacacatggccgagtgtttgcagaatctcactgcagcgagcgacgctctacgtgaagccattgtctcagaaggcggagttccgagtctcttggcttatctcgacggtccgttgccgcaacaaccggcggtaacggcactgagaaatctaatcccgtcggtgaatccagagatatgggtggctctcaatttgcttccacgattgaggcatgtactcaagtcaggatctttaggcgcgcaacaagcagcagcatcggctatttgccgtttcgcttgctcgccggagacgaaaaggctagtgggagaatccggttgcatcccggagatcgtgaaacttctggaatcgaagtcaaacggatgtcgagaagcggcggctcaggcgatcgctggattggtagcggaaggaaggattcgacgggaactgaagaaagacgggaagagcgttctgacgaatttggtgatgttattggattcaaaccctggaaacacggcgaagaagtacgccgtggcggggctgttggggatgtcgggaagcgagaagagtaagaaaatgatggtgtcgtacggagcaatagggtatctgaagaagctgtcggagatggaagtaatgggcgccgataagcttctcgagaagcttgaaagaggaaagctaagaagcttctttcaccggtaaaacgaacgatgcggagacattgaagcagccaagataaaaagtgtaatattgtctgatgtaagtttattaaccgttagttaaactttactagtaattaaaaagtgttctttgggctgtttctctgaagctgataaatatgggctttatattaaacaggcccatgaagttgaatatctttcagtagtcaactaggtttattcccagataatttatgtggccaactattaaatacaggcccatgaccttaacaaaaaaaaatacaggcccatgaacgtaatatgattctgtttatcaaaattaattaaggagacaaatatcagttgtgaaa

SEQ ID NO: 36187 - DNA, 8338 bp, Arabidopsis thaliana landsberg
  unsure (1)..(8338): unsure at all n locations
atctacatgtgtttatatttcctgtgattgatttataatgatttgttttcacttttgtccgttgacgcgtctttaattgaaccgtcgcggcgcatgcatagatcgatactgtgaagttcttcattgtagattcattttgttgtttgtaattatattgttagtattcgatctgaaatgttgaatatttagagtaaatttaagattttttaagttggcctatgataacgttgatgagatgagtgaacatagatgatttctaggattggatttcgaatgttatcatttagtttcttctgataattaatgaagttgccagcaaaaaaaaaaaaagttttttcattgcgtttggtttttacatgtgttttatctgatagctcatgaaataaaatttactttcttagcctgtggccttagctttgatgattaatgtgtcttatattctttctcttagaccatcatgagtgaccatggagagaagacttgtccactttgtgctgaagagatggatctgactgatcaacaattgaagccttgcaaatgtggttatcaggtcttgcatctaccttccattttctcttaatttcaattgatatgttacggcttaatcttgaaactgaaagttattgggagaacagttttgcttattgcaatgttcaatagctctcgtctttctctgttttcatgatcgctataatcactcttttatctgttaataattttgtgtatgtgattcagatttgtgtttggtgctggcatcacatagtggacatggcagagaaagatcaaatagaagggcgttgtccagcttgtcgcactccatatgacaaagaaaagattgtagggatgactgttaattgtgacaggtttgtaataacatttaattttagtctgggacagtctttttccgtttcttttgctgatcgcttttctctataattacctgttcccagtctggcttctgaaggcaatatggagcgcaagaagatccagaagtcaaaatcaaaatcttctgaagggagaaagcaacaactcaccagtgtgcgagtgatccagaggaatcttgtttacattgttgggttgcctcttaatctagccgatgaagatgtatgacaacttacatccaaacctttataatcattctttttgtagattactatctgattagcgcgccatttttctttcagctactccaacataaagaatattttggtcagtatggaaaagttctaaaggtttccatgtcccgaacagcatctggtgtcatccaacaattcccaaacaatacatgcagtgtgtgcgtttctgtatatacttcttatcaaacaatttccctctttatatatatatatttggtcagtgaagttgtctgataatgattttttgcatcgcagatatattacttatggaaaagaggaagaggctgttcgctgcattcaagctgttcatgggtttatcttggatggtaaaccattgaagtaagttttgacttgctttttctaaaaaaactagaattgtatttataagttattatattcacctaatgatcatatgaaagttctcgctctctatctatatttgcagggcatgtnttgggacaaccaagtattgtcatgcatggctgagaaatgtggtatgtctcctatagattcttgttcttctgcgttgttatttttgattacctcgcttcagatgcatgttgaagttgatgtctttggagtgatgaactgcatgtttttattccaggcatgcgtcaatcctgattgtctctatttgcacgaggttggttctcaagatgatagcttcacaaaagatgagatcatatcagcctatacaaggtatttgtatcatctgaaattttaaaataccctcttgctttcatgattgttctgtttcatggtaccagtatctttaggtaatgtaatatgatagttggtctagtatttttggatgattagttaagtcttatagtaattttgaaggagtagagttcaacaaatcactggagcaacaaatattctgcagcaccattcagggaacatgctacctccaccactggatgcttattgcagtgacagttcttctgcaaaaccaattataaaggttccttcaactgtaagttcagtttaatctcaactttcccttaacatgatgtgcaatttggcttgagtaatgtgttccaaagataatccacatctgaagtattttctatttgttaatcctagttggtgactaacttgatgatgtggcatgactagcttatgaaatctcttaattttcctgagcttaataatttatttcctatgtacagaatgcaactagtgttcccaggtattctccgccaagtgggagtgggagctccagcagatccactgcccttcctgctgcagcgtcatggttagttttcacttgatgctttttatgtcttttgattggtctatctaagaaataaggaaattctgttgcagggggacacatcagtctttagcaacttcggtcacctcaaatggatcttctgatatacaaagatcaacatcagtgaatggaaccttacccttttctgctgttgttgcaaacgcagctcatgggcctgtatcctctaatgacattcttaaaagaccatctcgcaaagaagaaagccaaatagttatggacaaagtcaaacctagtgtgttgaagcccttgcagcataatgttgtggtttctgggtccgagagaattaccgcacccgatagagatcctactagcaatcgtttatccagttcagtagactctgcctacggaggcagagacattgaccagccttcagcctacagtggcagagacattgacaagccttcatctactgttagctcgtttgatgctgcaaatgaagctgtagaagatgtccctactgtaagcaacttgttggatggtgttgcatgcatggggataactatgaattgtagggatgaacgtcctgatattacaatggcgattggtagtcaaagtgatcaaggttctattagacaacctggttctgaagtatcaaagttgccagatttagagcaatgtaggatagatagttctataaacactgataagaaagctatctcgttagaggataggatcccccgcactaggccagggtgggattggatatcagatttgcaatcgcaaatgcaaggaagctctaaattgcaagtggaggatatatcaacattggatagccaacggcctcaccctgaagaggatattatccactcgcggttgctgtctaatttgtcaagttccagtttggatacaaatcatatggcttctcgttcttccctaccttgtgaagttaggggcagtgatagattgcatcttccaaatggatttggtgagaaatccatgtccagtgtggagcactctctgttcgcaaatgaaggcaggaacaaagtcaacaatgcagaggatgctatactttcaaacattttgtcactcgattttgatccatgggatgaatccttgacttctccccacaatttggcagagttactaggtgaagttgatcagcgatctagtactcttaaaccttcaaacttcctaaagcaacataacaaccagtctagattttcttttgcacggtatgaagaatctagtaatcaagcatatgacagtgagaactatagcatttatgggcagttgtcaagagataaacctattcaggagtctgccatgagccgagatatctatcgaaataaccttgggagtgtaaatggatttgcttcaaacttcgctggtggattggataactttgccgctagtcctttattttcttcgcacaagaatcctggttagtagttttagtttatggctgttggttatttcttgtttgggtatttttctgctacatttccaatttttcttttctgttgtcctattgcagtttcacgacctcaagtttctgcgcctccaggattttctgctcccaacaggctacctcctcctggcttctcgtcacatgaaagagtgggcctatcatcagatactacactaggtattttctcttcttctatttgtggcatcatagagtacggatgatgctagagactaaaacttttgtccacttgtatcataggaaatcgatttcttgactctacttcattgaggaatgcatatcaagtaccaccttcagttggtaattcaaatggtgcatgtgatatcgactttgtggatcctgcaattctagctgttggaagagggatggtaaatgctgacttggacatgagatcaggattctcatcacaactgaattcttttgaaaacgaaacaggactccatatgttgagacagcagtctctgtcttctgcacaacaagttaatgggtttcatcatgatctcagaaacttatctccttcacttaacgacccttacggatttagctcaaggcttatggatcaaacacagggaagtagcttgtctcctttctcacagctcccaagacaacaaccatctgcaaattcaatcttgtccaatggtcatcactgggataagtggaatgaagggcaaagtgtgaacaatataggcatggccgagcttcttaggaatgaacggctgggttttaatgggagcttatacaacaacggatatnnnnnnnnnnnnnnnnnnnnnncaagtcccggtgatgtgtataacaggacatatgggatttgattctggcatgaagagaggtttctgctttgttggatctgctctggttggtcccgattcccaagtgagtggaaaattcatactcaaaaactgcttccgctgctgctgcgcatataggatcaattctcataccaaagatgcaggcccctaacatagattccccaagagcttaaaaggtactgaatcattttcttctataatatgtgattttggtttatccattcgtttataatgtgtgaatttgacttttgcaggagcaaggatgttaaattgtcaatgtttgggtgcttggataaattttgatttctgctgatgattggtttcgtcggaattctggcaaattttgagggtccaacgatgatagaggtagaagttgcgctctgattttttggttcttatataaagttgtaaatgaatttagttataaaaaacagtgaagcttttaaaagtattctatgaaaattcaaattgttattgcaaaactttcacaaaatctttatttcgtttttcaaattttataactcttcttcataaaaacccgaaaaacctttcttacaagagttatgtaactaccttaaaaccaaacaatttatgtattataactagtttgagacataaacacagagttataatcagcaacgaagcctaaatgtgtccaagatgtttgcaatgttgtttccgtgagatctacgcaagagatggataaaaggcatgagcttctgcaccaaaccccaaaacagatccatcctcatctcctttgtgaatctcagtgccttgaccaccacgaaattcccaaactcattcctcgccagcctcatcaacctgtctccatcgcaacccaaaagctccacaaccaccacaaccattgactcctccacctccaaaagcttctccacgatgtagcttccatacttcttaaacgatagctcaatgcactgaccataaagattaacggcgatgttgtgaatgcaacgcgagtcatacagtgtaagcacatgttggaccacaaagttccctgaagcatcgttgcttagccggagagcgttggatgcgaccaattctagtagctgatctctgtagtaaggatcgtcagcgtcggttatgatatcattgagcgcgatgcagccgtgctggtcacacgctaggtcgagagcgtggtagagaatgtgctcgtacaatgcctttttcatcaccttgtcgaaaacgaccatggctcgtatcgtcacgtaggatgcgtatttgtcggtcgtgatgtggaggaagcggcgcaagatagcggcacagaagaaggcgtccacgtcatctgatttgccgaggagcttctgcacgcgtctcgagccgcacttgtttgtgacgatcgacatgaagtaatcggagtcagacgtaagcaacgaggccatcctctgaagctctgttttgtctgactttgagatcatctctttaaagtaagacacaccatcgccgtcagtcattaggttgaacagagctgcgtgcaagggcgtggcggaggcgcgtggggcgaatccaggaggaggaatgtaaccggaggtttctgtagggtttggtaaagcattgaacatggtcgacattgaaaaggtattatcggagactgccattgatgtatttcttgatctacagaaatttctctagaaaagggtttaatcagtttgtgtgattttggagaagtatgagagatttgtgaatgagagatctgtggtgatgcgtagagtatttatagaaaagttagggcttttgtttttctagttacaacacaactcggattcctaccaggaaaaggaaacttatttggtggagtatccttttttctttgtgttttaataataataatctatctgagaaaaatggaaaaaaagtagaatttttctgtaaaacgacaatatttaggcacgaaaatcaaattaaaaaaggaaaagtaggaaggagatcgtaaatttgatcccgtaaattcgaagggtattagaagggtataatcgtcatctgccattgcctctttttcgaggtcaacatcggctcattgacgaatgacgactgtgaatagaagatactgatacgaacgaaacttcggcccacattgggtttatgggcccaatataatatatatacgattcattttcttctcgcagtttgttttctcctcttgttgctgggttctcttctcgctaaaaacccagattgcagcagttttgtcaagtggcggattactggagtagcaagcagaatctttcaggtaattgatgatttacgtgttttctcctgctcaaatcaagatatattgtgaatgaatctttaggcagtttctttcctctgatcgagtctttgttttctgtcaataatcgaattcgagaatcgctgcttttatctggttgtatttgttcggagaaatttgatccttgcttgtagatattgtaagaacaatttgtgatacactcaaactgttcgataaaatgcctgaacgaaactttgcttcttttgcaatctttgatgcgaagtatgaaataatattttcttgagcatataggttgatgcaattaggtgatctaaatttccaatatcaaactgatgacgtttacatattccctgggaattgtcagctgttcatcaatagcattttctagttagcctttatgcttgacattaagatctcatgttactgataacgttctagctcgtggttagaatgaacaagaagcagttctagcttaagctaaagacaaggttgcttattgacaaagcaattcatctttttgaatctttcgatcccttactcacttttgtgtgcgtttactactttctgagaattcatcttttcacaatttgtattttggcttaacagatttcatttttgtaaattgcagagtttctggattctccggtgtagccagttgaagcttatcagtatacgctatgggaaatacttctgatgacgacaagatcctcagctatgaagatgttgtcctcaggagatcagatttggacatcctaaacggacccatttttctaaacgatcgtgttatcgagttctaccttagcttcttatccacggttcacagttccactaccatctcgctaatccctccctccattgctttctggatctcaaactgcccggacaccgaatacctcaaagatttcatgaaaccacttaatttgcgcgacaaagacctcctgatactccctgtaaacgacaattcaaatgtcgaggtagcagaaggcggattacattggagcttactcgtgtactacaaagaggccaacacgtttgtccatcacgatagctacatgggagnnnnnnnnnnnnnnnnnnnnnnnnnnnnnnnnncggtttctccgtttgtgtctaatggagatgcatcatacaaggaatgcactgatacaccacagcaaaagaatgggtacgactgcggtgttttccttcttgctaccgctcgggtaatatgtgaatggttcagctctggaggaatgaagaaccgggatgagctgtggtttgctaatgtgaaggagactgtaccagatctggttaaccatctgagagaagagattttggcgctgatcaagaagttgatgtctgagagtgtgagtaagtgagagatggttattgaacgtggttagatattccggttggatgatttaactgttttccggaact

SEQ ID NO: 36188 - DNA, 1497 bp, Arabidopsis thaliana landsberg
  unsure (1)..(1497): unsure at all n locations
gcagttgagtaaagcaaaacatggtagtgaaaaaagaaataagcaaagtcttggagtgtgttacctaccgaccaagtccttttcagttggcaagattatgcgagcagtcacgcagtcatagatccactgtggtggagcatataccctagaaaggtacaaatggccagcgctcggcttatcgatgatctacaaaagtataatgtatgttcttaagtctatctatctagacacaatcgtaatattaataatcaagctaaatagctaacatgatgtgtaacactctcatcatcctccttgaaaggtgcaccttctccttcccaagacaccatcccaccaaaagcagtaatcaccaattgcagggactctcttggaacctacacaaaaatacaaaattattatacaatagacaggccccagtcatgaaacaatttaatgatcttctaggtaactgtgaggagacactcatgaacacaaaactttcacctatcagaacatggaatgcaatttacaatcattgacacaactttggttaggactacacagtagctactaggtgtccctcaccactaagtacgtataataatcattgtttttttaaaagccgttgcttacaaatggtgtggctttcagtaagagtgtttgaacattatgaacatgtcagagatttaggctatagaaaaattaccattttatttggtaaattactgaatcactttagtagcaaatgagtatgttttgtccataacagttaaaatttgccaatgatttactattttagaacaaaattcagtgataagaagtggctcataaagaatgaatcaaaaagatacctcacggctcaagaaaaacttcagatccttgaagagtgacttgcacactcttgtttcttcatcctcttcaacctctttattgttatctgcaaccagatgcatcaatgctccaggctcacttgaaggcagctggtgctgaagctgtgcaagtctaagttcagactcttcacggtcatttgactgtgagctaaatgaatcatcaactttgggttccaccgccatgcctctggagctggcatctatgtatctagacagtgcatagagatctgcaacattgaagacataaacaaatatatattaatcagagtaataggtgacacgttctaatggttacatatgaactcccatatgaaagatatctcttgaggaaaataattgcttcttggaggaggacaacgtacctgcagccaaagcctccaaccgagagtcaaggattggcgggtatttaacattcagagaatggtaaagcttgaagttaataaaggcaagaagagtctgcatcaaaaggtgaatgaaaatttgtcagcaaaagtccaaacattaaattattaaggaaaagggggaatgaatagatatnanaagttctcacctcgtaaaattccaagagggaaagcaggacaccaaagtcaacatcatttgtaaaaacttggtggaatgcatgaggggt

SEQ ID NO: 36189 - DNA, 2050 bp, Arabidopsis thaliana landsberg
tgggtagaaagaagcttttcaaagctagagttgatcaagtcttacttgtgatcaacaacattacaaaatacgctaaaatgtttggctatgttatggattgaaaaagacatggttaaacaccttgactacaaaactttgatgaatggctttgcggaacaaaaaacaacaaagagtatcttcaagagaaagttcaaataagatagtcgtttttgctgtttatttgccataacgattttgtttttggtaaagttaatttgtggtattattttatatagagtctccgattttttatttcgtatttggtcacgaatattataggatcatagctgagtataatcgaaaaatctaaacaacaatagaaagtgagacatagaacattttgtcttcgtaccattaatatttcacttcattttgtctaatgactggattttttttaaaacaaaatccaaaagatatttgccctatttgttacactattatcaattatttcaaaatattagaatgacacgatgtcattaacataataacaacgtaaatttacatcaaacaaaaaatatattccgaagttaacaattcaatacaaattaaacaattctaaaaatatgggcagcggttttttgagtcgggtttaggatagagttatatggtaggacgggtttgagtcgatattaatacaaaaagatatatcaaggatgatatcctagaattgacaataaaaatacaattatactagattttatcccgcggtacaccgcggtgacaatttatctttttaaagttagtataatttttttttttcaaattgtatctatctataatatatttttattttatagtttacaattgttattaagtaacgtcctgccaaacccgtcccgccaaacccgtcctgtaaaaaacccatttatttatattaatgttgatcttattaaacatatgtttgtaaatcattgtctaaatatttttgtcgatgcgagacgttgaacccacacattttttgctaattggttaatatatgttcatttttaaaattttgaatcataaaatatggcggaaaaaattaagatttttttaaactctatatattatataatgatgttaaaaaattgtaatatatcaaacttcttataagtttaaatattattaatgttttataaattttaaatatataaataataatatttaagaaattaatatttttgcttataaggtaatgacataataactctaaaagcaaggatttagaagaattaaatctttaattaaatatttcattaataaataattaatgtcagtgacatgacattgttaataagttcaaatacaaaatttatttatttaaacaaaaaacgtttagtaagaataatatttatttaacaaaaaactttgttttaaaatattgttaacaaatatgtttatgctaattttaagggattgatttgaagtttggtgggattaaatttgattgataatgtgattgacaatttaaatcaataatttaaagtaaaattaattattttgaaaaaaagttttaatgctaatggcattagattgtaaataagtccaagtccaagatttatttgctaaaatggctgcaaaaatgtatatatataggttgtacttttggttgcttgggatgcaagctaataaatgtaattgtgttatttgattggaaaacaataccagcagctccatggctccactaccacaaccaaaacgtaagtttattttttgttttcttcatcctataatatgtatgcaatgtttatttttgttttgttaaattaatgttaatcctagtttttgtttgaaaattttgcagataattctctacggaagttaaaaccaatacttggtaccaccttcattgcaaccacatctctcttgccctatcatttatcatgtacatgacacctaagttttgcttcttcttctttttttctcttccaggaggctcagcagctttaactatgttgatcagtatttactgggattgcgctacgtagtgagagcgaggcatgcgaaaagaaagagtgaattaaacgacgag

SEQ ID NO: 36190 - DNA, 2223 bp, Arabidopsis thaliana landsberg
cgcacttgtctctctctctgcctttgccttttaatgcttctttgagacatctaataaatgtttttattgtttgatttttatcaaaattatgccacttctttttccttttatcatgcattcttcatttttcgatcgtgttatatggcccttatcaaaattatgtatagttatacttgtgacatgatctctcgaccaacaactttatgccaccccacactattgactattgtatggttacttcaccccaagcttataatggaacattgcaaagaaaatttctagtttggtttgcaaatcaatgcaaaatttagaaactcccattttttaaaaccaaaagagtaacatgatccttttattcttcattgtaaatggtcaaaactgagtacactaacacagccgccatggaatcacaaagataaaaacacaaaactaaatttagtaatcaggtttctagtcataagctgaactgcgaaatctcttgatagtagaatcattaagtatgtcaagcataacagaattggtcgtacacctaggagtcttaaactggttcaagccaccgcatttcccaacgcacctttccgccactttcccaaacgttcctcgttccacaactcgtagctcaagcggtccgatcgagttcatgcgcctcgacactacataaccatagtccacaaaagcagtatccatctctctgcaacattcttcaagagccttatcatctgcttctcctctgatttcccagtagattacatagtgaccaggacgagctataacgtctgcgtggcttgtaaagtcaacgacttcagctcgtgtggatcggctcagaagctgagacgccttgtcaacaactctctgaagatccttctctgtgtttttgtcaatgttgatggttaagatgagttttcttctgtatatgaaacttagcttcggtgtgcctttgtgaaaactggtcacttcaactacgtctcctaatctgtacctataaagacctgaacagagcgataaaacagagtaagtggtgaaacagatgacgcaaaaagctcgttgattataacaattggctatggaaaatgcagaggaggtttttctttacctgtgaaagtggttagaacaagttcatactcctgcccgagtttgacttgagagagcggcacaggtttatcttcgacaaagtcaccgtcaatgcatatgtctgattgattctgccgcctgtaaagtggtataaactcgaagtaactaaaagtgggaatcacagcaaagctcacgtcttctgggggaagatgaggatcaacgttcacaccaatccagctctcggttgacccgtaatctgcgctcaccaggggcaaaccgccagcgtaatgcctcagcttattcaggtacggcagcatagaacccgtcatgattgaggagataaattttgcatttggccaaagctttgaaatcaaaccgaaccatccgagatttgtttccagctctaagcagatctcctcgatatgagaagcaagagacgggtttggtctgatcagagccaatacagcttttctcatcttgggcagagtgattcttgagctaagattaccttccttgatgtcagcacatatctctctccagatttcttcgaaaaaggagaaagcttggacaatggtgtaagaaaaagcagaggcgacaaactctacttggctggagtaatggagaccaagtaggagatgacaatacgtgcactgaccgaaatcacctcctgagatgacctcttgtgggctacaagtgaaggattttgttgtctcttgcttagttttaaactcttcgctcgcatagtaatgtgttgtggccgttcctactgtcaatcctcctagcgtcttaaattccttcccggcgtatataaactcaagaatcctccctccttcccttattggataaaacctttaaaagaaagcatagtaggaatttatgagataatgaagaactttttaatggaaaagaatagacaagaaatgaaaacagaccttgatctgtaagccgctgataatcggaaaatctgaagagtattttgcgcgctatggcgagtaaacggaacatacttttgactcccttctgttgttccagagctgcgtcataaagggagtgaaaagggatcaatacagaacatatatcacatacacataaacacagatatccatagatgcatgtagaaatatacctgagggacagaacagtgatgggttc

SEQ ID NO: 36191 - DNA, 6183 bp, Arabidopsis thaliana landsberg
  unsure (1)..(6183): unsure at all n locations
ctttaactgccctggtccatggtctttgataatgggccttatgaattctttccgtattgggttttgactaataaaatattttttggtgaaaagagctggctccacatttaagagagcaactactatattgaccagtcaaatatctcctacatttattagtattactgtggaatattgaaaaataatatcaagaatttagtcatttaccaaaatgagccagatattttaccgtaaacacaaagttacaaaagaaaagaagaaagagagagagagagagagtcaggcgttacagaaataaagggaaaaacgaaagttgcaaaattttagtaacagctaactcctgcaaacaaaacaaaagcttcgtctgtatctatctctcccttcagactcggtctcacccctactactccgatacaaccaaaacccaaaattaatttattcccattatcaacccatatgtttatggggttttgatgatcaaccattttgcaacacttttagatttgcggaaaaaccaaagagttgaagtgaaagaacaaagatggctagcttgaaactgggttccaaatctgaagtctttcatcttagtggtcacacatggtcagtcttctttttcttcttcaatcgcttaaatcattcactaacaaaacaaaacgtttcatctccttttgtaatctgatcaggctttgcaagactggtcttaagcccgatgttatgatccaagtcgtagacgaaagcttccatctccataaggtaccaattctaatcgactcaaaactcttttgaatttctaaactcatacgttcactttttttaacttgtcctgttttcaacatcagtttcctttgttgtcaagaagtggatatctagaaactctgttcagcaaagcctctgagacaacttgtgttgctcagcttcatgacattcccggtggtcctgaaacattcttgcttgtagctaagttttgttacggtgtaagaattgaggtcaggcctgaaaacgctgtgagtctcagatgtgcagcagagtatctccaaatgagtgaaaactatggagatgcaaatctcatctatctcactgagagtttcctcaacgatcacgtattcgtaaactgggaagattccatcaaggccctggagaaatcatgcgaaccaaaagtgttgcctctcgctgaagagcttcacattgtttctaggtgcattggttctttagccatgaaggcttgtgcagaggacaacacaagttttttcaactggccaatctcactacctgaaggaaccactactactactatatattggaacggaatacaaacaaaggccacgagcgaaaactggtggttcaacgatgtatcatcgttcctagatttaccaatgtacaaaaggttcatcaaaactgttgaatccagaggcgtaaatgcgggtatcatagcagcatctgtcacacattacgccaaacggaatcttcctttacttggttgttctaggaaatctggttctccttcagaggaagggactaactatggagatgacatgtactattcacatgaagaacaacgaagtctccttgaggaaatcgtggaacttctcccgggcaaaaagtgcgttacatcgacaaaattcttgctcaggcttcttaggacatcaatggttctgcacgcgagtcaggtcactcaggagactctggagaagagaattggaatgcagctagacgaagctgctctagaggatttactaataccaaacatgaaatactcaggtgaaacactctatgatactgactctgtccagaggattcttgatcacttcatgttgacgtttgattcaagtattgttgaggagaagcaaatgatgggagattctcatcctcttaagtccatcacaaaggttgctagtctgatagacggctacttagcagaggtggcgtccgatgagaacttgaaactatcgaaatttcaagcacttggtgctctaatcccggaagacgtgagaccaatggatgacggtatctaccgtgcaatagatatatacataaaggtaaactacttaacctaaatcttcaatggtttcaaagttactatgagttgcttgcttcttaagtatcatattagtcttttagataatgcatgtatgatgtatctaatttggagctatatcaggctcatccatggctaacagagtcagagagagaacagttgtgcctgcttatgaattgtcagaaactgtcattggaggcatgcacacacgcagcacaaaacgagcgtctaccattgcgggtcatagtacaagtcctgttctttgaacagttacaactccggcacgcgatcgccgggacgttattagctgctcaatcgccgtctacgtcacagtcaacggagccaagaccgtcagcggcaataaggaatctaacgataacggaagaggacggtgatgaagcggaaggagaaagacaggtggacgctgggaaatggaagaagacggttagagagaatcaggtgcttcgcttggatatggatacgatgaggacacgagtgaaccagctagagaaagaatgcttgtacttgaagaaagtgatcgcgaagatcgacaaagaaagttcatcaccggcgacgacgactgatcggccgagaagttggtcgattaccaaaaaattcggatgtaaattcaagacacaggtctgcgattcacacgaagcaacgatggttgatcatagatcacgacggtcttgaattgttttcgattgattttactctttttagtacagaatcagaaagcatattgttgtgattcttggattttagtttttgttaatccttcgagattcttgctatgcgactgctctacacaaatgtgcatcgttttgagtcttgtactcgaattagtaaaaccagaaatgacatacggcccaaagcccatcgttaaacgtttcgaattgagcccttttctcgacttcctccgaatgggccgtaacaatgggcttcagttgcccttatctatcgtaaactgggcactgttttggagagaaattgtttcatatttgtggaatgtgcgccgttttaacgtaggaaaagagggacgaactactcgctgttcagaatcggtagtaggacttcatgtcgttttataaaggagagttcctaaaaacctaaaccctacttagttctgctatataaatcaaccggctttggctgagaagaagccattagcacaatcgagtaccgaatcaaacctaagtctctgtaaatttcctcgttttccgtagatttagttctttgtcatcccatcttattagggttattcgtttaatttcgtttgaatcagttgatactctctgattttctaatatgtgtttgaatcggcatattaatctttgatcgactcgattttgtgtttttagaaaataatttagatttttttagagaaggaaaaatattctcagtgatgaatacacagatgacgagtccgatgaaatccattcattaaatcatggggacaaacgaggcatttgtctgagaggattatttttcttcggttttaggcatttctaaaaatttcttaggtttataggaagcgtggtataaaggggaattttctcagttgatgaaggaccaatagatgacgagtccgatgaatcccattcattaaatcatggggacaaacgaggcatttgtctgagaggaatcctttttgttcaattagttttgttttaattagacttagcaggaagaagaaaggcatgatgaggattgttttattgtcatctgattcttattgatgaatctatacctcctactcattctgagtgccttctcttgctcttaattttcagtcacagatatcattgcattagtagtcactaaattcggattcaattatttgactctagggaacactacatttcaagtgaatctacagatactctaataatataacacaatctgctaagaccaagtgataaaccaattgaactaacaaaaaaaataagtttatgaaatcataactatttcttgatataaaaaaataacagcaaagatgccaagttcatataacataaggcctaaggagaaaccataacttgtaatttcaaactgtatactggaaagcagactgtgctcaatggttttggatgattccctgcatcctagtcctgaacttgaagcaaaacctctagtattggcattcttacatatgatgagttaatttctgagagggacgtacattctgattcaggctctaaaggatcgattaagatttttaatttatcaggaccaattcagaaaaaatttatatgatttctatctgtatacttagaacagaatccataaaagaaaaatgttgttgaagatcaattggacattggacaaaaacctagtgggccgggccttctttgcatctactacttgaaagcctttaaaaagaaaattaattgaaagttaaattttacattaagtgttagcatccaaggcccattagctcagttggttagaaagtcgtgctaataacgcgaaggtcgcaggttcgaaacctgcatgggccatttttcataatatctttttttttcttctgagtttcgtcgtaaataaacaatccgacgccgacggttttggggaccccccactaatcaatatcgtgtcccgctcacttaatccaaaatatgatcccctacatacctctttactctcttccggtgctcccaacaaccatacttcgtctcgatttccaccaggtgtttctacacttctctttattccacgtgtcatgatattggctcatagttactctcaattaccaaagactctcacacactagatcatacaataacacaacaatttaaatcaagcagtcaataatcagccaactagctttttaattttctctgcaattcctctgtcgttctcaccagttaacagctacagcacaaaactgtaaccacgcttccgatctctaaaacctgagagagagagagagacagagagacagagagacagagagaagtgtttcaatagtttggcgtgaagatggccggaggaggcggatacggcggcgcatcggggaaagttgattacgtcttcaaagttgttctaatcggagatgcagctagggggaaatagcaactacttgctcgattcgctagagacgaattcagtttggattctaaggccaccatcggcgttgagtttcagactcggacgcttgttatcgatcacaagagtgttaaggctcagatctgggataccgccggccaagaacggtaatctccgacctctcccggaacttttagctacttcaattgcttgaacttagatctcgtaagattttactgtttctctagatctggaagatgataggtctgcttaggatttcgaattctagtaaagcttactgatctgtatacgaaattcggaggatctgaagtaaaatggtagaatcattgagaatttgggattgggatttcaaaattatgtatagactagaattatgtatattactattccaatgttattaagcttctatagttttatgattggtacaaatttggaagcttttgttatacatttcccagtgatggttcatcatctttatacattcactgatctttaatgagtaagctaaccaccacttttcatgcttatcatatgcttacattgtatatctttctatatgtgtggttttggttgaaacagatacagagcagtatcaagtgcatattaccgaggagcggttggggcgatgttggtgtatgacataaccagacgccaaacctttgaccatatcccaagatggttagaagaactacgtgctcatgcagataagaacattgtgataatccttattgggaacaagtcagatcttgtggatcaacgagctataccgacagaagatgcgaaagaatttgcggagaaagaaggtttgttcttcttggagacatctgcatttaacgcaaccaatgttgagagcgctttctccacggttttgactgagatcttcaacattgtgaacaagaaaagtctggctgcgagtgaagatcaagagaatggtaatcccgggtcgcttgctggtaagaagattgatattgttccaggtcctggtcaagtgataccaaaaaagagtaacatgttgttgtaactcttagataaaccaattcaattcttgaatggtactnngatacaacaatatatagatg

SEQ ID NO: 36192 - DNA, 1081 bp, Arabidopsis thaliana landsberg
aaacactaattaactgtctacagtctacacacatttataacgcaattagatcccaaacaaaagcataccacacacgtatctaccaaaattatcaataaaatcacatctttatagaaatggaagtttccttaaataagaatttacacatcgttaatggaatgtaatcagtagaaatagaaagaaacaataataagaaatcaatgagaatcattggcgtaattgtgtcagttctaatgcacatccacttatatatagacagacacatatttttaactttattacaaattaattacaatttagacgaaccggttaattcggtaaccagtaatactaacgcgtttagggattagtatcaacagcaaaatctgtgtcactaaaattaataaataaatagagaatataaattcctcatttttgtttcttcttcaacctctttgtcagagaagtttcaaaaccccccacacacactttacacactcttcatcttcttcttcttcttcatcgttttcgatttgttgctccgataatgtcgtttctataacccgaagatcgtcaacgaagaaagcgaaataaacctcaaaaatcacagagattattcagatggcggctactgattttttcttcgctttcgtcttctctttcactcttatcttcggcttctctttcgctggtgatccttacgtctcttacgatttcactctctcttacattactgcttctcctcttggtgtccctcaacaggtttcgtttcgcttccattttttttctcttaaaaccctattttttccatcgaaattgaggttttgaagcgttaatctattgattatgtgtccttgattttgctattaacgtattcattgctctagatctaacattacgattcgtcggatgtggttttaaagtttgagcttatctgactggattttgtttcgtgtgtaggtcatagcagtcaatgggaaatttccaggtcctgtgattaacgctacgacaaactacaatgttcatgttaacgtactaaatcatttggatgagcctcttttacttacttggtgatgatccatctcttaacattctcataatg

SEQ ID NO: 36193 - DNA, 3948 bp, Arabidopsis thaliana landsberg
tctcttacgatgatttcctttctatgctttcttgacctgaaactgtaaaacctcctaatttcaggattagcattactgtggttcggtattatcacgggtatattggttcttgttgctatcaacatggaaggctcaagtttcttcaacccgtagtatagtactatacaactcgctggagatttctgttgcaagtaagtctcttaatatatacctcgagaacttgaaatttcttcccctgatgtgattggacagacagattctctttttgtcagttgttttccttatattagaacgtggaacaacactggtttgttcatatagtcaagaaccaaacttgaacttcttttttcctagaataattatgctacttgaaacattaaaattgtagattctgttactctttctgctgcttgtagtgtaccgaaagtcaaaactggacatcaggctttgtatttgataaaattatgtgtgaattgaaaatgagtcagttgattcttctaccttgtgtgacatagttcagtccagatattttcatgtcaaccttttgcctaccgtgtgtgataagcttatcaaggcctctttattttgtggcaggtctggtggtcatctcttctcaaccttagatatggcttataacgaggtctcagttttgtaatttaattttgtatgtaaatagccattagaagagggactcttactaaaggcaggaaggtttggatctattctgtccaagctctcactgttgtgttactctttacacttgtggttgatatacagtacataaaaaaagatagaaaacttttgtatattttgaccaaaaaaaaaaagagaaaattctgacttttcggaaataaaatataatcatcgattgtttcaataggattggtagtaggagcagaacttggttcgtggaaccatccttcatttccattcccataaggtaagattgtggtatttcatgattctcaaataaagtttgacaaagatagactgatcgaaaggtggagcctcttgttaacatgggacagatttcccgtgctaccgtcccaatgaacctgtctctcgctgttgttgctgagcttgatgaccttaccgttggtggacttatcaatggatatggtattgaaggaagctctcacatctacggtttgtttgctgataccgttgaggcttacgagattgttcttgcgggtggggagcttgtccgcgccacaagggataatgagtattctgatctttactacgcaatcccgtggtcgcaaggaactcttggactccttgtagctgctgagatcaggcttattaaagtcaaggagtacatgagactcacttacataccagtcaagggtgatcttcaagccttagctcaaggttacattgattcttttgctcccaaagacggtgacaagtcgaaaatcccggatttcgtcgaaggcatggtttacaatccaacggaaggagtgatgatggttggaacatatgcatctaaagaagaggcaaagaagaaagggaacaaaatcaacaatgtgggatggtggttcaagccgtggttctaccagcacgcgcagaccgccctgaaaaagggacagtttgttgagtacatcccaactcgtgaatactaccacaggcacacaaggtgcttgtactgggaagggaagcttattcttccatttggtgatcagttctggtttaggtacctcttaggttggttgatgcctccaaaggtctctcttcttaaggccactcaaggtgaagctatcaggaactattaccatgatatgcatgttattcaggatatgcttgttcctctttacaaggttggcgatgcactcgaatgggtccaccgcgaaatggaggtaaaactaaaagctcggtttcatgattgatcatcttctagttaaagtttcttttgatgttattaacaaaatcatgaattgtttgttctctttcaggtgtatccaatttggctttgcccacacaaactcttcaagcagccaatcaaaggccaaatctacccagagccaggcttcgagtacgaaaacagacaaggagacacagaagatgcacagatgtacactgatgttggagtctactacgcacctggctgtgtcctaagaggtgaagagtttgatggatcagaagcagtgcgtaggatggagaaatggctgatagagaaccatggattccagcctcagtacgcggtgtctgagctcgacgagaagagcttctggagaatgtttaatggtgaattgtatgaggagtgccgcaagaagtatagagctattggaacgttcatgagtgtttactacaagtccaagaaaggaaggaagactgagaaagaagttagagaagccgaacaagctcatctcgaaactgcttatgccgaggcagattaagtaataataagccttggtttgatgtaatggctcgggatgattattgttattcctagtagtgtctgttatgttgttgtttcctaatttcagttttagtgtcttgaagactcttgttgttgttgtttgcttcttgttgttgttgtttgactcattctggtttgagtggattttagagtttaaaacttttggatttgcctatgaaattgaaggtttccggttttatcgtgttgcttgactgtcacaatgtaagcatgttgctgtaatgaattaattgatctaccaatttgagagatcatttcaacttctctctttataccaccaccaactaggctttagatcattcacgacgtgaatctaaaacacttaaacccgactttgttagttttattggggtgcggttaggtatgatataaacctggaaataccggtatttgaaccgaagttgaccgggtgagactttttaggataaacccaagcatccatttccgagtaagaagagctctgtttctgaaagaagttttacagagtcgatcgtctaaagcgttgttgaagcacttgttagtggtaagtaatttcgatttattaattcttgttgtatcttttgtattcgaagttacttgcttgcttttcgatttcgtctccgtcatgatgtttgcggctctgttaattggaagtggaaaggtctgtcctttatctacataaaatggtgcatagaaggtgttcgactaaattcctagctcaaattcctttagttacattagctctgactggaatgtcactgtgaagtctcgatacccaattcattcttttcaaaaacaattgaagattattatttcccttctcacgattttctgtcttttctctattgttgacactatatcagcaaatgtttcttgcaggtgctctgtttcaagctggataaacccaatcctatggggatttggctggattttataccatattttagcatgattgtttgataaacgcttgataaattgcctcttgttgtcacctttgctacgaaaatgtctctggtttgctctttatcttgtgtagctcccttgccacagactaaacagtcgcgtccaagttttctgaaactcgaaacatgtaccttaagtttatcttctcccgctggctatcctaattttaccaccggtattaggaagcatatcagttacttgttcactgaaccgatcaagcttcctaggctagcaaagagtcggatattagttagtcaggagtcttttacagagaccagcacaatagatatggattgggaagatcaggaggaaattgaggatactgggtcaccttgggaaggttcggttatgtataggagaaatgcttcagttacacatgttgaatattgcactaccttagagaggcttgggttgggaaggttgtcaacagatgtctcgaagaagagagcttctgcaatgggacttagagtgacaaaagatgtcaaggattatccagatggcacaccagttcaagtttcggttgatgtcataaggaggaagaagaagctcaaacttgatggagttgtcag

SEQ ID NO: 36194 - DNA, 1867 bp, Arabidopsis thaliana landsberg
caaaagtaaaaaaaagtacctctattatactcattagacctttaatgaaacttttgataaaatatttaaattggaacaaaacattaaaaggaaaataatactggaaaattaaaatgaatacattagatgtttgaatagaaagtatagcattaataaatgaacaatgataaattaaataaaagaaaacctggggttgacaaaaaaaaaaatgaaagaaaaaaaaaaaaactgggcaaagtcggatcggtgttgttaaacaagcaaagccctccttagcctttccttcctcttgctccttcactcactctcgatctcgacgcgaaatagctttctctcttccaaaggcaattatcgaaaacctgcaaaaagtttctccgccaagtctctccaaaacccctttctcatctctacttttcttcttcttcttcttcttcttctactgagctcgctcctcgctcctccgtctccgtcttcaacgtaatctcaaagtcggttgtttcaatcctgccatggccgaagggaagttcgatctgcctgacgatctcatcttttccaaatcttctgatcagctcaaaggtacttctctcaatcctcctcttgtttctctttttgaatttctttctctctcgaccgatttgaatgcgaagaaacaaatgtaatcgtttggattctggatctgaattcgataggatgcggcagctatgaatatcaaacagatttatcaaaatttgacctagtatgtgctgattaggagctcacgaatatcaattattatcctctatggtccttgttatgcccgctttagatgcattagcaactccatgtttgaattcttttgttaccgattctagactttgggatctggaaagatgaaccaatgactttgttcgtgcctctaatttggctattagtggttttctgactttgtatctgtttgatttctctgatttccttcacctattgactaccttgtttttgcagaattggcctcagataacagcattcccttgtctccgcagtggctttacacgaaatcaagcgagtacaagatggtaatacttaatctagaaagatgatatacgtttcttgtcttcttctattcacctcattgtatcagatgatgctatgcctgttcttcacatgtagaaagtgtcaagtcctttatttatctgtaaattgtttactcctagttcttcatctgatgttcttgctatgttgtaggatgttcgatctcctactcctgttcccatgggaaatccaagtgacccaaatccgaaggatgcatggcgcttggatgcacctgaagacaaaaaggactggaagaaaattgtgcctgagaatgaaactagtcgcagatggcgtgaagaggaaagagaaactggtttactcggtgctaggaaagttgatcgacgaaaaacagagcgtcgtattgacagtgtctcaagcagagaaactggtgacattaaaaatgctgctgcttctgataggtggaatgatgttaattctcgtgctgctgtacatgaaccccggcgcgacaacaaatggtcatctcggtggggtcctgatgacaaagagaaagaagctcgttgtgagaaggtagatattaacaaggacaaggaagagcctcagagtgaaagtcaatctgtggttagcaatgtccgtgcaacctctgaacgggactctgacactcgtgacaaatggaggccacgtcataggatggaatcccagtctggtgggccttcttcttatcgcgctgcacctgggtttggacttgatagaggacgagccgagggcccaaatttagggttcactgtgggccgaggaagggcatctactattgggaggggttcttcaacttccttaattg

SEQ ID NO: 36195 - DNA, 1327 bp, Arabidopsis thaliana landsberg
accccttttttcgattttgcttggctggtccccaactggctagatctactgctttagttggagatggctggcagagttcaatattttattgggatggtttcttgatttaagattcaaaaggatttatttttattttcaatcgaattgcccaaattcaaagactttagtttggtgaattgagtttgcttggagatgcacagtgatctaatttgcggctaaattttttggtttctgtggttaatgaagctctggcaaaatataaaccatggttggaggaagtagtgcacagaagctaactacaaatgatgcacttgcatatcttaaagctgtcaaggataaatttcaagataaacgtgacaaatacgatgagtttcttgaggttatgaaagattttaaagctcagaggtattgtttttgctcactgttattttattttttgctctttagttcaatttgaaatctgatcttattttgtcattgtagagttgatactactggtgttatcttaagggtgaaagaactttttaaagggaacagagaattgattttggggtttaatactttcttaccaaagggtttcgagataactctccgacccgaggatgaccaacccgctgcaccaaagaagcctgttgagtttgaggaagctattagttttgttaacaagattaaggtagaagattatatatggtgcatttcccctttttttcttctcttgctacttggcttcttaactactatcattttatctgcagacaaggtttcaaggcgatgatcgtgtatacaaatcgtttttagacattttgaacatgtatagaaaggaaaacaagtctattactgaggtctaccatgaggtgtgtgttttgtagccatttgtggtacactgttttttcattgttttggttgtccatttttgtcttagttttcaatatgttgaacatgcaggtggctatcctttttcgggaccatcacgatttgcttggagagttcactcactttctccctgatacttcagcaactgcatctactaatgattctgtaaaagttccagtacgtgatagaggcattaagtctcttcccaccatgcgtcaaatagatcttgataaggcttctttctctttttctttaaatagttgttcactatgcaatcgattcttagagacatcactggtttggatattgctacagaaggaccggattattactttgcatcctaaccgtgccctcaaaaccgaaaatatggacgtagaccatgagaggcctttgtcgaaagatagtaaacaagaagctgagaccccttgcctcaaacaatgcttccatggatgca

SEQ ID NO: 36196 - DNA, 3933 bp, Arabidopsis thaliana landsberg
  unsure (1)..(3933): unsure at all n locations
tgactcgagagccgttcttgccacaagagacgaagacaatgctttgctcgctgtacaattaactatagacttaaaaccggatttgccaggtactttattacaaaccatgatattaaactctgagagaagccagaggcaaaagtttctcaactttcgctttctatgtgtactgtcaggtgaatcagcgagaatccagaaatgtaaaggaagagtctttgcattgcaagacgagcctgaggtagctcgtgtatggttaccaaacagtgattcacctggtttagcaatggctcgagcttttggagacttttgtctcaaagattacggattaatctctgttccagatatcaactatcgccgcctaacggaacgagaccaattcattattcttgctagcgacggggtaaattaaatcttcagttactagccactaaattgcaaacattttccaaatctttagagctgaaaaatgttgtgttttctgaattgtattaaaggtatgggatgtgttgtcgaacaaagaagctgttgatatcgttgcctcagctcctagtagaagcacagcggctcgagctctagtggacacagcggtacgatcatggagaatcaagtacccaacttccaagaacgatgactgtacagtagtctgtctctttctacaagattcatcagtagccatggaagtctcaaccaatgtaaagaaggattcacccaaagaagagtctatagagagtgtcactaacagcacaagcaaggaggaggatgagattgtccccgttaaagacgagaaaatccctgagagttgcgggattgagtcgaaaatgatgacaatgacacttgcggaatgtatctcggttgcacaagatgatgaagagtggtctgctttggaaggattgacgagggttaacagtctcttgagcattccaaggtttttatctggtgagctcagatcaactagttggagaaaatggttgtgacttttttttgacttaagtgattctaagttaatgccgacaaaaacacttcatatcacgatgttccaactttttttcttcttctcttggaagtgatttgcagatatataatctttcttgtttaaattagtctttcagacatgtgagagattggtcatgttagctgtagataaagatcatagtgaattggatcttttcttggatactctctgtctttatatttaattaactcttattactacatgttagacacttggaaattgaaggaagtggcttttacgttttaattatttatttttgtttttggagatggttgggtttttgggaactttttttttatgggttccactatattctctgtctattctcagcataatgatcaaagaaggttgctttgattacaaaacagagcttaacggtaacctaagtttacatcattaattttgtagtggctatttgaaagaaattattttctccttatttggagatgtaacactcaagtgctttaataactaaagtgctttgaaaaaaagacacatgaaccgttaaattgacttcgaagagaaggaaaattgattgaaaccaacttttcttggtgtcactcgtgttcctattggcacaattctcagtacacattttttttgatgagacaattatgaatcttgtctcataaggaagctactttaatctgttttttctttctctaagatttcacttaaatatcaaacttcaagaactcatgtctcttgaggaacaatatggtgggttccaacaccgtaaccgctacatcgcggttgctcttgatctgttttgcttactcattcactgtcttctcaatgatttcatcagtgactgatcctcgtgatggtatgtgatgacttatgttttttccttgcgttgaatacgttcgtggaaatgattgtaatttacttgttttgttgccttttaattagcggcggctctgcgttctttgatggatcaatgggacaatacgccgcctagttggggaggttctgatgatccttgtggaactccttgggaaggtgtatcttgcaataactccagaatcactgctttgtgagtgttccttaatcattcactcgtgtttctgtacacatgtgtgaaaaagaacaaaaaattagagcacttctcttactaattttggtaannnnnnnnnnnnnnnnnnnnnttgtgttcaggggtttgtcaacaatgggtctcaaaggaagacttagtggagatattggagaactagctgaactaagatcattgtcagtctctttagatgaatcatcgatgaatacaagagaaaaacatcttcttttttttctgacctgaattggcgactttgtgttgtttcagggatctttcctttaatcgaggactaacaggttcacttacttctcggttaggagacctgcaaaagctaaatatcctgtaagaatctctcccgcgcaaacaagctaaaagtgatctcgtagttcttgttctttctcttccgtgtgtacatatctaaacagttgtattggtcttttcagtattcttgctggttgtggcttcactggtaccatcccaaatgagcttggctatctcaaagatctatctttcttgtaagaaaatagcattttgcagtgtttgatattgtcctcaaaccaactcatgtttgatgagacttgccactttggttccaccatgttttctcagggccttgaactcgaacaacttcacgggtaaaatcccggcgtctctaggaaatctcactaaggtttattggctggatcttgcggataatcagttgacaggacccattccaatttcatcaggctcaagtcctggtcttgatcttcttttgaaagccaaacacttgtgagtaattttattttctctgcagacatcttcttcagcttcaagtacctttcttctgatgcaaatgttataaaaactgcagtcatttcaacaagaatcagctctctgggaccattccaccaaaacttttcagctctgagatgatactgatccatgtgtaagtcaaatacacttctaataatattacatatttgtcaagcttacggtaactcatcgcaacagatttatttcaatattagattattcgatggaaatcgattcacaggaagcataccttccactttaggactcattcagacactagaggttctgtgagtaacatatcatcactatgtccttagtttcatgtatcttccctatcttcaaaaagatataactcttgtatttgcaacagtcggcttgacagaaacactttgaccggaaaagttccagagaatctcagtaatctcacaaacatcattgaactgtaagtgttgccagagttatgatattactatatagatcatattagacatcacttatgaatgtatacatctttttttctgtctctcaggaacttagctcacaacaagctcgttggatcattaccagatttgtcagacatgaagtccatgaactacgtgtaaatttctcaccaacagagaacgtctttatctacatttatgcgtttgtgttctctgattaaatgtgatgtctgttacagagatctcagcaataactcatttgatccatcagagtctcctctctggttctcaaccttaccttcactgaccacactgtaagtgctgctctgctacagtttacaaatcagaacattcacatatgggagctctctaaatatgttactattttcttgtatttagtgtgatggaatatggatctcttcaaggaccactacctaataagctctttgggttcccacagcttcaacaagtgtaagtttcagcttttagtctccactgaaatttggttacagctttagacatcatctaattgctgaattggatttgcacaggagactgaagaagaacgcattcaatggaacactgagcttgggagacacagtaggtccagagctccaacttgttgatctaca

SEQ ID NO: 36197 - DNA, 3605 bp, Arabidopsis thaliana landsberg
aaaataagcagtgtgtgttacgggtcttctttgctcaatatgtaaagcccatatatttcatttattactcgctttaactaaacccataaacgttcacatataaagcccaaccatttaaaaagttggaatttcacatactcgctcgcagtttcacgccatcagtcaaattttcacgttgactattttttttttttttttttctccctttttcccgttgactaaataaccaaacaaaatactagtacttctctcgattagtagattcattttttatcagataacttaatttatcaaaagtcttttccagtttacatagtttaaaatatatgtttccagttttataattcactaatatattgtccagtaacaatgtacatcatgtgatagtgataactataagtctgtaacatatgcataaatataaattacatactgtcgcgatcatttcatataactttacacttgtagattctcaaacaaaaaaaggtcgcatatataacaataactgattgtcgcgatcatttcatataactctacaccggtagcttctctaaatatgttcaaaaaacacgtaaatataatgcatgataaataagataagaacgtatgtacttaagtcaactttccgaaaaaaatcataattaaatctaccgattttatcttgactgctaaatagtgccctatttgtagtttcaaaattgtggtagaagacttgagtaccttagtagaatatataatgagctgtttttttcttcttgataaataatggccgtagattgtggaggtcaaattaatcaaacattggcatattctcaatgcttcggtttttgggataatattaagtgcaatcaatggctcatatcttagatcgtacggcttaaaggtaataaaagcatctcatgagtcaactaaataaacagtgaaaacaactttattctttccatcttcaaaataaacattcctattcttacgtaaagctatagtagtgttctttagcaccggctcaaacaatcaagaagccttaggacgacttacaaaaaggggtcttttcaaacatgctaaaacaaaaaccatttcatataatcatgtcttaagcttcattacaaaaagggatttttacaaattcaggaattaattttgtgtgacagttagaggagagagattagtaaagcaaaaagtactatttattttcttagttcttttttctccgaaaaagaaaaactaagtataaaaattctatcacacataaaactgtaaaagatttttaccaaaaaaaataatttgagcattttattttcttgggctggtggcggtcacacctttgctttacctatatgagccgtgcttggtgctcttaactgttagctcgctaaatcatgtttgacgtgtaaaaaagtcagataccttagatttaatctttctaacagtaattttttaaaccatttatattaaaaagtaaacgcaactaaaaccgtagtgaaaatgcaagagttgacatagttcttgtatcaattcagagaactacaagaagtagttatcagaacagaactgaaatatagaaatcaactatagcgattctactttgtataccaaaataaaataacaaagaaattttgggcaacgaagcacaatcctattgatatatagttaggttttaagtataagactttaatttgattgtatcaatgagcttcgacgaacaggatccactgtatgaaaactatgtttgtgttccaaatccatatttcaagcgaatctaatcttgataggaaaacaagaaagattggtgttgattagattaggggccaagaagagaagagaaagccgtccaaatgaaaaaaaaaaaaaaaaacattttagagagaatctatctatgaataaaactgaaagtgtgagtaggacccaccttcgatcgcagtcgctgagatccaatcacgttttagcttcccattacagtggacccacccactcaacttgttcatttcctacttcaacgtcccctctgtgactgagtctgagtgtttctttttctgtatgtattgaagatctcaaacagacggaaacaaagaaaaatttgaatatctcaaactcttaatcaatcaactactagtatattaacaacactatccgattaaatttggtttaaactagtatacaatactcctatttatcttaaaatcatatgaatttccacgatgttacgacttacctaccctacatttttttcttggcgtggatcataactttgataaaacaactgagaaagaaaagaacatgcatgctgagacaaaaagagtatataaatattgtctttagtgtactttgaggaggacccaataaaaaaaaacacttggtttgaacttgctttttcagagatctctcactttttcgttttttctgctacacacacttttttttttttgcaacacattttgtttctgctacacacacttctatcactctgtttttattttcctcagagtccgaggtacgtacaaaaaaacagaaccaccatttttttttttttattatttatctaagaagaatcttcaataaaatgcacctataaattaacttatccccgagtaagaagaataaaagaaaaaaaaaataacttatcgaaaaagtcgcatccattatatgtatatatatcgttgtggagttgttgtatactaaacaagaaagagattaggaagagagagacggcgatggcggctacaggatctggacggtctcaattcatttccagttccggcggtaaccgaagcttctccaattctccactcatcgagaactctgattctaatcagattattgtctctgaggtcatttcttcttcttttttcttttgttgttgattttataatctctttttaaatctgttgattgatttggctttgtaaatctgtttttatgttttaacataactcacatgcgtaccagtttctgagtcaagaaatcgttttcagagtcaacatatcagaagactaaacaaaaaacacagagaatcttgattcaaaaaaatgataatgagtttgttttgaatcatcaactttgcagaagaagagctggaaaaacttcttctcatacttaggccctggatttcttgtctcaattgcttacattgatcctggaaactgtaagattctctttgtaaataaataaaagtgtttaacttacgcagacagacacaagctatgcatttttgttgttgttgttgttgttgttgttgtacagttgaaactgatctgcaatcaggagctcaatacaagtatgaggtgcgttacacaatctgcttttttaaccttcaatgtttttcttcttttgttaatttttattgatcgtttcttggtcacattgaacagttactctggatcatattggtggcatcatgtgcagctttagtgattcaatctctggctgcaaatcttggtgttgtcacaggtttaatcctaaatccgaacacactctttcttttacctgaaaaaatgttgttagtctttgtattcatgatgcaatggtaattttcttatagtatctttggattcatcaatcaatggtatttttctgatcgtaggaaagcacttagcagagcattgtagagc

SEQ ID NO: 36198 - DNA, 2576 bp, Arabidopsis thaliana landsberg
tgcgtcattgtcgcatttttgagatcgttgcagcagtcttccgtagttttagtctatcgtggatgaaacattcttccagaatgtcagggatcatcatcacacataaacgatccaattttggatacgtttgtgcgtctgtccaccgcggattcatcacaaccgcgagaaacaccaccactgctccaaccgcaaccgctactttgtttgtgtaagccatgatctcaacttctgcatataggattcttcgggatgtacggtattaatagagagtacagaaacttaaaaatctcccactatgatttaagaaaaatttcctatgatttatattttagaattttagtatcctaattatttctttaatgaatatttagcattaggatgatagggtatcagaaactatgtttaaaacatcctaggatttaataatcatatatcacttatgtcataataatgccataactatgtcatgagaagaatacgtcagtaacaacgtgatgcagcgtaaaaagtttatgaacaagtacaacgtgcggcctgcggagcatttgtgtctaaaacgtgaggccacacctacagaacctgtttataaccgatctatccacacaaatacaaagccggtactagctcaaataaactaatataccaatcgaaccaaaacaaagtagatcggtttaatctgatttcacgttgaccattccaaagaactcatatcattctttatagaatatttccattttcatatgaataaaacaacttgcttagattttaaaacaatttcggtttacctgaataaattgaccggtacagatgtttcctccgtacggctgttttgttgctttgttgaagaggtcgacactcttgttgggtagctgggcttcgaatttgcatttctgttgggcttaaaatatctttgtatgaacccaaccatgattcgtttgttgcttactcaaaagtatccgagaatacgatatggagcaccattttattctgaacttcgatcaatttcacatgttaataactttaaaatgattccgagataagtttataactaactccccatgttgcaaagaaaatcttgacctacttatgttggtatgcaatatttgattcgtgatagatattagacaccaaaccatttataccaaaatcactttttgtgtctaataataaaacaaagaagacataaaaaataaagattatctcaaatatgtaaggtctttgcatcattgcatgatgatatataaaataaataaattgatgaaataaatgttttctcattacaaatctatgtttgaataacatagaaaatgtatgggtaatgtgtataacttataaaactgatattcacacaaactataggaaatttctcatttttctaatttgacatttgctctctttttttcatgaaataaaaaaagctaaaacttaaattttatatatttaaaaatgagagtgaaattagagaatcttaaaagtgctctttcgtcggcagtgatcccatgcggcgattctcatctgaactttttcaaaatccgaaacccgacaaggaatagtgatccgacccggttgatcaaacccatgaacccgctccgcttgctccaacaattctccaaacaatggatgattaaagtaaatcaccggcaccacaactcgccgcgtgtcatcgtctgattcgccgacatgaaccaccaaatgtcctcgaggaacaacccggttcgactttttcggatccttacccaaccggatctgattctgacccggattcttcttgcttccaccgcacaatctcttagctccacggcttaaacaccgtgctaatgaccggattccggtaaccgggttagtgattcgggtcgggcatctgtttcttggtatccatttgaagattttgacaaatctgtgtccaattttgaaacctctgactctcttcatgcttggttttgatcagattccgaccaaaaaaaaaaagtctatttggagaaaacaatgagatgggtttgtttgaaatcgagtttcaagaaatgggtttgattcgaaagaaatagatttggagaaaattttggttttttttgtttggtatctctctctgtgttttatgttatagagttgaagaagaagactgtttgggtatggggaaggacgttacctcttatatagccttcgaggagctatgactcttatgtgtgcgtgtgcgtgtgctttttagatgtgtccactttgatggatagttttccaaatacaactttttttttgtattttttgttatattttcgtatcatttatcatcttttaatttaaaaatttagggaactttttttctattcaaaacatgcaacataaaattcagaatcatgaaaccaaaactaaagatgtttaatatgtaatgatggaatatattagaggagacatatttacaagacttgtgtaatcattagctaatttatttggtcagggatgttaccataaattatcgcaatgaagaagctagctacgatttgatcatattcaatgggaacggactacctcaacacttcatggcttatgtaatcaagtttgcacatatgatagctagataa

SEQ ID NO: 36199 - DNA, 1939 bp, Arabidopsis thaliana landsberg
  unsure (1)..(1939): unsure at all n locations
gtttcttttcattgatcaacaaatcttctaatctctgtcttaaccatttcaaatgagaacaaatctgtagtcaaacattttggggttgtaagatatagaagacacataccttagatttcttctgtagctctgagcacactacttcttttacttccagtctctcttccatcaccatcaccttaaaaatgaaagtagcccataaattcattggatcactcgtgattatgtaaaataaatctaccaacagcctatatgcacagataaactacctcatacctcatctcgaagcgcctcacgcatcttaatcagcgcttccagatcttctttcacctgtaatagaagttgcaagttataaaatgaatttatgcaaacactgcatggctaagaaaatcatctttacctgatgatctccacttgaattagagaagtgatctctgccacgtccaccatcaagaatggtactgtcaatccaacaagaacacacaaagatttagacatgttaacaaaaccaaagcaagccaaaacattcctcaaaacggtaacatgcacaaagccaacaagagcaagaaacttcctcaaatccattacactaaaatcgatgataatttatcaaacttaaccacaacaggtgtggatgatttggtttagcggcgtgactaagactagcatcccagtctttgactcattcaaactagcagaccaattttacaagaacaacgaatgtcacaattcaaagaaacaggaggaacactaaaagtttgaaatccaatgtgaagtctacaactgcattgttttcaacaaaagtttacctatcttctctctttgtttcttggctccttccttcgcgagcactggtcccatttattcccctaccattatccacataagacctatccccacgccaatctccttcatcaccatcgaaaactctttccttataaccatttctatctaccatatcatgatcattcctcctctcaaaatcatgtgaatgctcataagctctttccttctctatgtagcgatgatcttttctcctatcctgagacctatcccgttctcgagacctatcactataccgatccctctcataattaccatcacttctcctatcaggacttctatcccaaccaccgtgtggttgtaaccgccccggacctggattcattcttccacctcttgttgtcacatcattcacacgcactgcacgcccaccaatactctgattacgagctcaataccgtcaacaatataaacacaccacgtacatgataatataaacaaaagaacaaaactttagcagtagaaccatacttttccatccatatcttcgatagcatcatcagccgatcgacggttcgaaaatgtaacaaagccatagcatttccctcttacactccggtcattgacaatctgaattctcaaatagtacacatatatgtcaatatacactctgaccagctcacatgtaagatatatcaactagcaattggatgttatctaaatcacttggtcagtctttctacatagatatctactaaagcttatcatctataagatcatacaataagattggaacttcaaaatcacgaaacgaatttgaatcatcctaattaagaaacttaaatcaggatattgaaaagagaaaattaaccttaacggtgaggacggagccgtaaatggagaagacgcgacggacnnnnnnnnnnnnnnnnnnnnnnnnnaggccgccgacgtagacggagttaccatcgtccatcgtcataactctttatcgactttggtcggaattcaacaaggaaagcaaagtactttagaagtcgtactgtcagaaatcttcgtgttacatatgggccattaggcccactaaaacgaaaccggaaaataccttttttataggacttttttgaattacttttttaggtttttctgtaaaaat

SEQ ID NO: 36200 - DNA, 3576 bp, Arabidopsis thaliana landsberg
tatccgactgagtacaccaaagaacaaacaaaagggcaggaaacaaatttagctcatttgtcaactcagttatctgaagtttttaataacaatctcatgctgtagaatagaaggagacatatataagaattgctaggtaagttaggagaagaacagtatatactggatttatgccaactttcctcacctgttccatgaaacgagatttgggttaacacccttctgggtgaacagcaatgcactcgcagcataacgtagtaacctttgcttaagtccagattcatatattaggctacacaaacaaaaagatccagaccacagaacaaattgtgtcaagagtcattactgctttataaccacgtcaagatagtaattccagacagacctttcccataagccatcaaactcctttgcgggtagaatccattcgttaaagctagcaggttgtccatctgcacacaagtcctcacatggtccttcgtcaatgagctggatgtaaattacaaacaagtcacgtacacctagagaaaacaaggctgactggctattttaacttaataagatttgcatttacctgaaaggtgtgcacaactggcttcacttgccagaacaagagaacatcattatttttcacccattcctctatatacagaagcaaagaagatatcagtaacatcaaacccacaagtatgctagcatgaaacctaaacactgattacaaaaggaaaagtttggtgaaattgataaggtttaatattataatacctgtatcacaaatgcatattctttgcacattatcaactaggaacaagtcgtctgcaggaatcaaaaccagtccatctgcatagctcatgcttctattttccagcatcctagagcaaaatacaaaactatcccattatcaaaaagaaaacaaacacagagttaatttaagcagagctccactataatagatgagaaaatgtgatacaaaccgttctacagctctctggacatcctctagacgagccgtgcttgaaggctttaagcagacctccactagaaaccacagaaaatggaaatcataaagagaagctctataattgaaatccagaatcgaaaggaaggagaattgaagtaccagatacgaggaatttgttctcgtggaggcaaggaggaggattgggtgtagcgactggctcagcgacggctatttgcactggaatagtcgctgcttcaatggggtttttgtaagagacctccatggaagcgtttggaagaggaatcgggtcctccaccataggtttttgctcggcaatctccatgggagtgctcatggtgtgtctctggatttgggaacaacaccaaggccgagaaaaagttgtcaatttcaattttcagattttctcttttctccgggaataggcgggcttttttttttttttttgggtgttttgcagcttttattggtgtttactgattggcaatgcactgaaatttcaggtaaatttgtaagaaagtaacaattaaaattaataatattaacctcaaaaagaaaattaatataatctagctagcaaaataatgtatgagaaaattttaaaaacataaataggagaaatggtgttgaagactaagctcgaaaaaaaaatgatggttatatgtttgagtttattattttctttagattaggcaaatcacttagctattagtatttgtatttgtttagtgaaatttgaaatagttttaagcagactctgtgagtatacggcttggttctacaaagattaagtaaggtcaaactttcagtcaataaaagacttgtgactgagagatcagatgaccacaaatcagtggaatctctccaagatgagaaaatttacgataaattgaaatacattttttagttattgttcaaaagatgataaaattttatttatctagatatatgtaaatattaaagtgtgacaaaacgtaggagaacttagtactgttttgaatatcatatcttttcactttttgtgtatgtattccggtgcatgtgaaaaggttttctataagtaagatttagtttatatgagatgtatatggaggattattgcattttaacattgattttgggaaagtgaaaggatatattttcttcacaacgacaaacacgaacaattatgacgtaaacgcttttttattcgacttaacaaaagacctcatagttaatccaactcactccctttgctctaacttggccttcctcttctccatgacaaagaagacaaacagagaaacaacggagaagacgctgaaaaatgtggatgctatgtctagccccacgtgatgaccacttatggcatgaacactgaagagatttgtcgtccttccctcatccgtgctctgtccgtatgcaacttcgtggccatctccatcgattccataggcacgtacgaagtaggttccagtggggatatcaagtccgattgtccaatcgagtgattggggggtcttgtcgtatgccttggacacaatctcatgagggcaacttctgtccttgaagagcttgttatcagtcttacgccacggtctatcaacttggctgatcggtgcataacaaagcttgacttggattgtcttgaaggcagtatccgtgtcgaccttggctgacgacgactttagcttccatgtaattgtcaccatatcttttccagcctctaaaactaaagatcatccatgtgcaaatttgagtatatagatttataaaaataataataatacaagtatggagatgaatcataaatcatgtatattccaaaaaaagagtctagagatgtataaacgaaaataactattttttccgtattaaaataggtaatatatctttatacttaacctacagttagagcctagtgggcaacttcactacttatgaatacacactttagtcgcggatttgaaaagataatagataaggtacaaaatctttgaattataaagaaggtaagacggttcacaaacctccgctatctttaacgggtttagcggtgacctcaattgagttttggagatcggtgaagagtctatctttctttcctccactactcgactcgatgagtgagaatatgagaagtgatacgaagaggagagtgtggatggccatgatccgaatgagaatgtgatcttggtaagggaggacgactaaatgtgtgtcacacatgtgtctcatatttatagaatgcccatctttaaatacataaacgccactagacgccaatatttgaaccggcgatcatttagtgcgaagaatttaagggaattttcgggcgccattactcggtagtcgacacgaacatagttgacctatcgaataatgttcagtcacgaaaaacaatgcccaagaatgaaaaaaaaaaaaaaaaaaaaactcctcatcataccaattggacttacttagatcccaatccggaaatctaataattgatcattcaggaagacatctaattcaggaaatccggttttgagtttcttttgctgagattgattgttggtccatcaaaaaaaattatgtgctagtttaaatatctctagaacaagtatgcactaagt

SEQ ID NO: 36201 - DNA, 1340 bp, Arabidopsis thaliana landsberg
catgtatatatgctggtccattcagttttatccccttcttgaagaatcttcgtcaggtgtgtttataagttactactaagccttaaaactttcattcatgtcttgcattttcttctcttttgctccctgaggtggtctatggctgattatgcattctggtcattcataatatggtacgaaataatgagatattcaggttctcacattttcctaaatgaacgtgagcttgaagatatctgcaaagcctgtggtctcgttaacttcactcgtgttagaaacgggccatttataatgctatctgcaacaaaacccagctaagctcaccctctttaaagtatatatacttttctgtaaaaaattggtataaagttataaacattataacaacttgagttccatacagtatacctaatttgtaaagctttttgcaaatgttcctattatctagcttgtaaattggggttaacatggtttgcaaaggggtcttcttcttgtgaaatcgcaatgtgtcaattgtaagtttctggagaatgttctcgcatcgcagaatgtataagagcttccatcggagcacgatgtctgtctagaggataggaacggtaaagcaagatgtatatgaagcagctatcggcctttgggtgtcctatagatgtatatagagcttttgccagagatgttgcattctctctatctgtggctatctttgttgacgtcgatgacccttcagggattggtttgtattcataggcatgttgtgccaggattccaactatagtaggtgcatctgatggcaagatagactcttacgtatttgtccagtgcgtagacgcttgatcttgatttctctggaactatctctgcgaagattgggctgcgtttgtttcaccaaggtcagcaaaaacagttaaacgatagagagatataaagtctttaggcatagtaaagagagaaactttacttgttggtagcaggagcattccaagaaacaaatagccccaataggactaagatcagaccatggattgcagctgtagatggatcatctggtaagaccaacaagagaattgcagcgagcggtatcgctgaggctgaactaatctgcgcgagaatgattcttccggaattgggaagacgagtagacagaaaatcttccattttgcctgcaaacaagccaccaagagaagatgcagccacgaaaagacccatcaagaatgcagttttcccgtgtgagaacccaatgaggttcaaccacatatgtgcaaaagaaagagcggaccaaggaaacgatcctgtcactccctgagctacaatgatctgaaaagaccgaatctttatgacag

SEQ ID NO: 36202 - DNA, 3945 bp, Arabidopsis thaliana landsberg
gattgcggttctgatgttgcggaagctacaaatgaatcgtcgcctaaatcgagaaacgttgtgttcgaccagaaggttaaagtggaagaagctgctacgacgacgacgtctattaccaagaggaagaaagagatcgatgaggatttgactgacgagtctaggaacagtaagtacaggagatcgggagaggatgctgacgctagtgctgttaccggtgaagaagatgagaaaaagagagctagactcatgagaaaccgtgaaagtgctcagctttctaggcagaggaagaagcattacgtcgaggagcttgaagaaaaggttaggaatatgcattctacgattacggatttgaacggtaagatatcgtatttcatggctgagaatgctactctaaggcagcaattgggtggcaatggaatgtgcccgcctcatcttccaccacctccgatgggaatgtatccacctatggctccaatgccttatccatggatgccttgtcctccttatatggtgaagcaacaaggatctcaagtgcctttgattcctattcctaggttgaaaccacagaacacccttggaacatccaaggctaagaagtccgagagtaagaagagtgaagctaagaccaagaaggtggctagtattagttttctgggtcttctgttttgtctatttttgtttggtgcattagctccaattgtgaacgttaattatggaggaattagtggtgctttttatgggaactatagatctaattatattactgaccagatttacagtcagcatagggatagagttttggatacatctcgtagtggtgctggtactggggtttctaatagtaatgggatgcattgtgggagagattctgatcgaggagctaggaaaaatatatctgcaacagagagttctgtcactcctggaaatggtagtgagcctctagttgcatcactctttgttccgaggaatgacaagcttgtgaagatagatgggaatttgattatcaattctatattggcgagtgagaaagccgtggcttcgagaaaggcttttgaatcaaaggagaggacagctgacttgatgatctctaaagattatacccctgcactgcctctacctgacgtgggaaggacagaggaattggctaagcatctctatagatctaaggctgaaaaacagaaagctctatcctctggctctgctgatactctgaaagaccaagtcaaaacaaaagcagccaacggtgaaatgcagcaatggttccgtgaaggtgttgcaggtaatcatgggtttttgatcttactttctgttcccttgacttggttatgtaggcaggcattgtaggtatactagtccttatcatatcttgatattagacacaagaacattttaatgaggcttaacttaccttcagcaaatctctggtcatgagtagatgtattgtataatctggattagatactaaacactaataaggaacatgtgaaattgttactcatattgtatatttttcttcatctttctcggcagaagctgtaagcgcagtagtagcgtttatatctttcttgttcactaaataataacaccttttttgtttgttaaatgactatattgtaggtcccatgtttagttcagggatgtgcactgaagtgtttcagtttgatgtatcctcaacctctggagccatcattcctgcagctaccaacgtctctgctgaacacggtaagaacaccacagacacacacaagcaacagaacagaagaatccttcgtggtcttcccattccactcccaggatcagattttaacctcacgaaagagcaccaaagaaacagcagtagcaaagaaatcaagcctgcttcatcaatggttgtatctgtgcttgttgatcccagagaaggaggtgatggagatatagatgggatgattgggggaccaaaatcactgtctcgagtttttgtaatcgagcttctggacagtgcagagtatgtaacatactcctgtgtcagacctcgatcaggagctcttcatcttgtggccgcttgaatacatatgaggattgaaacatatatcagcaggtcttctctcatataggctttgtatgtaaaagaataaatacctgctctctggtatcacgtaatatccttagctaataccgttgtccggtttttgttccagatgtagaatccgaatgctgtaacttttttttttttaccttttataaactcatagccttagaaagttttatcaaacctctcatatacattgcaaaagtcgatgaccaaaaaatgtcattctacaatagaagctgaaatccaagtagacaaaagtgatcagttagttgattccatggtttgagccaagggggcatcggtgatagccatcttcatgtcaagaggatatgaaccactgctttgttctcgaatctctctgtattcttggcaaatggcacacaagtgacagaagaagtgtgttacaaaatccccacatggagcctcctgaatcaaagaatgttaaatcagtcagaagcgccacatacatacctaatggtattatccacatatgtgtcgtttgagaaattctaacctgtaaattgtacttggctcttaatgatttgcggtacccgcaagcataacatgacacaaagcatcccggtagaccgagcaatgcgccattagttgcaaagcagcaaatggtattgaccaaagcccaggagatgcaatgggttaagcagggtcctgcaaatgttccagaccccagaagctctgcgtttttgccaaagatataacaaggacagaacaaacctacacaacctgtgcatacgaaacaaaccacagtaagttgtaatgttcatttcaaaccattgtctaaatgatcttcagcataaacaagaaaacagaatcaagtcctagagaagtaacacaaggaagctcaaaacataagcaatctaagtttcttcctagcctattcaagaaatgcacttggttattcttctaaaccaaaaaaaactctgcaagaactatcaaccagaaccacacttatctttatgaacatatctgaacacactaacacatggcaatttcacaggtcaattcaaagaggcacctttaacaaatttgattcgtgtagtaaaatgaagaaggtttggatgacagagagtagtagcatacagctctgcatatcgtcgaagcaagcgcatataccagatgaccattgtctcggatcatcttttgtgctttcagaaacagcaatttccagatttggagtagtggtctctacttcagtatcagcatctgactgtgttaatggaatataagatggtggcacgtaatgacccttcttctctttcatcctaattctgatgaaaccaccaatatcaagaacaggactttatttacctcagagcctgaaaattgacaccaagaaacacatctgtaccttgaattgcatcaaaatgaacatatatacaattactacaacagcagctaaatcaaaaaggtagtgagatggagaagataagcaaatgaacgaacagagcaagaagcagagacaaaaaaaggatcggaagagagaacaagacgaatcagcgaaaacgagataaaagagtaaactttaaacccaagaagaaataatcagatacatgtgaatagaaacaactctttacctgagctcaacggagagattagtttagcgcattaactcagagattcacgagaaagagcttacttttattttatttattggttccagaagaagagagatggagtttccacgttgagtaaattgaccaggcctcttatcaacatgttatttatatattaatctcaaaacatcaatttacgcattaataaatttttcattattagtaaaatgtttctttccaaccattgtttaaagtttcatatctaacaatttgagaaaataaaagttacaaaaaaaaaaaaat

SEQ ID NO: 36203 - DNA, 2484 bp, Arabidopsis thaliana landsberg
taacacgtgattgtaaagtaattgaatagctcagaaatattcttagtctagtgtctgagtgactctagtccaatgtttgtgtgacactctttatacactataaaatcatggtgttataaatttttgtatattcaagctattttcccatgaatttgcctaaaaaaagagaagtgtcagcttatatgttcaaacgaacaaacaaaagttatagaatatttcataagaatcaacccatcaaaaagcagttaacacagatcatttccatggagtgaaaacccaattgctcctcaccacctccccttaataaccatttacattccatggtagatagaaagaataaagtgaagacaaaaccttgaagccatgataatcagtaagcaagaaccacaaagaagaatcaaggttgaggtgttggaggagcagcagctgttgctgacctcaagagcggttgaagagcttttactacaatgctcatgtttggcctaaactctgcttcgtattgcacacacaacgctgcaaccgctgcaagctgtatttaccatcaaaacacacattttagcttgtaagtagggtccactagagttatttaaatgactaggaagtttctgttcattacctttgccactgctttaggaggatactctcctttgagttttggatcaacacattgcttcactttgtcttcacttagccttggagtagcctgaagttaagacggcaaatgccaagaacaatcagtaaattcgaaagtaagattatcctcagaaaattaaagcaacatggttttagtacttacccaagtaacaagactttgttgaccacgaggcatcgtatgatcgacgggtttcctaccagtcaagagctccaaaagcaccacaccaaaactataaacatcactcttctgtgtcagttgaccagtcatcgcatacctgcaacagcgaaaatgtacagttacaatctttccttcctcaagaatactgtgtgatcaactattatttcagaagcattcattactctggtgcgtggtaaccgaaggttcccaaaactctggtagaatgaagacgagcagccatatcaggagattggttcgatagattaaaatcagcgatcttggctttaaaatcttcaaagagaagcacattgctagatcgaatatctctgtgtattactgcaggttgaactttctcatgcaaatactcaagtcctctagctgcatcaactgctattctgacccgttggatccagtcaagcgtaggacctggttgtgctccttggactcctttcctcccgtgtaagatgtcatgtaaagatcccatagtagcaaactcatacgcaagaatgcggaaattcccttcaacgcaataaccgaagagctcaacaaaattatcgtgcttcagcttggaaaccctcgagacctgagtcaagaactcaacatttgattcaggttccgctgcattgtcaagcttcttcaccgcgacagcctttccatctttcaaggttgcataataggctctgccgtaagatccttcaccaatcaatgactttgatccaaagttatcggtcttttctttcaactcatccaatgacaatgcaggcacatcaatagatggaggctccttaaagcatcaggcttcacagccgcctgtggttatctagtgtgatgcccttcaatacaacaaaacaaaagccgaaacaaaatgaatttgcatacaacaagatctgttactagcgcaagaaatgatcagctcaagggcaggaaatcacaaagaggagtaccaaaatcattgtggtgcttagggcttctgaggtgttcattttcagaagaatggtaaggttcttcaacgtggcaagcacagcacaaccacctacgcatcttttctctcttgcctatatagagatcgtctacggctctcggtttatccagcctaacaaactgagctggtgaacgatcgtttgcctgcaatgtcatcatcatcagcgtcattatcaaactaattactctcacaaagatttgagcagaaacctctttattcatgtcatccatcaataacagggtcaaatatattattaacacagagccaaagtaagggtcctcaaatcaacagaaacaatctaacgaatcctaatcacattaagattcccaaaatgacataacaatctggagctcattaagctaagcaatgattcgagattcaccctaaagttaagacctttacacaaacccaatttggaaaattagagatagattcgaaaaaaaaccaaagctttgaggagatcttctaattcttcttaccaccagaccacggcgatggtaatcagaatccatcggatacatagtgaaagacggatcgaataaatttggcaaaaaaatgagaaggaagatacgaaagcggtcgagctcgtggagaaatttgaggaggaagcccaaagaactcaaaaggactcgaaacccttcgaaagagccaagagattttcaacagagat

SEQ ID NO: 36204 - DNA, 2427 bp, Arabidopsis thaliana landsberg
atgcttctctaaaagatgtagcgtcagcacgcaaggtgttcgacgaaattcctgagagaaacgtaattatcattaatgttatgattagaagctatgtgaataatgggttttacggtgaaggtgttacagtgtttgggacgatgtgtggttgtaatgttagacctgatcattatactttcccgtgtgttctaaaggcgtgttcttgctctgggaatattgtcattgggaggaaaattcatgggtctgctacaaaagttgggctctcttcgactttgtttgttgggaatggtttagtttctatgtatggaaagtgtggatttttatctgaagcaaggcttgtacttgacgagatgtctaggagagatgtggtgtcttggaactcgttggttgttggttatgcgcaaaatcagagatttgatgatgctttggaggtttgtagggaaatggagtctgtgaagataagccatgatgctggtacgatggctagtctgttaccagcagtgagtaacactacaactgaaaacgttatgtatgttaaagatatgttttttaaaatggggaaaaagagtttggtttcatggaatgtgatgatcggtgtgtatatgaaaaatgcgatgcctgttgaagctgtggaattgtattcccgaatggaggctgatgggtttgaacctgatgcagtctcaatcacaagtgtattacctgcttgtggagatacctctgctctgtctcttggtaagaaaatccatggatacattgagaggaagaagctgataccaaatctgttgttagagaatgcactgatcgacatgtatgcaaaatgcggatgtttagagaaagctagagatgtgtttgagaacatgaagtcacgtgatgttgtgtcttggacagctatgatttcagcttatggattcagcggacgaggctgtgacgcagtggcattgttttcgaaaatgcaagattcgggtctcgtccctgattcaattgcgtttgtcacaacgcttgctgcttgtagccatgcggggttactagaagaaggtaggagttgtttcaaactcatgacagatcattacaagatcactcctaggttagagcatttggcttgtatggtggatcttcttggccgagccgggaaagtgaaagaagcttacagatttatacaagatatgtcaatggaaccaaacgagagagtttggggagcattattaggagcttgcagggtgcattctgatacagacatcggtctactagcagctgataaacttttccagttagcacccgagcaatcgggttactacgtattgctttctaacatatacgcaaaggctggaagatgggaagaagtgactaacatcagaaacataatgaagagcaaagggttaaagaagaatcccggagcaagcaatgttgaggtcaacagaataattcatacattcttagtaggcgacaggtcacacccgcaatccgatgagatatacagagagctggatgttctagtaaagaaaatgaaagagttaggttatgttcctgattcagagtcagcgcttcacgatgtggaagaggaagataaagagacgcatttagctgttcacagtgagaaattagccattgtgtttgctctgatgaacactaaggaggaagaagaagacagtaataataccataagaataacgaagaatcttaggatatgtggagactgtcatgttgcagccaagcttatctcacagataacttctcgagagataatcatcagagacactaatagatttcatgtgttccggttcggtgtttgctcttgtggtgactattggtgaaccaaaaattaataaatgttaactttacaaaaacgcagcgttttggtgaaagtgaaagttacactttttagacaatatctagttgggtttcgacgaatgagaatatgacacgtcatcaccggtaaggaaaattcaccaaatagatgatagcctaatctgcaaatctttgtccagcttctgagctcagagatagagagagcgagaggttagagataacagtagttttaccgatgattgagtcggttatggccgttcgtctctccaccggattttgctcgtcgacggcgttactccgtaagctctatttatgtctctgttcttcaattctatcttcattgagtttttgtttttcttaaagagtctttgttcattcgtctgaatcgtctcatgctaaatttgtagagtatcgtacagcaccgagctcggaggagggaggaaactgcttccattatggtcccgccgcgtttttcagcctcaacgtatccaccatattgatgggtaatgaaaaattcactttgttccgtcattaaattgtaaaatagttttgagagttttcgtttcaccaggaggatagattctagtatttgagtgctgagtgtataatacgagtgcaata

SEQ ID NO: 36205 - DNA, 2715 bp, Arabidopsis thaliana landsberg
  unsure (1)..(2715): unsure at all n locations
cgagctgataatatagtaaagatgctgagtttataagagttcgtcttgttcctaaggctgatccttgaacaattttgggtcaggtaatttgtctttgtattgtctattggtcatcttgcttcagttcttgtcatttgattttgtattcatctttttttcttcaaatctacagagtttcggtggcttttgtgcacttacatatctgagttttgcacccgaaggactcaaacaagtgctaataactggaggaattccaccaattggtaaagcatgtacagcagatgatgtatatgaagccggttttgaacaagttgctcgccaaaatgaaaaatactacaagagattccctcaagacattgagattgttcgtgaactcgtaaattacttggctgaatctgaaggtggcggggtgagggattacaacatttgctcaatccactgaccagtttagtttagttccttacttgtctctgtttctttgtctttaggtacctctcccatcaggaggcattcttactcctaagggtcttcaaactcttggtctttctggtttaggatcaagtactggttttgagcgcctgcattatatgtaagagtttagcttaatttttatcaaccacctcacatgttctgtgttaaatctggccttcttaattgatcataggttggagagagtatgggatcctattttagttactggagctccaaagtgtattagtcagttcttcttaaacgctgtaagagacccacaaaaatttgttgttgtcgattatctgttctaagatagtctgtctctaacatgcttaatctgttgtgcagtntgagagttacagtaagttactgatgcattaagtcactaaacatgtcatcatcataaagatttgcattggtttaaacaaaaacaagctctcattgcatattcagggaatacaaaaaacgcaaaaaagaaccctcaaggaagaagaaataaagagtttacttaatttaaagagttttctacaaacaagagatttagagaggttcaaggtattcacacatatggctacacaaaatcagtaatccttttgcttcactaagctgtcctcttccggtttggtcaataggcttgtccaaagccatagtgagcttggaatggttagtaacaaccctgatgggttttgatgctgtgctaagataacattgtactttgccgctttcatatcgtgatgatgcaatcttcttgtgagatgtctcccatgattagcatcacatttgatggtgcaggattgtcaaccgccccaaaataaagatctacgaaaatcttcttatctctcccatctttattgtctgaaaccatatatcatcaatcaacgcatagatcaagatctaacgcttcaaggagacggaagattacgaaacgaacacgataaactaattggagcagaatgatcaaggggtttaggatttattagatcttacgggagaacattccgagctaagaaactgctttttggccgttagatctcaagtatatctgtgctatcctctccactaaacacttcagttgcttgctctaatgacgtaaatcttagttattatggttaactttgtgtgtgtgtgtgtgtgtttctgcagcagtcactgaacatgtcatgcattgctttaaacgctttaaacaaaagaagctctcattgcattctcagggaatacaaaaactcaaaaaaataaaagccacaaggaagaagaaacaagagttttctctattgctgaacaaaacatatgatactacaacatgaatcttagccaaaatcaatgttaagcgatacttaaaacactctgtttttttaggctacccaaatcaaaaaccaaccagatcacttggaataaaagacatcttcttaggctgagacgagatagccttggcaacaaaagcaagcaatcacaataccaaccaatgctccagcaagaacctgcgaaggagtgtgaccaagcagttccttaagctttctttgactgatgggatgtccttcgaacaagtccctaatgatcaagttcagaacctgacatcacaaatacaaaacattgttaatcttatcttacaaagaacaacaaactagacttagactctgtacagaccctctttcaaaactcttaattctctgcaattttatcaaggtcattctacaaccaataacagctatcatcaacatgtgcccaatgtccataatttcgagaaacttgtattacgctctcaacaatgcaaaaccatcatataaaagattcaagaaccaagaacagaaatcaacatctaactctccataattccaaatctagtgatgtacttcaattgtgcacacattgaaaactcaagcacgccaacttttacacataaaagcattcacaaacattcaacaatgtagtgaaagtcgaatccatcaccagattctagtaatacattaaactatacacactcatcaacatggaaatagtaatacattaaactatacacactcatcaacatgaaaatctagtcaacttgtagaatagacaaagcatttaataagaccaaagtcaaactctgtaaaaatctccaaaactcaaaacttgaagcagatttggtttaactttttacctcagcttgcataccggcatggcgtctaacaccaattgcatcatacatgacaatcaagctaaaccctaaacaaacaggaaacaaggaatctgcaactccatgac

SEQ ID NO: 36206 - DNA, 2844 bp, Arabidopsis thaliana landsberg
acgaacctgcctcctacactcctctgttagatggcggcttttgctttatcactttgcccaatgcaacacagggctttttatttctacctattcttctcttaagttgtttgtgtactcattgtagttgaggtttttatacttggtttgtctatggttttaccagttgggtttccagatgcttcttttaggacctttcttttgaaactgtatgcaatatagtgagaattggattgaactatctagatcacccaaccatgctttttagctctttgccactctaggttaggtgaaacttgtttctcactaacaaacaaaggccacatagtattgatattacatcatagtatgctgcttttcttgtctcagtactcctctaaaacttacacagacatagcaagtgggttttcaaccttttgtaggtgattaagcaccattcagctggagacatttacaaaggatcccaatcatctgctgcagaagcctctcgaaagaagtctcctctatccagatccttagaagcacttcattctagtctctgttgatagaacatctaatgattgtggacggtactatactataccttgcttttggttaggttaactttcacacttgacctttttatagacatagaaagaacacttgttgctttggtatatccttggactcagtaaattgcatgtgtttgtcaatctacattactacttgcagcactgctctcagcttttatcatttttgcctggcagtttccaactcacttttgcaggaagatagcttttgtcacgagcaacttcattcaacaattctaaggccattctttgttttcaatttgaagaatccagatccgagatttacatagtggataacaagcaagaacaatgcctttatcatcattcattttactcggaactgtatagaattggggttatttggactacgaatgtacattagcattcttttctgtacatgaaaaataggtgaatcggttgtttagttttaacttcaaagatagttttttcatgcgaaatgtgtggtaaacagtgaagtttttattgcagatttttaaagtagcaacatgatttgcctatggggaaatattctttgtaatatccgtaagagaatagaagaaacagatataaacataatgttatcattttataagatctaatgacaacttgaggagactaacttggtgccagattccagccattttagtctctctatttgactcgagttctccaactcatatgattaaatgaatgatgaatatggcgtggcatggggcctaatgttgaaccaccggcccatgtgaattgcgaagttgcggtactaattaattaattgggcctaatagtagccaaggagtttcgtgcaaattaattctttgacctataaaaattggtataacttacttatccacgtcggtctgactattattaagatgagatttgattagattaataattttgaaaaaggggtcaaagactcaaaaaagtctgcgtggatctccagccgttttcagacacttacccacaaaatattcctctcggcgatgatccctttctgctgaatttttggtcctttgtcgctcgactgttttcttcgtctactatttgttccttttggatattcttcggacttttcgttgatttgattttcaagaggtaagttaataaaccgtgttccccgattctcctattaaagaggtttgtgatgtttttgatttctaggttttttgttgtttgaattttctcgtttgaaatctctaatctctacaaatcttccgtgattgagttttgattagtaaaatgattcgtgatttgattttgatttctctgtttttattatctctggttggtttggtttgatcaagtctctgatgctagggttcgatatcgtttctgcatttcgtaagaagaaacctttggcttaaatctcagtgttttatttggctatgaagcagagagagtttgaacaaggaaggattgaactatggaagatgcatcagagactagctactggtgtcacatgtgctcccgatcggtgattccattgattcaagacgaaatcatcaaatgcaatttctgtcaaagtggttttgttgaagaaatggataataatgatgaccatcaggctgctgattctctctggactcctatcttgatggagatgatgaacaacaatcacgaccaacattctaccaatcaggaagactcagaatctattcttgaagatgaagacgaagacgaagatgatggtgatgatggtgatcagaacaatgatggagaaattgatataactcatcaacttgaagagattaggaggataaggactagacattcaactgctattgttaatctgcttcaggggattcgagctggattattgatcgaatccgagaacaacgaggataatcccgataatagcgagcttgtcgtcttgatcaactcatttaaccaaaggatcagggttcatcaagattctgtagacaccacttctgttccttctggatctttgggtgactatttcattggacctggattcgagacgttgcttcagcgtttggctgagaatgatctgaacaacaggtatgggacacctccagctacaaaagaagcggttgaggcattggcgatggtgaaaatcgaagatagtttgttgcagtgtagtgtgtgtttggatgattttgagattggaatggaggctaaagagatgccgtgtaagcataagtttcatagtgactgcttgttgccatggcttgagcttcatagctcatgccctgtttgcagatatctgcttcctacaggagatgatgatgagccaaagactgatgcagaaacatcgaga

SEQ ID NO: 36207 - DNA, 2951 bp, Arabidopsis thaliana landsberg
  unsure (1)..(2951): unsure at all n locations
aggcgaattgctggataggatattatccaagttagtcagcatctctcactactctttaatctattaccggtggaatcgtaagaaagaacctaccttctcattattgatgctttcctttttttatttttcaggaaaggtaatcggtactccgagaaagatgcagccgttgtcgttaggcagatgctcaaagttgcaggagaatgtcatctacacggtcttgtacatagagatatgaaaccagaggtacattctcttgcttatacctcttaggatgtgctttttgtttctaataataaatcttctgcttttgctcctcctccaatttcttgcagaactttttgttcaaatcagctcaactagattcgcctctaaaggctacggattttggtttatcggattttatcaaaccaggttagtactagctatcaaaatccacccaagcaaagtaagtgttaagagcctattctgttgatttctgtgataaacaactcaatccttcacagggaaaaggttccatgacattgttggtagcgcctattatgtggctcctgaggtattaaagcgcagatcagggcctgaatcagatgtatggagcattggtgtgattacgtatatattactttgtgggaggcggcctttttgggatagaactgaagatggtatatttaaagaggtgtagttgaaaactttctttcactggatttctatctatagcttttcttatttctttctcacttccttactaatatgtactatatgaatataggttttaagaaataaacctgacttcagccgtaaaccttgggcaactataagtgacagcgccaaagattttgtgaaaaagttacttgtaaaagacccacgagcacggctaactgctgcacaagcactatgtatgctttcgagtactaaagttagtgattttttcatgtgcggcggattctttgactaatgctattttgtctcttgcctttgtagcacatgcgtgggttagagaaggcgggaatgctactgatatccctgtcgacatttcagttctgaacaacttaagacaatttgtgagatacagccgtctaaagcaatttgctttaagggtaagttaaatgaggaagttgttggatggataaaaacaaagtgatccggacatgtctctaatgctttgtgtctccttctggcaggcgcttgctagcacacttgacgaggcagagatctctgacctcagagatcaatttgatgcgattgatgtggataaaaatggcgtcattagccttgaagagatgagacaggtaaaagctcatgatattttgctttaagaacattactagttaaatctaggcatgatcagttaatctttatgcatccatttggccttttttctacaggcacttgccaaagatcttccttggaaactgaaagactcacgagttgctgagatccttgaagcggtagttatatttttgttttccattgcaattgcatctctgggggtatcagagggagacgtagtttcataatgagccgttgtgtacttgtatctttgctggtcacagattgatagcaacactgatgggttagtggacttcacagagtttgtagcagcagctctacatgttcatcaactagaagaacatgattcagagaaatggcaggtaaggtcaagagcagcttttgagaaattcgacctagacaaagacgggtacataacgcctgaggaacttcgaatggtaagctgaactaacctcttatcaatattctcgtacggtagagtagatgtttaggtaagtgggtgatgaaacccaatttgtttgtgaatcctcagcacacggggttaagaggatcaatagannnnnnnnnnnnnnnnncagacatagacagagatgggaaaataagcctgcatgagttcaggagacttctaagaacagcgagcataagttcacagagagcaccaagccctgcaggtcacaggaatcttcgatagtatatactagaagaggagtaagtaaaggatacagaatgtaatttgttgggatgtgatatgtcttatcttcttatatgtaatgttggttgtaagataagtggggtttttggcgtttgtagtgataagtaagtaatactttggttgtttaaggcgcagcaaaacaaagagagaaagtggagtgagaatcccattgatgaaatatgagagagctcttaaggtgcactagatgcaagaggccacgtggcattccctgaatgggggacaaatccaattttaatggttgggcaccaaaagaaacatagagagccagctgtaatttcgattctaccatatattttgtctgtttccatttttcttataatattcgttttgagagcaccaaacaaacccttttctatgagtattttccagccaggatctgagtggctccaacgaatttagtaaacaatgattgattaaatgtttattaagggaatatctcaaatcttattggatataaaaaataatgaaatcatcggaggtgacagtggtctataaatgtgtgcattttcgcaggttcggtgaatgtaaatgggtgagtctctgaatttgactagtcacgtttaaagatactaataatattagattatgataacttggtttaaaattagaaaggttgatgaaaagacactaaatccgggatatgtttatcaaaatgcatatggtatgtcttcttctttggctttttctttatttccgaagatgggaaaagtcagtaaacaaggaggggcataatagtagtttattacagtaatcagcggcagtaacacaacagccgcgtttgacattttctgaaggaatcattcgtccgtcgtcgacccatcttcttctctccaatggagtctcctcttcttcttcttctttctctttcttattatttccgatccagtcaatttctcggtttcgtaaacccagttgacaagaaaaataaaaa

SEQ ID NO: 36208 - DNA, 3366 bp, Arabidopsis thaliana landsberg
tgcgataatgggccttaagcttgaaaaaagtgttgtatggaacaaacaaactaacatatcggtacaagcttggctttggttttaaagctgatagataatggtcgaaccataaccggtatggcccaagatgttcatgttttttaaaactcgccaaagctatactaaataacccacatcttgcagaaggttagaatcactaagcatattgcttaactcacctaccctcaaaaatcgaattgctaccaactccaatttctctcctcctctattaaatctttctcaatcatctttctttgagtcttttgccttggaatcctgatcatggcgtcttctctcacttccaaatccattctcggatgcaccaaacccgcttcttcttcttttcttccgtcggagctccgtcgtctctcttctcccgccgttcagatatctctccgttcacaaaccaggaagaacttccgtgagttctctgattcttttcaaaaattttagatttgaagcctatatctagcttaaagaagaaagatgtgtaatttgaatctctagggcagtcgtggggattgaagaagagtgatctgatgctaaatggttctgagattcgtcctgtgaaggttatggcttctgtttccacgtcggagaaagcttcggagattgtgattcaacccattagagaaatctcgggtctcattaagcttcctggctccaagtctctctctaatcggattctgcttctcgctgctctatctgaggtatatatatatcacttcatttcttccttctctgtaatctgaaattagattattaaagatatatactttaccattttgctgtgcttatatagggaactactgtagtcgacaacttgttgaacagtgatgacatcaattacatgcttgatgcgttgaagatattgggacttaatgtggaaactgacagtgaaaacaatcgtgctgtagttgaaggatgtgccggggtatttccagcttccatagattccaagagtgatatcgaactttacctcggcaatgcaggaacagcaatgcgtccacttaccgccgcagttactgctgcaggtggcaacgcaaggtatattgaaggagtaaatgctgaatagttttgatttcttaagaatcgatcttgttttgatgcttttcaatcggtttatttcagttatgtccttgatggggtgcctcggatgagagagagacctataggggatttggttgttggtcttaagcagcttggtgctgatgttgaatgtactcttggcactaactgccctcctgttcgtgtcaacgctaatggtggccttcctggtggaaaggtgagatcttgcaaatggcatgtgaatttataactttataaacacttgcagcaatttgtgttcatcatagccttacttgacaagatttcattttttttgtttgttgtcaatgtattgttcctgaaaacgaattgtttttttttagtagggattagttttgtctcttgattacccttttccttgtatggtttctttattgacgcatcgaacattttttgcatttgcaggtgaagctttctggatctattagtagtcagtacttgaccgctctgctcatggcagctcccttagctcttggagacgtcgaaattgaaattgtcgataaattgatttctgttccgtatgttgaaatgacattgaagttgatggaacgttttggggtaagtgctgagcatagtgaaagctgggatcgtttctttgttaagggtgggcaaaaatacaagtaagagttattattctctaccttttctgaaatcacataccttagattgacaaaataatgactaatatgggacatgattcaggtcgccgggtaatgcttacgtagaaggtgatgcttctagtgctagttatttcctggctggtgctgccattaccggtgaaactgtcactgttgaaggttgtggaacgaccagtttgcaggtaatatttgtacactgaatcatcaaagaggctgttaagtttatagtgaaattcgtttaggtcaaagtttcatctttttaaggctttgacaagttgtatgtaacatattcgcaagaatctaagttcaatttttgggatgaatctctagggagatgtgaaatttgccgaggttcttgagaaaatgggatgtaaagtgtcctggacagagaacagtgtgactgtgacagggccgtctagagatgcttttggaatgagacacttgcgggctattgatgtcaacatgaacaaaatgcctgatgtagcaatgactcttgccgtcgttgctctctttgccgatggtccaaccaccattagagatggtaagtaaaaagctctctcttataatataaggtttctcaagattcatggtcacttaattctatttggtcaatatagtggctagctggagagtaaaggagacggaaaggatgattgccatttgcacagagcttagaaaagtaaaattcttcttctctctctctctttctgtttacagtgctcattctaagaaattttgcggtatttgtgtccagctgggagctacagtggaagaaggttcagattattgtgtgattactccgccgaaaaaggtgaaaccggcagagattgatacatatgatgatcatagaatggcaatggcattctctcttgcagcttgtgctgatgttccaatcaccatcaatgaccccggttgcaccaggaaaaccttccccgactacttccaagtccttgaaagaatcacaaagcattaaacaaaaaaactctaaaatctccactgttttttcttctgatccaagcttatctgtttccatttttcttgtctctgtaacattattagaaagcaagagtagtgtttgtttgtgtgtacctgaactgagtgagatttgagatgcaatcattgaatcggctttggtatatcattttactctgtttttcagggtgtttgttcaggttctctctagttatcatccactccaaacaggtcccatgatgtctaacgttttggttctaagaatgaacagaacaaacaatacactgcgataaccggtgcttggaagttgtgttaattgaagaaacaatggcaatagctgcatacttatagttgcaggagtgaaaaatgagataagaggaatgcaaatatgcaattgcaggttctatttttttttgctgccaatgttattaccaaaagggctacaagtgagtattctccaagcttggatgaggttattcagggtaatagggtatcaagttagtaataagagtcagagataccatgaaaggattccaagttgtagtaagaacaactcaaattcaaagtgaagttttgtgagttgtgtaattgtgttggaggtttgcacaaa

SEQ ID NO: 36209 - DNA, 768 bp, Arabidopsis thaliana landsberg
atcttgaagaattttcttcaaaattaggtaatatttatttttaaaatgaaaattagatacctttaaatgtgtcacattatcgaagaaaatagtatatgtatatagtatcaaaaatactaagatatataatttttgtaatcagatattttgggagaaatttgtttttatagggcatcataaaagtaaaacattgttgttggattcttttccaaaagctttccaaaatgagttattggaaaatatcacaaaatatttaaagagccgtttcatattttatatatataagattttgcataaaactttagtcaatatatgtaaaataaaaagatgttgataatatgataatgaaaacggtgcaaaaagatccaaatgataacatcaaaactaatttatatgataactagataaggccgcctaaataagcggatgcaaaaataaatatatttttttgtaatattttactactaccaagcctcagctaaatcgtgagaagcttgtggtagagcaacgcactgtgaatcttcctctgtctaacgacacagccctacaattgaccaagtttcagcctaatcatgagaagcttgtggttgagcaacgtcttgtgagtcctgctgtgaccaacgacccaactctgaaatcgacatggacccatcggttaagggttgcagcgggctggaccactttgtttgtccttgagctaaatctgtcattggagggtttgatctcatctctggctcgatcagctttacgcggttatgcagggtacac

SEQ ID NO: 36210 - DNA, 7283 bp, Arabidopsis thaliana landsberg
ccgcttatatttggttgaggtttccaccgcattgtctctctccagacgaaaaatgggtgctttcagggtaagctctttgattccttgttgatttcaatgacactatttgctgctgattcaagtttcggactcgaagaaagaatctgatctaagctttgtctggtttcatttgcagtttcaccagtaccaggttgtgggaagagctctcccgacagagaaggatgtgcagcctaagatttacaggatgaagctctgggctacgaacgaggttcgtgccaagtccaagttctggttagtaatcatattctttctctctctcttttccatttttgttgctgctgagaatgatatgagcttgatctttaattagagtgtgttatttggattaggtatttcttgaggaagctcaagaaggtgaagaagagtaatggacagatgctcgccatcaacgaggtacttgttcatttgtgaaatgacgcaatctcgtttgacttcttatatcttattgagttaggcacttagattcatttatctggaaagtgaatgtatttgcttgactagaacactagggttttgattgatcacgtttgcgtctttgtttaacctataaatgcagagtcttttgtttgcctgactattatacaatacttttatgtaactttcaaatagcctgatcatgcaaatctctcatggctttgaatctatttgtatcatacttctaattttgctgattctgataatgtctttgtctgttagtctaggttaatacttttcatttgctgtctgtcatcaaatgagaaaacttagattcgccaaagtctctgacttgattctctcgccttgctattgaatcgcaattgacaccatatcacgtttttatcatgagtttatactgtttgagtgcaccttggcccctctcttgactaatgtaatctatgaccagattgtgtgcgcagatctatgagaagaacccaacagcgatcaagaagttcggtacttggttgaggtaccagagtagaagtgggtaccacagcatgtacaaggagtaccgtgacaccactcttaacggagctgttgagcagatgtacactgagatggcatcccgtcaccgtgtcagattcccttgcattcagatcatcaagacagccactgtcccagccaagctgtgcaagagagagagcactaaacagttccacaacagcaagatcaagttcccattggtgttccgcaaggttagaccaccaagcaggaagctgaagacgacttacaaggccaacaagcccaacttgttcatgtaaaacgtctctgattgactcttttttggggtggaatcgatgttgaagctgtgctctctcccgttttggattttatcggttatttttgtttttcaatatgttaggcgtactcatgaatgtgaactcgactttgtctggattttatgcttcttgtttcctacttatgaaaaaacctttcccttaattcctatattttgtgctctttattgtgttaacaaccatcgcttctttaaagtgaaagattttaagtcttggactgtgataccaacttggtgtcagttaaaatacgtttcctctactgtaattttgccttcaaacacttaacatatgacaggggtattacagtcattttatgctcccgacagagaaagcatctcctttcacttaggatagaaaaatatagaaagattcttacattaaaaactgtgcttaatgatcccagaatcccagtagtagctctactcaaagtcaacacagctaccggaagaagattcgagtctctcggaaatggcatcacacgaccaccatcatcatcatcacgatcatgagcatgaccacgagttcgtgttatcattgattttctctgtaaagttctgatcttgatacgatttattcccctcactaatctgtttctctacttcttctgtcaagtaggaaatcagacggcggagaagggaaggcgtcgtgggtggggaaggacgggaaggtgtaccataaccacgatggactcgcacctcactcacacgaacccatctactctcctggctacttcagtcgccgagctcctccgcttcacgaccgtaacttctctgagagagcttttaccgtcggtattggcggtcccgttggcactgggtaatcatttcatgatcaaatttactgcttgattttgtaatttggtaccgtaacaaattttaatctctgggttaaggattaagcatgaatctatgataatgttcttgtctgggttctttggaatgctattttaagatttgggtttcataaaagtgtcaaattttttagtctaatcaccattggattgttgtttttgttgactcaggaaaacggcattgatgcttgctctttgtagattcttgagggacaaatatagtcttgctgctgtgagtattattatcagtggcaaacacaagattgttttctcgatctcactcatgtgactaaataagattttgatattgtaaacgttgtaggtgacaaatgatatattcacgaaagaggatggtgagtttctggtgaagaatggggctcttcctgaggaaaggattagagctgttgaaacaggtggatgtccacacgctgctatccgtgaagatatcagtatcaatttgggtcctcttgaggagttatctaacttattcaaggctgatttgcttctttgtgaatccggtggaggtgaggtttcatttctagctagttcttgatagttaatctgcacgatatatagatttctgtttctcaaggaaccaatgagatatgaataggcttagtgttgtgtgttgcagataatttagctgctaatttcagtagagaactagctgactatatcatctacatcatcgatgtatcggctggtgataaaataccccgtaaaggcggccctggaatcactcaagctgatcttctggtgcgcttatgctgccttaactcttcacttactccttttgatcaagtctatagtagtgtgaaagaatctcttgtggatttttccaactgcaggtgataaacaagactgaccttgcagcagctgttggggctgacttatcggtcatggaaagggattcactacgcatgcgtgatggagggccatttgtctttgctcaggttcgccatcttcagaaatatgtttcatcacttatataaccaatgaccttagtacttacaaaagagtcttctttgattactaaacattggcaggtgaagcatgggcttggagtcgaggaaatcgtgaaccatgtcatgcactcatgggaacatgcgaccgggaagaagcgccagtgatgatggggttcttaagacccaaaatggataagatatgaaactgaatggaactctttcaatacttatcttgaactcaatttatgcgcaaaagtctatgtaatctgtttgttgtactcaagacataagagaaataaaaggtttgagcatgagactcattacattctagtttattgtcctttaacagaggcaaatagatctttgtaggaacgttttggagcttcggcacgagcaactatctccacaaccttgaaagatgattcctcttgaagtaaagcttccactgcaacttctgcgaccaggtctctcgatatactcccttcatatagagtatcctacaaaaatcaaaggtcagatctttatcagtttccagcacaaaacagatgaaacaaatatcaaaggctgtgttttacctctggctccatgacaacatttccagttggaggatcgtttttaagaccaccaggccttactatagtatagttgatgccagattttttgatatacttctcggcttgaagcttagcgacaagagttagtccaaagaggttgaggaagaggtaagcagggttcagtatctgtcccatggcagctccattcaccaagatggagcttacaagaacaaacttttccactccttgtttacggcaagcatccacaagattcactgtcccgaaattatcgactttccaaggagtgaatatatcaaatccgggacgaaacccagtagcacaaatcacagcttgagaatcatcacctataacttcagctagcttatcaggaccttctgtcacgtctgctctaacctatagaagaaatcacagagcagttgtgagaaaatgagagcgagaaaacattggattaagaccaagaacatactatctgaagagacgggtcgtctttgaaagatgtttttgctttctctacatcacgaacaccagctttgacggcaaagccacgggacaacaactgctccacaatcctcttcccggtttgtccagttgctcctgcgacaaacaccttctttgtcttcactgcattctctgcttcacctttttccatctgagatacaaacaagcaaagtcaatttcagaattggggaaatctaaacacacaattcaatacaagattctagaatcaatggttttattacagataaatcttactttgatggaagtaaaggagcgaaaagatttgttcttggtgaagaaggaagactgagagaagaagacagctgaggaatgtctgagaagcaaagatgttgccatcgatgtgtaacctctctgccacaaacgttaacttttgttaaattgtaaatttttgatctttgccttttttgttgattagattacgccacgtggcaaaggtctccgacaatctgtttcagtacgcaattacggaaaaaccccaaagaggcagcgaacgaaagttcgattccgagaaagtgagagaaaatgacgaagagagctcccaagtcagggcctttgtctccgtcgtgcagcggaggctctagtcggtaagttttgtgtctggctttgataggttacagaacaagtttggctttttacacctggttttgctttgatttctctgtttagggtttaagggttctgcttagtctctctggttattactgattaagtggttagatagggaattggatatgaaagttgtgaactttatgctatccaatggcaaatgggtgagaagaagagcaaggaaagaggatgttagttagatttttgttaattgtgttgtaaaatcttggcaggaacttagagttggctgtgaagtcaagtgaaggtgcaaggaggtctacaagactgagacttcagtctttgagaaagccaaagacaagccccaagaagaaacccgttaaactccaaacgaagatgcccaagaaacctgccactgctttcttctttttcctgtaggtactctctctcatatgattccaaattgttatctaaatatttaagctcagctggacttccttaagtcttctcttaagtagaaatttgtgtgcattttgccattggtctttaggatgcgattatttatgttgttatgtgttctggttactttagaaaacatacgaagaaacacttgttgtattcattttcctcttgcctcatattgtcttatctttttggctccaaagggatgatttccggaagcaatatcaagaggagaatccagatgtcaagtccatgcgcgaggttgtagaatattactttgttggttttgtatgtcaaagtaaaacatggtggctattatgttcactttgattcttttgctaaagttgttttgttcttcattctgtacagattgggaagacatgtggagagaaatggaaaacaatgacttacgaggtaacatttgggtttcgcttttctgtcccagttagtctattgtctctatcttctaaaagtctcctctataatgttattcaaatcatagtcaaatgtatgatatctgacattgggatgactcacaaaagcaatgaaataggtttcatgttagcatatatagtggttggatagatatgttctaaaatgagtcaggtgttgccagtcttgttctttttggcgaacaatatctcattttattcttcttacctagatatctttggttgagaccttgacggaagtttcttactcctagattgtttgttcctcaactgttttgtaggaaaaggtaaagtattatgatatagctactgagaagagggaagaatttcaccgagcaatgacagaatataccaagagaatggtaccatcgttttcttcatttttccttgtttttgcttaatatttattcacatcagtgggttcttcatttttccttgtttttgcttaatatttattcacatcagtgtcccactgatgcggtgataaaacattagtctgagcttttcattttactattttgcaggaatcaggtgcccacgatgaatcagagaccgactcagactattctgaatagattactttttagtttctaccacattagaaacattgttctaagccttctaggatgggtttgtatatcggtgatatttaagagtttctgtttcgtttttgagatcattctttcactgatactcatgtttctgtggattgcatttggagatcaatgaatactaaccagtttcttgagtggttgccaaagggttttactgtttcttattattgtctcgattctgtttgaaacaaaaattccagactgcagaatgacgaaaaagctgatcaagtttagcaagtacacttgagattaatacagacaaatttccaggtacattttcatttgatgtcaaatagaaagtcacaccccatagatgacagaaaattctacaccagcaataactttcatgtgttggtaagttctgtaggctgatacaaaaaatagaatgtaactctaacaagtcggtctagctattttctggagagaagcatgaggcaagacgaagcctgcaagtgattgacttgaccttcaatcctaccatggactgtctgaagcctatctttgtattcattgagttcatcgagggtaagcgtctcaatggactccttgaatctctcatccccagcagattcaagcttctcctgactcttctcgcctcgttccttctcagcttcaacctcttggttgagcaaatcgagacgttcactcagcctcttcagtttaggcctgtaattaccacttttttcttcatcgccactgtctgaatcatcatattctctcatgaatcgctctgcaacagaatcaagattcggtttcccgtaggagaaaggcttgcctcctggtgaaaagacaacgatgcccaactcagcgttgcagagcgtggctaactcgctcgccttcttgaacaaaccagtcctccgttttgaaaaggtaacctgtcgtgtgttcatgtcctgaaccatctccatcttgatctttctccgacccatttgtttgctaaaacggtac

SEQ ID NO: 36211 - DNA, 853 bp, Arabidopsis thaliana landsberg
aatcactaaaatatacatccaaaggctctgctcttggatgagagcgtctacagaagaaatatcaaaggaagagacgtggatcccggtttctattcttgaaaggaatagatctccatatgccatctcttacttgcctcttgcattccgttcagttattgtctctggcatggaacaagtcaatctgtaagtttcaaccgtattttggtaacatatagaaaatatttacattgtgaggtttactacactgtggaagtgaaaaaccccagttttttctatttgttgtatttggagttccagacgtctatgtttccagtacatacatcaaggtctagtcttttctgtatacattagaaaaaacaaaatgccaatagtcagtaattgtgattctagcttgtcataccgtgattaccaattctatgctgatacatgtaaaatcaaatgactgtaccatgtttgtatgataggaaaggggtcttatatgcttctcattgctattcaggaaactgcatatacaaatgtgtactttttttcataccaccgtgtttactttgttaacctgttgatttccgtgtatacctttttcaggatgattctgtctgtcaaaagtgaagctgccaaatcagaagatatgtttgcccaaattgaagaaatcataatatccgttagactggcatttttgaactgctttctggattttgctggtacgaattttaaccaagcatccttgataatatcctcatgcaaacacaggaatgcaggcaaatgcacactttaaagtggttacgttgatatgctaatttgctttcaccatatgccagcgcacttggagcaaattggtgctgatctttcccaa

SEQ ID NO: 36212 - DNA, 7797 bp, Arabidopsis thaliana landsberg
  unsure (1)..(7797): unsure at all n locations
tggtgataatgggatggagaaagtaaatggatttactaatcttgttaaggaaacggaatttgtaaatggagagttagatctaggcactagaaccgaaaatgtaggtggagagagtaaccaaagtgacaagaaggttctagtagatagcgaagaggtcatgatggtagagaaaagggggcttcttgttgagaaggaagtggaacctgacatggtctgttctcatggcgctgatctcagtgatgtgaaggtttctgatggcagactggatagtgaagaccttgttcaggatagaaaacccgatggcttagcaaaagcaaggaacaaaagttgaggacttggatgttgtatgttttatgggtttagaaccgcatgagagcaaggatgagagtattttggatgatgaaattgcccatgtagctgcgaaggtgaagatctctgactcagatttggtttgggctaaagtaaggagccatccgtggtggcctggacaggtgtttgatgcctcggctgcaacagacaaggcgaagaagcatttcaagaaaggaagtttcttagtaacttattttggagattgcacctttgcttggaatgaggcgtcacggattaagccttttcgacagcatttctcccaaatggcaaagcagagtagtctacctgattttattgatgctattgattttgcgttagaagaggtatcaagaaggatagagtttggtttagcttgttcttgtatctcagaggaagtctatcagaagatcaagactcagaatgtaatcaatcctggaatccgagaagattcaagctcaatacacggtggagacaaggtctcaagtgcagtcttctttgaacctgcaaaccttgtgggatatgtgaagcgtttagcatgctctcctagctatgatgctactgatgcgctgcagcttgtaagtcagagagcacagttattagcttttaatcgctggaaaggctatactgacctccccgagtttatgacactccaggggtcagtagagtctgcacccaagatttctcctgcagaagagcaaagtagcttagtggaagtttctgatcctgaaccaacaaagagtaaacaagtttatactaaaagaagaaagacaaacctgcaaacagagcaaagtagcttagttgaagtttctgatcctgataaaggtgactgtaaacacgatggagtgtttgaatatgaagaaactattgttccaaagaaaaaggagaaaactttggcagagttcattgctgagaaacgcttaagcagacataatgggaacacatcacatgaaaagtctggtaatgttccgcattgcgaaaagaaacgcaaggttgtgcagtcaaaagttcccaagtccacgaaaaagattaaggcaaacctgcaaacagaggatccaggatctccagtttctcccaaaaatgatcgaaaaaataatttgtctgctggtgataagattacaccacagaaagctagaaaaagtttcggaattggggcaagcatattgaaagtggcaaaccagatgcattgttcaacaccaaccagactcttaccttgcagtgattcgacctccaaaaaggcagccaagagcaatggcagtggaaagagtcttcaggagaaacctaaagccgaagcattatcagcaagagaaatttctccttcaactacactttcaagccctcacgctgcttctgttaccaaaaccacaagtgggaaatccaattctgtcagcctagaccacaacctatccggagaacttgatcaggtcagaaaggaagctcctagtactaaccttgtggaggacccgatgttggagtctagagacttgaaagactcttctaaggagcaggtcgtacatgaggataagaaagaagctgcaaatgtagcggatgagaaatctattatggacagcaatctaaccggggagaaaatcagtggcttggacttgagagagcagccgagtaacaagaactgctctggtggatctgatagttgcaaggaagatgtttctgcagagtaggaaggctcagcatcagcgtctaacccactaatacagatctttctaaaatcgagtccggttcttgttagtacccaagagtggaatataccttttagatggattctcttctctttcaaagtttagaattgtatgatttaatcagagttgaacaaacactagtgagagaatgtaacaaagttatttttgtttttccagatttgtgcaatttaatggtcaataattcatttgaatccaaaactaattatgaatttgaataaataaattagaatccaaacaaaattaacctcaactcggaggaaaatagaataagagatgtcactgaataagtacatagacatgccttcaaatatcaaaaaaaattcataaaatgtagtagagctcaagacctaggcttctccttcttttccttgaaaagggccaagagtgagacaccagagaccttcaccactttgaacctaactccgggaatatctccgacggcatgacctttacgcccaaatccagcaatcaacacctcgtcctacacacagtatcaatgaatgagtaattggtaagaatataatttgattactcattcaaaagtagatgtcaatctaacttacattttcttcaatgtagttcaaacaaccatcattggggacaaaggcagcaatctttttaccattcttgatcaactgaactctagcacacttacggatagcagagttaggctgcttagcctcaataccactgcataatcaaacacagagtctcatcaaagtcaagatctatactactaacaaaatcaagaaatggtaaatatatatgtttatacaaacttacattttctcaagaacgattcctttagcgtgagaagaacaagcaaaaggcttcttccactcgttgcctcgattagacttcttgtaatgcttgtccgcccacctctgagtaatccgaagctgcttaagcttgcgaccagctcccataccacgtgtcttactgaagatattcaaatagaagataaaagaaattgagaaccaaaggacatttcatcagatgaaatcaactcactcagaacatataaaacaaattcggagttgataaagaacataaagttataatctaaatcacaaatacttaacacaagaggagagtgtagtaaggaaaaaaatcaaaaatcataatcataatttccacatttcagaccaaataactccaacgtttataagaaaaaactacgaattatagcaacttcgtagcttcaacagggtgattaacaaagtattactacacgacgtatgaatgtcattcaaatcccttaattcaaccatcccgacccgagataacgaaaacggcaaggcaccaaagagaaaccggaataaacaaaaaaaacataaaacaaatcctaaacccgacataacaaaaacacgatcacttataagcggagagatgagactgaaacataaagagtctaagagaggataccgtaccccatgttgacgacggcgcgagtgaaaaagtcgagagatgagctgaaactgctaaaggcgcgacgttttaagttcgtgagagattgaaaaaccctagtgataagaaaataggtatatataggcttgggtcaagactcgtgagagccctggtttaggcattaaccggtctgcaatgaaattgattaaacggcaaatgattatttttatatttgggcttaacaagaaggcccatcacatgtcaacccaaatattatgccaactccttaaggtaatataccgggaaaaaaatgtcgttttatacgtgaacttttaaaaatggccatttaatacgtgaattttttgtaaggccaaataaaacatgataaaaacgttgactggccatttcacacaaatgttatcgttgaccaggccaaaatccccatgccgttatctttcattaacggatccgttaattccgttaacacatgttaattagtttccgtcaatactcaaaacgacgtcgttttattgaaatcaaaaaatcaaaattcctaaaattgatttcaaaatctctaaattccaaaaaaacaaatccttaattcctaaattccaaaaatcaaatccctaaattctaaaaatcaaatccctaacagcctcttattttcagcaattggtcgtcgtaatagtcatcgtcgtaaagatcctcaagagagctaaagaagggccttcgctttgatgtttcctccttgttcatcatcgatcttgttcctcccccttcgtgaattcaaacgaacaactgctgtcaatagtcgaatgttattattcatattcaaattggttctcatgtgtgtgtgttcgtaacattttattcacaagacaacaaaacaaaaacagggaaacttccaacatgatgaaataagattatgagagtgagaaaagaaccttggacaacgggattgagattcctaaagaagaacatgatgttgccatgtgaagcagatggattgaagaaaaatgaattggattccattttggaatttagggattttgaaatcaatttgggaattttgattttttgatttcaatgaaatgacgtcgttttgagtattacaggaaactaattaacgtgtggtaacggaattaacgtatccgttagaaaaagataacggtatggggattttggcctagtcaacaataacatttgtgtgaaacgaccggtcaacatttttattatgttttatttagccacacaaaaaattcacgtattaaatggtcacttttttaaagtttacgtataaaacgacatttttcccgtaataccatatacgctgcattgaaacattccagtcctagtcacgtgcacggtgcacctactagcccacgactcccacactatccgccacgtcagaaaacgaaaccggttgtagcaggtaaaaggcacacaaagctaagcataaggaagcgcgcgacacgcaccggttcagccggtactctgcgtcgataaacgacatgcaagaccgtccattttcttaaaaaagcgatcttgatctgacggtccttatttgtttattcaaccggtaaaatacaaaaaaatcaaggaaaaggatcgtggatcgtcaatggcggactggagtaaatttctttgacaataaccagtcctaaatcaaggtagaatattgcaaaaatgttcaatggaagaagatagattggtgaccatgattatcaacgacgtctaagctgtttctgcgtcatttggtaagtgaagcttttgtctctttcgatttctctaatgcaaaaaaaaagggagaaagattttgattcgttattgaaattattctctttgagttattttaattagaaagaagtaatttttatatatatttgtcaagaaaaaaagtgagcttgaagttcacgcttgtaaaggtgtcagttttgcagctcattatcgccatgttcttctctctcgcgctctttgtgttatcttctctttgctcataagaacccactttaatgtatgttcaggtcttcttcttcttcgtcttgttgctctgcagagttggtcctgacttgggatttagggatttcgttttgataatggaggagatgcgaagaggagtgcctacgtggcaagacgagttagctagtctcatggacggaggtttacaatacgacggatctccgattgatttgacggcggatactgaatcgaggtcaaagagttcgggtttcgagtcgggttctggatccgaatcagtggagagtttgaaagatcaagtgacggggtttatgaagtcttggggagaaatgcttatggatctcgcaatcggatgcaaagacgttgtgcagcagatggtggtgaccgacgactctttcgttgtaaggaagctccggaaaccagctgctaaggtttcgaagaagcttagcttccttaacgagtacttgcctgaggatcgtgatcctgttcatgcttggcctgtgattttcttcgtcttcctcctagctctcacaggtatattatcaaacagttttctggttttggatcaccattatgtatctgcaatgccacactcttataatgaacagttattcaaaatgtctgctagaaaactgtgtattgggatgaaccttatagaattttttgaggttgttgtatgtagttaacttgattctgcttagatattggtttaagtggcagtcttgaatagattctcgttggtgcaagagaggcttgtatccttactctgacatatccaacttttaagtgcagcattgagttttagttcagaccatgatagatctgtccctgtgttgaagaaaatccgtctgcatcctactagtgcaagccgtgtacagcttccagatggtagatatttagcttaccaggagcttggtgtttcagctgacagagctagacactctctaattgttcctcattcttttctttcctctcggcttgcaggtatgatcaaataagctccttgtttcagcttcagcttacttttaatgatgcaattacatctgatttgcttctactgtttcaacattatcttatcaaggtatacctggagtaaaagaatcattgctcaaggactatggtgttcgtctagtgtcatatgatcttccagggtttggagagagtgatccccatcgtgctcggaaccttagctcatctgcctcggatatgattgacctagctgctgctctagggattgttgacaagttctggttactcggctattccagtggtagtgtgcatgcctgggctgcaatgagatattttccggaccaaatagctggtaccttcaattttttggataaaatttgaaaattcacaattcatggccaactcatgtttttcacagaatgacacaaaataatatgggaaggtattgatttttataaatctacaggagttgccatggtagcgcctatgataaatccatatgagccaagcatgacaaaggaagagatggcaaaaacgtgggagcagtggcaacgaaagaggaaattcatgtacttcttagcacgtcggtggccaagtcttcttcctttctcctaccgtaggtcctttctctctggtaatctcgannnnnnnnnnnnnnnnnnnnnnnnnncattaggagaaaaggtaagtctgtattcatcaagtgtttcttcccaaggttttgagtctttgtgagttatggctcacaagctaaacctgtatacaccacttttctatttcaggacaaacttgtaaccgcagatccagtttttgaagatctttaccaaaggaatgtggaggagtctgtacgccaaggaactgcaaaaccatttgtggaagaagccgcattacaggtatcaaattggggctttagtcttcccgagttccacatgcagaagaagtgtagaaccaatggcgtcctctcttggctaatgtcaatgtacagtgaatccgaatgtgaactaattggttttcggaaacctatacacatatggcaggtttgttgaaatcacacttaaaaccgccatctacaagatcacctttgtcaagttgtgagttactcattttgcttgtggtcacatagggtatggacgaccgagtcactccaccttcagtgacagattacattagtcgagtcataccagaagcaacggtacatagactcccaaacgaaggccacttctcttacttctatctctgtgatgagtgccacacgcagatcttttcggccatatttggagaaccaaagggcccggtagagttattggaacaaagaacggaaacccataaaccggatcaaccaaagacagactttatctgacagtagctcaccacccaagag

SEQ ID NO: 36213 - DNA, 10656 bp, Arabidopsis thaliana landsberg
atacccgttaccgggtcggattctttttgatccggacggagcagactcgattggggaacaattcattcttctgggtgtgttgtgtttgagtttttggatcatacgaagaagaaatcggcgggagaagctatgtcgaggctatgggcgagatttgcgggattgttcagtagcaagagttttatcggagtagacaagactggtaacaagtacttttccagaatggaggagattgacggattcggcgagtattgttcttccaacctcttatttccttaaaaaatctttttttttgtttgatttatgttggaatttggttattgcgtgaaatttatgtatctcttaaatttgtcaagttgctgaatttctttggttttctccgtacgatttgatgaatcagctgtctttgcatatcgcgagttgcagtgaagcaaatggatttagaaaaattaatatcgtattgttttaaagaacattgtctgcttcttttcatacatgaaaagattcagctaagtgtgatcatgtaaaatgaaactaacagaggttatttagatgatcaaaacgaatattaagactcttgtagaatccatttgtagagtaatatattctgatgtgcttctttctactatccagtgaaggagaaaagatgggtcaagtttagacgagaggaggacccaacctctattcctggtaactcttctttaaaacataaaatgggttgttatatacgaccatatattcatttacttgagtgatgtcagatctgaaataagcacatctataagatatatggcatgtatacacgaatctagttacatttttgtttgatcaatgttgtagttgaatggatttgttggctgaatgggcagcgaaaaagggctcctactcctgaggtaagataaactcctttttaaccagaattatttgtggtcagcatagtgttcttaccatggaagtttttcattgcatacagactggctatgcttggcctttgatattggtgtttgttattggttcaggaaatgattgaacttgaagcaaggcgtgagcgtgtaaagcttaatgttgctcgtaggtgtttcagcttataaatacattttctaaacttatatccttttaaacgtcttaaaattattatttccttgtgtcattgatccttactgcaaacagtttatgactttgaggacttgattttatgaacttcgaagttgtgaatgaacaaagtcaagaattatttctgtttctgtgttagcaagtcaagaaatccgtatgcaaattttccatttaatatgtcgctcaagttcaaggcaaaacatttatcgtttttcttttgcctttatttaaaagtcaagttctcaagaaggaagaggaggagaagaaagccagagtaggcaccggacgcaaaatcaccattggtaattaacattagagcccagaaaatttgtttcatttatgaattggtagcttaatgttcggtctccttgtgtaaaggtaaagttgatggtccagatttgacaagctttgttcgccaatttccaccagattcaaaaggtattacattttctctgccaatagattaattgagtcaccatagatgctgatgactaacttcttaggaatcccttgtgtaaatttgatagagattatgatggatatgcgtttatatttttgtggtgtttgacccatgaaatggtgtccattggctgatgattataatagttttgtgaaagaaacatcttttgaatgttccccatataaccattatgattgcggtagcttaaaagggcaacaaaattgttctcatgcaccataatatatcgtataagtcatttgatgattcaagggctgaggttactacagttgctagatttcttataaccttaaaagagattatggttcgaccataaagtcgtgaaagtaagactgacagttaagtttatttcctttttttgttaatgctttaaggtggtgaaccagaggaagctagtgaagaagcagataaatcaaggtgagtcatcatgattcataatatctccgcactaatcatatatgtgttaaatcttcttacattctattttttcctggatgcaaagcacaacatctttcagaagactaacataaccacatgttctcacattgctttacagggccaaggaacatgaacccgagatagtttctgcagaaccacccgaaccaaagtaagtctagccaacttgacattgttaatcctaaagttcagattctagctcacggatacgaaacatgactcgttctttctgatagttacagactgctactatgctgaaactgttctctatgaacataagttatgtattgtgtttggtatgctttaaattaaactaatgttaatgttgatgttgatgatgatgcaggacaacagagccatcaggatctggatcatcatttaggcccgggacatggcagccaccatcctaaacacatctctcttcacgcagatgacaaaccaacatactattcaattattttgtttgttgtactctacacaaccgattggtttgagccttacagatgagccataagaccagagagcttttcaagaccctaaaattgtgtcctttcacgctgtcattgaggacttagaagagtcaaaatgagaagccatcttcttatactttgttttgtttagggtgtttgtctcttggcataatgcttgagacttttagcctgccttgtccttcatagctgaagaggagcctagctaccttttgtttctcttcgttgacttgaataaaacagtttgattgaataacagttattcattttcatgtcatgatggtagtggatataagaaaaaacaaatacatagaataattattttaatgtttcagaggagaaatcctacttggcttgtgccagactcataacccaatcaaaacttcgtattaccaaaataagtgtagttctaaattttattctggtttaggctgtagttataaattactcattttagtttgtgaatataaaattactttctgcaaaagaaaatattctcatctttcgacgaaaagccaattattcgaatgttctcacgttggtctgtagctgtaaactttatagtttatataataaggtgttctactgttcttatataatttgcaagaacaaataatattaaatgcaaataaaaaatagtcaacggtccaaagtggatcataagccgtccgttcggtcgtctgaacttcatccaacggttaaaagaaatatacctgacgtggccttgggccattgtatattagtagtgagtgtgcccttggaaggttctgtaaaatgttttattcgcctctatcagaagcttgacgaaatctcttctccgtctctctctctctttccctcgtccattccacgatcttcttccaatctcaaatctcccattttctagtgtttcattttgatccttcttccttcctctggagatttctcaaatctcttcaactattttgatttgccgccatgtatcgacgcgccacttccggcgtgcgttctgcctccgcaaggctttcttcttccctctccaggatcgcctctagcgagacagcttcggtttcggctccatctgcgtcgtcgcttcgcaatcagacgaaccgatctaagagtttctcctcggctctccgctcctttcgagtttgctctgcttccacgcggtggagccatggtgggagctggggatcgcctgctagccttcgcgctcaagctaggaattccactccggttatggagaaatttgaacggaaatacgcaaccatgggtatgtctgtttgctttctctgacgttctaagaatgattgctcttaacttgtgtgacaagaatctgtgtttaccgcatatctgcttagatcgatttttcgctttaaaatgatgatctactgattctgatatgttctgattcaaagtaaaactagctagatgaacatttgatttgctcttgcattttggtttatgatttgtagatttagtctactaaatttcttttttgtatattctaaaaggacaagcaaattcatgtgttatgtgtcaattgaattatgattttaatgtttgatgtgaaaaacgcagcttctgagcattcctacaaggatattttgacaagtcttcctaaacctggtggtggagagtatggaaagtactactcgttaccagctttaaacgatccaagaattggtatgtttcctcgtgcctctatctgttttgtatgtaatggatttctggtgaagttaatacctttttgtgataatgcagataagctgccattttctgtaaggatactattggaatcagcgattcgtaactgtgacaactatcaagtcacaaaggatgacgttgagaaaatccttgactgggagaatacatctactaagcaggttgaaattgccttcaagccagcccgtgttatcttacaggtttgtagcatattttttctgtacttctacactgaaaacccctccaggcctctaagactggtacagattaagtcagcatatgctaacttgtatttttttgcccaggacttcactggagtaccagttctagttgatcttgcttctatgagggatgcagtgaagaatcttggtagtgatcctagcaagatcaaccccttggttagtgaagtttcttattgctttacggctgtaatatgtttaatccagcacttctcatatttacctgtatatatctaggttcctgttgatcttgtcgttgatcactcgatccaagttgactttgcaaggtcagaagatgccgcacagaaaaatttggagcttgaattcaaaaggaacaaagaaagatttacgttccttaagtggggttcaacagccttccaaaacatgctggtcgttcctcctgggtctgggattgtccatcaggtacaagataacatgtgatgacagtaaattctggttgccttgttgaaaattttgaacaggttttctgaaacataagtgtgattagagtattagcctgtttaatctgtttggtagactactagatttcaaggggtgcatgaatttcataatgctgtcgaatggttctgttatgatagcttgttattatttaatactgcaggtcaacttggaataccttggacgtgttgttttcaactcgaaaggatttctctaccctgatagcgttgttggaaccgactcccacacaaccatgattgatggattaggagtcgctgggtggggtgttggaggaattgaggcagaggcagcaatgcttggtcaggtgagctcatttcgtctgtacaccttcactttttatttgtaagtgtcaaatttgctttgccactcatcttagtcatatggtacttcaaaaacttatcagcccatgagcatggtgttacctggcgtggtcgggtttaagttggatggaaagttgaaggaaggggttactgctactgatttagttctcactgtgacccaaatattgaggaagcatggtgttgtcggcaagtttgttgaattttatggtgagaaccatggctgcgtaactttttatttctgatggactattatttggtcagtatccatgttttaacttatttctttcaatacgaaggtgaggggatgagtgaactttcactggctgatagagccacaattgcaaatatgtctcccgagtatggagcaactatgggtttcttcccagtggatcatgttacactggagtacctgaagttgacaggaagaagcgatgaaactgtgaatcctctctctctctctctctcactttctctacttttttattctttcttttttggtaaagtaaatcatcatgcctaaaatgtgctttaagtttcaagttctggtacttgtggtttacatgtgctgaggctgactattgctgcataatctgtttcaagacattttaaggagctatctgtagacttaggttgttatggtctacagtttgcattatcacgtggcctattttttctgtatcgtatcctgtttcctctggtttctgtgactcacatgatcgccaacttggtttatttaggtgtcaatgatagaatcatatttgcgcgcaaacaatatgtttgttgactacaacgaggtatggacattcttaatcagtttactgtattttatttattttgacaagattctcaactccaaatatctgtacattattgcagcctcagcaagaaagagcatacacatcttatctgcagttagatttgggacatgttgaaccatgtatttctggtcctaaaaggtatattcacttcgttttgatatttagaactttctgatccatcgccgtacctccctaaggtttcactaattactttattttctgttcaacaggcctcatgaccgagtgcctctgaaagatatgaaggctgactggcatgcatgccttgacaatcctgttggattcaaggtgagatgcaagttgtatttacaacaaaaatcattaaacaaccaatgacgttgatttgtttttttttttttggataagttgtaagactttgctttttgtttcaagggttttgcagtgccaaaagaaaaacaagaagaagttgtgaagttctcatacaacggacaacctgctgagatcaagcatggtagtgttgttattgcggcaattactagttgtacaaacacgtcaaaccctagtgtcatgatcggagcagcactcgttgcaaaaaaagcttcagatcttggcctgaaggtgagtttccaccttttctcttttccctgagatcactgggttctgaatcctgtttttactgtaagtgacgtttcaattcaggtaaaaccatgggttaagacaagtcttgctccagggtctagagttgtcgagaaatatttggatcgaaggtctgttggagtcaacgctgtttccatctggatatcttatctgatcacggaacatacatactgaacgtttactttctctgcagtgggctccgagagtccttgaccaagcaaggattcgaaattgtcggctacggctgcacaacatgcattgggaattctggcaaccttgacccagaagttgcatctgctatagaaggaactggtaacaacatcttcatcaatacgaacatactctaaaattgtcagaacatgttttttttttgttctcttagcatctccttctgccattttcattttcttttcatctggaatcctcgtcaattgtgtttctccaccaataaattagtgcccctatatcgtcaaactgaagctcactttttggttggtccattgtgcttcctccgtgtcacagatatcatcccagctgctgtgctgtctggaaaccgaaactttgaaggtcgtgttcatccacaaacaagagcaaactatcttgcgtcaccaccattagttgttgcttatgcccttgctggaacggtttgtactttccaactttggatatccttaattggtgtggcatcatagttcatcaccaacaagattgagtagttattcgctaagtagtctcatcaatcttgaatttgtttctatatattgatctctacgattacaggtggacattgattttgagaaagagcctataggaaccagaagtgatggaaaaagtgtgtacctgagggatgtatggccaagcaatgaggaagttgctcaggtacattggtgacatgcttagaggataagctattcacttttaaatgttccttgctaacattcctgatactcttccataggttgttcaatatagcgtgctaccaagcatgttcaagagctcgtacgaaacaataacagagggaaaccccttgtggaatgaactctctgcaccgagttccacgttatattcttgggatccaaactccacgtacattcatgaacctccgtatttcaagaatatgaccgcaaatccacctggtcctcgtgaagtgaaggatgcttactgcttgttgaactttggggacagtgtaacaacagaccacatctctccagcaggaaacattcaaaaaactagtcctgctgcaaagtttctaatggaccgtggtgtgatttcggaagatttcaactcatatggaagtcgaaggggaaacgacgaggttatggctcgtggtacatttgccaatatccgtattgttaacaagctcttgaaaggagaagttggccccaacactgttcacattccgactggagagaagcttagcgttttcgatgcagcaagtgtaagttgaatcgtcagacagcttcaacacatatatatagatccttctttaagtccctaactcatttcacatatgctttcagaaatacaagaccgctgaacaggatacgatcatcctggctggtgctgagtatggaagtggtagctctcgggattgggctgcaaagggtcccttgcttttggtaagctttacattgtttacaacagttgtcagattgtggctatgtcttgtgatcgtaacagttaagcacaaattagggagtgaaagctgtaattgccaagagctttgagagaatccatcgcagcaacctggctggtatggggatcattcctctgtgtttcaaggctggggaggacgcggaaacccttggactcactggtcatgaacgctacacagtccaccttcctacaaaagttagtgacattagacccggtcaagacgtcactgtaaccactgacagtggcaaatcctttgtctgcaccctgcgttttgatacagaggtaaactggttatatagcaaacaaattcagtaaaatcaaaacttcatttgatctgagacttgtttttgtggggacgtgcacaggtggaattggcatactatgatcacggcggtattctaccatacgtcatccggagtttgagcgccaagtgatctcaaagtgtttttcgccttttgttttcttcttatgttaagatcccaataaagcaagttttgtgagcatcttttttctttcaggttacactaaacctttgttggcaagagttgctataagaaaatgcaaaaatacacacttcattttataaacagtttaacgtatctttgaccgtagcatcaattgaaagacctggaaacaagattaaactgttacaaacacttttctctaaccagccactctattcacttttgctccccagaaactgctgtaaactgattgaacttgaccacagtagagaaaagaggcatgcattcttagaaatccactcatcttcctcctatattttctttgtcatacattttatgaagagaatccatattgttaactcttgtgcaaagatctggtagcctttgatgcaaaaaccattgctttggcttcgtcgcttgacatcatccaatccctctcagcacgacgttgacgttgccttgcattctttgcacgtttaggggccattcttgcatctctctctgcaaatgctagtctgaacttctctgctattgacagttcattgcttaacgggaaagatgtgggcttctgcacaactccagtaacaacccacgtcttaggatcaatatctttgacaaatggttcgtccagtgcaacatctggtagtgcttctcgaggaacctcgtctgctctgtacgcgacaagtgatggcttgggatttaccactattcttggacactccgaggataacatctccagtgaatccttatcaattcgtggctgcagaaaaagcaaattaaatgagtacactgagtggcaagagacacagatggagaaagtagattcttttgtttactggtagcttattagtcagtctgtcagagggacgatacatacccaaacaagccaacgcaatgattgaccaccatggccaatctctgaagtgtctatttcttcccatgtttctccttcaacattactcaagtttggcttaaaaatactcaaagatctgcgtgccgtggactcactgcttgggcatcccctgcaatattaaattttctctcattgcctgttttataaagtttggtagccctaggcaaacccacacactgggttcaattctatcttactttacccaaatgatcacttactaagtcataaacaaaaagacaagccaccccaacaacaacacactaaaagccagttcactgcagttagctagagaagtaaaatatacccgcatctaagagtctccaatgatctgcagtgttgtacaagctctaagacgcccatggatgagattttgttgcaccggctgcataacaaaataaggcaaattatatgatacttgagagctaacgagcaccacccatccagcatacagaagccccaaactaaagatccagcaagaccagagctacaagtaaataaactatcccaggttgcaaaactcaaacgatacccaacacaatcagacatatgtgtggctagcttatcttgttcccatctcaaaggaaacagcttatacagaaaacatagagaaagcatactaaattcttagcaagcaactataatacctaatgtccacagctcggagagatttgcagatttctgccactttagctaagccaaaattcgtaacatctgaaccgctaacatctagaatttcccaggaactgtcagccaaacagataatcacatcatcatccagcagcttttttcttctagcatttgctgccatcgacatctgttgcacatgagtctgcctttgattagccatggattttgcactaaacagcttgaaag

SEQ ID NO: 36214 - DNA, 4618 bp, Arabidopsis thaliana landsberg
taaaggcccatcttgtgtgttttgtcgaatctaacaacaaactcacaccttttgaccaaaaaacaaagtctccggatgttgatgaacattggttattcactttttccacgtcacacttaaaaacaaaacaaacaaaaaaactaatgacgacgctccagttttgaattttgaaaaaagaaaaaaagaaccgttgaaaaaatatgagtgctcaaagagggaatatacctttttaataatctccttcctatttaaaccaattctcgcatctaatttcatttcctctctctttccccaaattgaaaacaaaatctgagattcgcgaaggaagaagaagagttgtcttgagagattgatagagatggacaacaatggagttaaacccgctgtttccgccatggatgctttcgagaagcttgagaaagttggtgaagggacatacgggaaagtttacagagccagagagaaagctaccgggaaaatcgtcgctctaaagaagacgcgtctccatgaggacgaagaaggcgttccttccaccactctccgcgagatctccattttgcgaatgctcgctcgtgatcctcacgtcgtcaggttagggttttacctctgattcgataaaattgcccccatattctcgatcttgtagtcgcgttagggtttatatagtcgatttctcactatctcgcttgttttccagattagatagatctcaatttcaaatcgtagtaatcagttcgaagagtctactaattgttagatgatttggctctgagaaactgttgatagatgtttccctagagtttgatctggatcgctgtatcagttagttttccagtgattgcaaaatcaattatatacggaaactttatttgtcatctttttcaggttaatggatgttaagcaaggactaagcaaagaaggcaaaactgtactgtacctggtttttgaatacatggacactgatgtcaagaaattcatcagaagtttccgtagcactggcaagaacattccaacccaaactatcaaggtttttaaccaccttattactgtcatctctctttctcgcttcatttgtgctcacttgaaccaaacataacattctgaaaagttatttgcagagcttgatgtatcaactatgcaaaggtatggcattctgccatggtcacgggatattgcacaggtgaattgttctctggctttcccttgttttcaacttctaagtgagaatgattttagataataacttggaagagagatttcttcttcttactatttctccttgtttcaaaacagagatctcaagcctcacaatctcttgatggatcccaagacaatgaggctcaaaatagcagatcttggtttagccagagccttcactctgccaatgaagaagtatacccatgaggtaatcaatgtttgacactgcttcttgcacttatcccactttgtatgtattgtagaacttatggttttgaatcggttgttcattgcaacagatattaactctttggtatagagctccagaggttcttcttggtgccacccattactctacagctgtggatatgtggtctgttggctgcatatttggtatgtgttcttttcagactcgttgatttcactagtcactgcgatatcatcttaagttactaaacaacaacaattaacattgctccttcaccatttacagctgaacttgtgaccaaccaagcaatctttcagggagactctgagctccaacagctcctccatattttcaagtaagtctttgttgattcttcaccttttacatgacaaacataagaaaaccttttttcattttgccgctctttccggtgtacaactcaggttgtttgggacacccaatgaagaaatgtggccaggagtgagcacactcaagaactggcatgaatacccacagtggaaaccatcgactctatcctctgctgttccaaacctcgacgaggctggagttgatcttctatctgtaagtctaaagtttattaactagctaccaaaacaaactcaacagacgaactaattgcgtttttatcttcctggaacagaaaatgctgcagtacgagccagcgaaacgaatctcagcaaagatggctatggagcatccttactttgatgatctgccagaaaagtcctctctctaaggatttaaaatcttcagttagtatctttccaagttttatggtttttctagttttgcttctttcaagcatatctctagtgtgctgcttccccctctatgaatcatcctttctttagcataatatatcacttctgattgttgtttctttctattcgaatatttggattaacggctttaatgttcttaagactattcgcaattataatgatccagtcatctggaagtctaagaataagttcttgaataaatggatacatataacaagatcgagtgtggggatttatgtcacaagccacatgaagaatgttggccaaacagtgagtgaaactgcagccaaagagtaagtccaaagcataatcacagagcattcactctccccagcgccgaataattgggtctttgtacctgaaaagtaagggaaactagtgatgtatcttatctgaaagaagtaactgtattttaaggagttggtttcaagccatgcacctagattcatggctggtgggacagcatactgaagaagaagaacgaattggtacaagggttctgaggttactaaatccaacttgtatgctcctctcacgagtaaaacaccgcttacaggtagcaaaatgtaacgagctaccaagacgccgataatgcaggagtttttcatttctgaactcctcacttccgacctcctcattcctttaagtaagtttcctccaagaatcagggtcatagcaggaatggccccatctctttagccaaaagaaacaagacacagaaaaagtgagtttttcaaagagatgaatcatttgttgagctacttctaagataatgagactattctacaattaccccaatagggttaatgagtcttgaatcacacggaaaggagctacggtgccgattattaggttccttaaaggagtaataagcccaatcacaagcgcgataatctgagaaaacagaagaagaagagataagaaagatatacactagtgtgaatgtcttgaatgtatataaaaaaggtgccactgaaacacaaactgcagcaatagttgctggagcaaatattgacccaaggttgactttctttgacagagaaacaactctttgcttgacttcttcccacctcccaacctgtcaaacacacacaaagtcactgccaaaatgaataacactgatgatgatgatgaagagttgttgattaatgagacctgatggttgtcttcttctttttcttcttccttggaagaaattagttggactttgcagctgtcatcatagttggattcaatagagtgtgtgtgtgtttcaacgggagagtttgatagcacacgcataagatttatatataagtccatgagtaaaccgttcccgcctgatacataccaattagtgtcatgtttatacacactgataaaaaaagccttgaagagagacaagagaggaagaactaacagtcatggacagtgtaacataacccattccgtatttctcgcaactctcagaatctccaaagggacctcctttctccttgcaaatggctgggattataatgagaggcatagtccccaaattccctgtttttggtttcattcatcatcacattcataagcaaaacatacgatacaaagaaagacaaaaagattctaaaatcatgtcaaggtttgtaccagaagcacaacaactaatgatgagaccacgaagctgtgaaggaggcttagttatgacaataacaatccagccgagtaacgaaccaatcatgaatgtgagcagaacattaaccggcataaaccacctgcaatgcaaatcctcattttcattataacaagtgagcttaaagatgatgcaaaatttgatattgacttacattttgaccaagctttcatatgtaacactatcagctaagcggcttccaataagcgaaggactaaacacatagaagacaatctatacacaaacaaaagagaaatttaagttaactcttttagattatttgttaaagaagagagttaaaaaacggacgttgttcaaatgtttgcgagcatcatgaccaagaagattgactgtgtcgagagccaaataaaatccaactgatgttatcaacaaagtctccacaactggtttcgatgaagctatgaacaactccaaaagcttcatctctacttccaaaagttagaatctgcaaacttaatccatatattacatgatttgagataaagaaacaatgaaccaaacgacgataacttatggagaaatcaaatgaaatggtatagttacctttttagaggaagagtgaacgagagatatagagtaagtattatttttgttccgtatgaaaaaaccaacgtatcataaccaccaactctttatctgagaaaaaaagaatacaaattataagggaaccatcgtcatgcctttagtcacagcgactaggaaacgtgccatgttactttgtggttcttgctg

SEQ ID NO: 36215 - DNA, 4140 bp, Arabidopsis thaliana landsberg
gtttccttttcaacgttgtataggtttactcgtactacaacggagagtcctaaaaagaagacaggcttcctgtcatttgggcttggctggcgcgacaggaacaaggtgaagtacttaccgccatcgagcttataatgttatgaactaagcttcattactaatgtaatgttttaaagtaacaggcaaaacaaacagaggaatcaaatgttgataatactagtaatgcagcatctgaagccaaatctccatcaaaagaaagcgttaatctatcaaaagaaaacaaatccgaagatcttttagatccggagacaagacgctagctgataaagagtcataactgcaaaacatttaggtaattttcaaaccttgatagagtcaaatgcaaaacatacactttccatgagttctctgcaactacctagaggtgtttatagagtcttaaaaatctttttcagattcttgaaaatgttcttaggatcttgaagctgcttaagatcttcttgcattgtctctctgtcattaatgaagagctgggagacttaaatacaggttaagaggctaatgctttgtcagaactatttttatgatgaagtcattctaagctgttttcctcaaggcttccatcttcagtagcttgatacctgaaatctctaaaaacgaagcaaaggtttactcaattctcttgaccaattattattagagtagttaaaaactgtgcacattttacaattaactcaatagaattcatattggaaacattttgatagtagcttttggttatacaagtttttgacaatgtataaggaaaagattgtgttggtgtgtgaatttgattgatcatcgtttttgaaagttgagtttggcaacaaagaaagcatacatagtagccaatgcaattggaaatgcaatgagaataatggctgtaatcatcaaacgatcatgatggaatccgaaatagtcctctaagaaactggcaaccgtcttggtttctccaaatgcattgatcttttgatgaatatcgccatattgagacgagaaaaaaaggttgagcgtccatgaggttggggttatatagtaaaaccagacccaccactttgggatttgctgcatttttggacatcaagaaaacattataaagtatgtaataagttaaagatgatgatgatgacttgttcaaaagatcttacgggttttgggatcaagaatccggcgaaaatgttgaatgtcgtgaagaaaagagactggagaatagctgcgaccatgaagtttggagtgatggagatgaggaacattgcgaggtagttgaagcagagtaagttgcagaacattgcatagagactccaaaacactttagagaaagacgcgtagaaaccaatcataggatatattacgatcacaaactctgcactttggatgaatatgtaaggtatctcagtcacaacttgagccaatgcataggcaaacgcagagtacattcctgcaaatctttcgcggtacataacattacgctctgtctcaaaatactgtaaagctgaagtgcagttgtttatccccacgaagagaacaagaccataaatcgccccgagaactgtgaacaaattctgttgcgtatctctgcgaaaagaagtggattactaagaaagtacaatgaaactcgaaatgatttggatggactttaaggtaacttacatctttttcccttgattccagaagagtagaccaaagatgaaagaagagatgaaagtgtgaccgatacgcatcaagttgtaagaagggcttctccagtaagacaaactcatcttccatagacaagatttaaactgttcccaccaattctgcgcaaaagttcttttgaaatgcaaatcgcttgacccgtgatccggtttgctcagctctttaacaagctcggagttgttcctgaagaaacaacaacacatgagctcattagtcacgttcataaagctaacacaaacctagccataaatgagttatactctactcacttgtaaagatccgattcgttgtagatttttgcgaaatccatgtcgagttcagtctctacagactctgaagtcacctctagcatccatgttgctggattgtacttgtctctgatcttagcaactccaggaatattctgttattcaccaccaacaaaataaataggttacttataaaacaatcaaaccctaattactttttattacttgtgcagaaagctaacctgaaaatactcaatgacacaagatgaatgttgtccaagtggtccgctataaatcatgcgaccacctctcttcagaagaaccaactgaaacagaaaacattatgatatgactagtatatatttataaatgtttcgttatagaaattgtaaaatttcgaaattcgaacctcgtcgaaggcctcaaagatgtggatgctaggctgatgaatagtgcagacaatggttcgtccagtctcagcaacattcttcacagctctcattacaatggcggctgctcttgcgtccaacccagtcgttggctcgtccatgaatataatcgacggattcgccaccaactccaccgctactgttaaccgcttcctctgctccgtcgataatccgctcactcccgccactcccaccaacgcatctttgatctcctcaagctcgatggtctccagaacttgcttcacaaatctctgcacgaattttcacaagtgatttctttatttcgatttctaggtcacagttttgatgctctgtagaattagggcttacgattttggtttgaggattgatttctggaactagacggagccaagcggagtaaattagggattcttcgactgtgatgcttggtgagtgtatatccgtttgttcacagtagcctgagactcttgcgaatgtttcttggactttaaggaaaccactaattctgatctcgccttctatgtatccgcttgtttttcttccggctagaacgtcgagtaaagtggtttttccggctccactgattcccatcaacgctgttagaacaccaggcctaaaagctccggtgatctctgagagaagctgcaacttcttctcattgtacccttgacctttcatctcctgagaatgagattacacactttgatggttaatgcagttaaaatggttttttgttaaccaagaacgaacagaagcttttaccacaggaacatcgacgtaatagttcaagtcttgaaatgttatggtcagtggcttaaaaggtaagatcattttccctgttgatccgcaaagacattattaggttgagggaaatggagaagaaagaatttgtgtgaatagaaagaaagacaatatatttcacctggatcctcgtttgtctttattgaggaatctagtggcttgttcttcttgactgatgaatcttttgttccttgcagctcagagagcttatcttgagaaatcattggacgagatgacgtgggagctgtcaagtattaaagaagctcttcagttttgagcctcctgtacagcaccaacaccgggggagattttaacttacatttcaagaaactcagagctagagtgaaaatggtgttgaagataatagtaagacccaacaaggcagatagtgagacccagtacatgtaatcatcatagtttagtcctctgctttcaagtatggtgcgtcccaaggtgacatttgtgggttgcatctacaaacataacccaaaaacctattaagtcagttttggagaatgaagagatattggatgattaagagaaacaagcaagggaagagagagtcactttctgccaccgtggagcaagaaactcgtttacagagagtccaatctcagcataacttatagggtttacccaaaacccccacttcaaccaccccggcatatcggctgcaccaaaccgctgtcatattttagtggagcttttggaacagaactcaaaagagaagagcaaaaagaaatcttactatatgggatggcaaaaccggcaaatacaaaggtgattaacatgacaaagctaccagctgtcattgcagcaactcctgtttgaaagattgcagctatacaccgaaacatggatatcgatgtgaagtgaacagcaaagagaatcatgaattgccggaagaacctgaaaggtcatagatc

SEQ ID NO: 36216 - DNA, 2354 bp, Arabidopsis thaliana landsberg
ataggccctgcaaaagaaatgagctcaagcacattgcaccactatcatcagctttacagacagcccaatttgcctgcaattggatcaaaaaaaaaaaagagaatccagatatgaggttcatggcttagttcagaaatggttacagaggcgtcagggaagaataactcgagtagtaggtataaaccttgtatctccgatatcgtgcttcattatttcccaaaaactgcttgataaacatatccgttaagaaaccagcaagaccatcaaggagccaatctgttataacaacatggacaatcatgaatcacaaaattacatgttttcacatgaagctgatataacaaatcgtacgcaaatcaaagtgtagaaaaatgtcacaagcccaccatcatttggtgattcaggagtaatataaactccaaaccactgttttgctaacgcagaagcaagtttaatgcgtgtatctattgtctgcaaagataattgaagctctatcagatttttgcataaaggaactaataagatgacgaaacaccaccaaagaaagaaaacttcctataaacatagtgaaaacttctacaccaaaatccatatgccaatgaaggggtgaaatgcaagaaattgatgaacgcagcttgcaatattcataagtggtaatgcagaaatatatttaacatgctcagacacgtgcttggttgtacttttttcaaaaatgcatcatacaaattaggtctggtgtgccttccatcctaatattaacatatacaaaccatttacgtgcatgtgtctgatgaaggtattatctacccacaggtcaatttaccaggaaacaatacctgatcaataaccctctcatcatatagtatgtgggagctaaagatactcaaggaagctcccgaagtcgacgaagtaacaaccatttcaggaggtaaaaatacttgcttgtagaatccaaatggaaagttcgcacttaaataatcctcatagtagctgtagaagttgaattccagtagacaagacttatactttaattcagtttgactacaataagttgccagaatacaaatttacggacctataagcttcatggaaaaattccattgtattacgaagcctcgagagatcatgcggcaaacacaagttagatatgagaaagttggtctgatctggaaggatttccaatggtcctgcaactaaagacacccaccgcggtgcaataggaatagctagttcataaacatacgtttttcgagtagtatcttctttgcacataacctgaaaagtgtgaaagtttaaagattacgccccctccaccttgtaagagtactaataaaattgaatgatggaaactgtaaacctattcaacaaagttttagcttatatgcctacaataacagagaaaaagttcttctgtttgatccagattcattagataactatactgaacagcaaaatcttctgataatataaggacagaacaatgaacaagtttccttgcaaatagagatagtacactttcagattaaacagcactggatatggcttctttcatatataagctgaaaccaaatttggacgcagattttatgcctacgtccacaagtcacgggaatgacagctttttctaagtttttccattcaatccagatctataatggaatatgtcttgtacgtaagatacaggatcgaagaaaatatcacttcctctaatccattcatgtatgacagatttacacaacttacctggtagagtaatttcccaacactaacagccacaaagttgtgcggaacagtgaattccaaatcgaaactgcacccaccacaaagttattaaaaaaaaaagttaaacaggttgtgatacccactttgatctcaaaagacaggagatgaatacagtgttacttcttaacaaaactgaatacctgcaacgatggtactcatcatcaatacaaggaaaccaacaacgagcacgtctcatctggttatcagtatgtacaatgttcccatcaaaatgaattcctgactctattttctctacccagtagctaatccgaatcaatttaacattctgcatcatatgagcaaacataaatcgttaaacaaaggacagcggacacttgtaacccatggcagtgtatatgagaatcagaacaattacctgttttgcctcccctgaagattgggaaccgttttctaaagtcacactgtccagctgttcagataaatccttagaaggcttgcaacagttgatcagtaaatttgcagtgtcttctatcttaagaaccccgacatatttcatggccgcagcatcagctgctgaagctgggtcagagaccgggttccagttactttca

SEQ ID NO: 36217 - DNA, 7792 bp, Arabidopsis thaliana landsberg
  unsure (1)..(7792): unsure at all n locations
gtaccacgactgtgtttgttttacatgttacgctcgaaaagatccacttattttctttattaaagtttttgtgttttgagtaaacctcttatttttagttggttaagaaaaataaataaatatgagaaagtattttgatctttcagtataaagtatatatatgtgggatagttgcggtcctaagatagtcatctagcgtaatcttttgggttagctgataacactaaaaggtcaggaagaattctgggatttcttctttgggagtttttcttaactaaatattttcgttgctcctggagcatttttttatttatcgaaatggatctgtctcttagctgtgacttgatatacttcacaaatgtcgtaaatgtgccactcgaccataatgtgatacggccattcatccgtaacttggttcaacaactcataacctaattgttgacaaatatgaagcatctcctccatttgttgtatatttctcttcgtgatcaaccgattatctttcagcttgaattttcgaagtcagttctaatatctgtgtttctcaaatttcacttttgagatgcagttccggcaatttgctaataagattggaaatcttgagcgtccatttcttaaagaattttttcagcgatgggttgcatcttatggttgtcccgtgctaaggtattttttttctaattaagagttacgttcttctgaacttagttcaatggattcctggatcttcatttaatcttatctcgatgttcttactggtgctttattaaactaggattgggttgtcttacaacaaaaggaaaaacaatgttgaaatggctgctctgcgagaatgcacggctgcactggatgcaagattatcagttataggggctacttctgattcagaaagccgggatgtggatgctggctggccgggtattatgagtataagggtttatgaacttgatggaatgtctgatcatccaaagttgcctatggctggagatagatggcagctactggaattaccatgtcattctaaacttgctgctaaacgctatcaaaaaccaaagaagggagggaaacctgatggggctgaagacaatgttgatgctatagcaccgttagaaaataaaacgaggtgggtttctgtggtacactatttctggcattcctggtctgtttacataccttgcaacaacacaagaaagagaactgagactctgagagattgaatctttctctgtagcattgaatctcccttggcttggattaaagctgaccctgagatggaatatattgctgagattcaccttcatcagcccctacaaatgtgggtaagagatcttctctgacacatcttgaaaatctatggtgcacatcacagtcgttatttctttcgctttctacatggttggttcgtgacaagaagctcatgaactagtttacttaggtattatctaactgagtctttctgtgtgttttctgtgtgttgtgctcttacttctagacatctcaaaatcctacattggttacagttcatgtttaatcgtttctcacacttgtgggtttcnnnnnnnnnnnnnnnnnnnnnnnnnntagagaaggacggagatgttgttgctcaggcacaagcaattgcgtcacttgaagccttaaaacaacactccttttccattgtgaatgcactcaaaaatgtcctcactgactccaaggtttagtccgtctcttgtgtactttttctctaaaaccagtttgaagatgaagttcttgtctccaaaatattattgtgacatataggtcttctggagaatacgtattggggcagcgtttgcattggctaaaacagcatcagaggtatgataaaaattgttcaatcttatgttccaaagggacaagacgtataataatcaaatttgtaacttgatttaagtgcatagtatgaaggttagcaaaaggcattgattcaaaagtataagattaggaaccttatatgtgcaaattgttatgtttttagaggaatagaaccagctgaaatttcaccatttacaagaaaacttgtgggaaaagaattccattcattcaggtgagaaaaatgataagggaacaaatttaataggaaactttgcatttactacattgcagaagtaatgagtggaaaaaaaattcctctgatctcaacattcctttcatcaatcttccattcatcttaattttcatttatttctagcatgttaccagattttatttgtttctcttttgagattttcatgagtgtatgtctattggttttaactgcgtagtatgccatctttcaacttatttttgtaaactgcactttctaaaggcctgcactccttttcgtgacctttgaaacaggtcttactgcaattgttgatttaagctcatttttgtttctagcaggagtctgactgggcgggtttgcaacatctaataaagttttataagagtagaagatttgatgcagagattggactccccaagtgagattggagccttttaatttttggacctctctttggtaaccagcagaagatttctcataaaactgatattctcctttcaggccgaatgacttccgcgatttcccagaatattttgtgcttgaggtaggaaatgagcttgatatagtgtcacgcattgatctcagatgttagctggagatgctatgacgtgtcctttcgatatgacagaaactgtgtctgctctacttagcatataagttgggtatctccttaaaagtttaggctactaattaatatgtcatggtaaaatagataaaagaatgaatgttgagccaacaaagaacataatagaaaataacgagcataaggacacaaatatccagaagcttccttgtgtattcagctttttaggaaaattcgttatgcagtgagggtgtgatttcttgtttctctcttcttagcctgctttcctctgggggtttccattgttattcccctgcctgaaactatggtttgtaacagtttaactcttttgtttcactcggttagcgccagtggttctttggttattgttgagttaaattcatttcttctcttgaactttgaacatttcgtctcttgaatgttttatctaaactattgttattttctacgtcttaggccattccacatgccattgcaatagttaggggtgctgaggggaaaagccctagagaagctgttgaatttatcttacagcttctgaaggtatacatctctattgggtaaattttgtgaaacctttgttgcctactgatatagcctttttataaaagctgttagtctttattcgctgcagtgatttctttcatctatgaaagattaggtgtttcgcttgttttcagtccatattatcatcttaactgatctcgccctttttttcctattccattttatagtacaatgacaacagtgggaattcgtattctgatgtattctggcttgctgtgcttgttcagtcagttggtgatctcgaattctgtcagcaggtctgtgatcttgtaaaagacactctatgatttatctgttgtagcgtaatatttatttttgtcttttcctactgacgctattaggagtaaaaaccccttgaatttggtacatagaaaagacaagatttggtacttagctcatgtattatatagctatcaaaattttgaggcttcattggtttatttagctttatggaggtctcatacttttatggaaaaaaaaacgatttggtctcatacttttatgacaaaaaataaagattcctattattcagttcatatgcaaagatgtggattttagaacttcaatataccagctttgctacatggttaatggttaattgctcaatacttcttgcctctttgtttccctggcagagtctaacgtttttggcccctcttctgaagcgcattgacagactcttgcagtttgacaggtaccctcatgtttgatgttaatgatttgataggttttaacagaacttattactgagagcttgttggagataaatgtactaggttgatgccaagctacaatggcatcttgacaattagctgcatccgaacattggcacagactgctctcaagctttctgattccatcagtttcgtaagttctttcctttcgcttttttcttccaattgctccttatgagatagataccagcggtgattaaaagcttgcaatttactgacttcaggatcacatctgtaaacttattgaacctttccggaattcggatacaatattgcaaattcgtatagaaggaagtagggcacttcttgacatcgagtaccaatccaaaggcataagttccgcacttttgttgtttatgaaatatttggtagaagaatcatctttgagaggttggttatattctcatgctggaacatacagctttctatttctaatagagttcatttattgcttttatatctttggcccttgattacagggcaggtaaaattgtgtgtacacacaatgcggttatgtcaaatagcagttggatgtgactcagacgattgtgtcgacactgttactcttctggatttgctgcatctattcaagagccatgtagtatttaacaatgaacttcttcgctactacttgttctgcatttttcaaatcctcgctggaaggtctgtagtttacttccttcagtggattttgtttggaatccagttgttctatttgagcctagagggttatttttctctgttttcttctgcttatcaacataattatccacattctgaacagaatatacttattgttgtctcattttcagacccccaacgttgttcggagttcccaaagaaaaacctttgcagcttgttgatgtggaggcctgcattgaaccgaaaaatgtatttttggttcccggagcagaggcaggggagccttcactttcggcacttggagatgccaaaggacaatcgctggatgttgctccttatggtgttccaataataccacaggaaatgttcatgcctattgttcctgaactgatgttgccagaacctgttgcagcgtatgatgagacacagcatcttgaacctcgcatggaaagtcaaaaccaaccttcacatgaaaatcccatcgttcatgagattccatcagatgttgaaggtccaacagaagaattagctcatagggaagcaaaccctccaacaaaggaacctcaaaaagaacctgatgtggtttctgtgtctgttagtcatgaggtgaagaagtctgttatacggatcaaggtcagaccatctggggcaaccagcagagcggaaggatcagcacgaactatagaaagatctcaagggattgtggtacgccatgatatagaccgaggtcaaactagttcagcttcagtggacgccccacagagaatctcaactgacgctgtgagcataagcaatcagaatcacgtggaggaagtaaattcgtgtcacgatgttggttctcgcatgactgcaagcatcggcagtgtaaaatttgcaagcgaaggcgatatttttgggaaagagttgcaatgcactgctgagtctgggaaaccttcgacaagccagaaagcagataataacaaccgaactgtaccacctagcttcttaccactagaccacagtatggaaaacgaggtgcagcagaaatacgcgagcctccaaacactttcgattggtaaagaaaaggaaaagaagaaagacaaggaaaagaaagagaagaagaggaaaagagaagatcccgtttatctagagaagaaacggttaaagaaagagaagaaacgaaaggagaaggaaatggcgaagctcgtgagcagcactacggatccagctaaaaagaagatagagagtgttgcggaggttaaagaagaagaaccaagtgatggtgccatgttgattaaggttgaaccaaagactgaaccatcaacagcagaagctagaccgcttcccaaattccgaatcaaactgaaaagcaaagcgttcaacaactcataaggttagatccgagccagtccctccccgccaaaatctgagtagtaacttttatttccaaaagctttgttgttacaacttgcaaggtgttgtgattatatgtcaatgtaatctgtttattcaatgcgctttagcctctcttgtctagctttggttacacgccagagatgaagcgcgctccacgtcaaattcacgaactaacgttaggattgaaacagtgcacatttaatactaagggaacgatctgacaactacctttaattttatttgatttccagtgcgcaatgtcattaatttagactaatcatattacatcaagaggctaggctaaattacatcgatactaacaattaatggaacggttatctccaaattaaaacaatcagagcttgaatgattttctaaaattttgttaagaaaaataatccaaaaaaaaaaagaaaagaagagagagggttttagacagaaaataaacataaatgaaaagtaaatagagaaaaaacgaaagaggggaaagcgaaggagaagcactgtggaatcgaaaaaacacaaagctgcagcattttctctcaacttggtggcgtcttctctaaccaaccaaccaatcgtctctagtcaaagagaaaaagagcgagcatggagacaaagctagaaatccttattccgtagggaagagaaacagagggaagaacggcgatgaactgttggagagtgttgaaatccttacaagccttggtggctcactgctttctcttctctttcacgctcgctttggtgctcaagctcgatcactccattacttactcctggtggttagtttctctcctctcttttttgtctctccttttctctgagactcaaattgtatgaaatcgaagttttttttttcttgttcgttgaatttcgagcgcatcattattgcgtcctacaagattgagagagttgaggatttgggttcagaccttattcgttgattttataattctgagcttggttttgtcggaaactgtgacgttttgcttgtatgtggcatctgtcggaacgaattttatgtgagattgttgaaatttagcttcccttgatcgaaaactctatcgattctcctttagataatggaatccacgatggtaatttttacttaataagaattggaaattgccgtttttggtacttcttgtgtagaagacattaaaagtacatctctatcagctattagacagggaagccatgctagattgtgtcacgtgttgatgtaccaagtactatgtctgtatgaataaacatagggttttgtgtgaggactgcaattggagatgatgtcatcatcttgggaatattcttttatagggtttcagattctttgattcttggttgtggaggtgtttttacttggttattcatttcttcttggtgttggtagcaatcatatatgcaatgggttaatacataacaagtgtatatgcgccgctaatttgggtatgcagggttgtgtgtctaccactgtgggctttccatgctgttgttgcaaggggaagattctcgcttcctgctccaatcgctcctcgtaaccgtcatgtatgtcccttacttcttttaccacaatattattcaaagctcgtgtcatgatttccagttaatagtcgctagaaattactgatctcaggtttaacctttagatgatactctttgaaatttggcatgtaatgatttgtttacattttttttggtgtacagtgggctccatgtcatgctattgtctcaacaccgttgcttatagctttcgaattactcctctgtgtatacctcgag

SEQ ID NO: 36218 - DNA, 1552 bp, Arabidopsis thaliana landsberg
tgcaggatggatcaatctttgccaatatccattatctctttgaactgcaaggaagagattgtattcctcttcacataagaaggtcttggccctggattctttggaggctttggaaaaacagaaacaagttgttcttcgaaggttccatcttttgtccactcatttctatggagaagattatagatgataccgctgaatggtttttagcaaacactcaaactcagaacattgttaatgaggaggttcgcttatcaactccttcagctattggttgggaaccgccggactcgggttgggttaagtgtaacataggagctgcgtggtcggggaaaaaaaggctaggtggaggcgcctgggttttacgaaacgatctgggggaagtgcttcttcatagcagaaaggcgtttagtgatcaatgcaccaaaaaagatgtgttgtcgaggtgtgtcaattgggctgttgaaagtttacacagtcacaagatcactaaggttctttttgcttttgaacctggagatttgtcttcagctttcaaaaggcctaaagcttggccgtcttttgcgtatcaagtttcagagcttaatcattttttgggtaagattggtgattggaaagttatggaggaaaaagtagctgcaaacaagggagcttctctaattgctcagagtgttgttaaaggagataggtttcaatcttatgcagcggttggacatccttggtggctccatcaactatttgagggtgagagaatctcttcctaggccttgtttctttggtttggtttgtttgaccatagtcaatcttcggttcttttggggaatggttgtttgcacgactattcttgtaaccttaattggtctttttgtagaggttctgtatctcgaacaatattgatcaatatatcattgtattggagaaaaaaaaacaaaaaaagataaagcaatgaatgaaagacaaaggcaaaagggtaaaaatggaattttgagggataaatgaaagtaaggcaaatgtccatttcattgatcttttcttataatatcatattttttctttcattttggaatctttctctctctctctctctctaaaaccagattcttaatagaagaagaagaagaagaagaggaaaggagaaatctgccatggcgtcgccgagcaaacgtcgagagatggatatgatgaaactgtgggttcattttccaattgattgaattatatctctagatttattctctggggtttttcttcttttttgatctgttgatgaaatttcttcttcttcttcttcttcttaatgatgaatttggattaaataggatgatgagtgattacaaggtggatactgtcaacgacgatttgcaaatgttctatgtcacattccatggacccactgacagtaattctctctttgccttcttctttttttttttgcttgcttataagctacttgttgaaatgccttaatgaatctaaaaacgagtctttgtttgatttcttcttcaaactcaacttcagattcatcaatgataggaactagattgaatttggattg

SEQ ID NO: 36219 - DNA, 1900 bp, Arabidopsis thaliana landsberg
gtcgatcttcacgttcaaagggtctccttgccccaagctgatagatatgattgatgttaccattatctcatattcctgtatctgtctacgacacatcagtcgagtggctcgacaaattttctattgggttactctgtgcctttgtagtgtggtcgttgaatcgtcttctcacgattttggaaccaccacaacagggaggtcaccagcgacgtactacttccaaatttcacgtaattatggaaaccattctcggaattgaaattctcatcttttcttatgcttgcttgcatcaatttttctcctatgtctgtgttgtatgtatgtaagtatctttgtttgactaactccattctgttttcacaattataggtagcagtatttgttgcactagcaatggtattgcgtaatgaacctaatactttggttattgtattgccgactctcaaggaagacgagtatcaaggacatgacaagcttccgattttagtttggatgatggctcaggttcatgtgatcttttgttccccttatgtctagtgtcgaaatttgtgtgcttttgtcatctgtattctcaaagttaattcaactgtaaaatgtggtcaggcctcccaaggtgatttatctgtaggcttgtattcatggtcgtgtaacttgttaccagtattttaccaagaaaacttgttaccagtatcccgtagcaactctcagtcaatggatctcatcctgcagttggctgagatgtgagtcgaaaattttcttgtcatttcctttgctatatatatacaatcatctgatcattttcttggcaggattttgtctaatcttgatgctcggactatacttgtaaacggaaccgttatagataaacagcgactgatttcaccttatgcatttgagctcttgatgcggcttacattccctgcttcatctgaaagagtaaaggtaagcactagtgtcagactttatgatgcgtttgtcaattctgatcacaagcatggtctctatacgcacacaggctacagagaggttttaggctttttatcccttgttgaaggaagtggctcttgcctgtgaaccaggaagcgagttaatgaaacaagtcactcaacaaatattccattattctttgataatagctggaagaagtaatagtaaatggaatctttaatccctgagtttctagttccctctctcttctccaaatagagttcttatgtttaccctttgttacaggaaatcttgttttagccaaggaagctacagcaatcgctgtctggtctctgaccgaaaacgtagattgctgcaagcagtgggaaaaactctattgggagaataaagaagctagtgttgctgttcttaaaaagcttgtagatgaaaggggtgatatttccatcaaactagcatcatcaccgagtcataaattcacactcaatcaaactatggagagcatcaggctaaaagtaatgcctcttactctttttttttttttttttgagcaaagtaatgcctcttactcttctaagcactcatttccccctcctttcagtagtaatttcatctctgacctaacctatgattcttcttagatcgaaaaagccatcactgaagtaggaaccattggttctcgttacaaagaagctgacaagtcctgcaaagtgatgacgggtagattcttccctgaaaatgcctgcctcaaaggtacagccattattactgctgtggttctagctgctgtagctgtgctagcttccaacctgtaggctgaagaagatggtggactcattggttctgcacctatgcttgaatgcagacacctcagctttggagaactcatagaggtgtgccctagcagttgctttccttttgctctgagcatgtgactagtgtgagatttgtcgcc

SEQ ID NO: 36220 - DNA, 2552 bp, Arabidopsis thaliana landsberg
gtgtgaatccagaaagtaaagatctgaggaagaacagaaacgtccataatcagaagcgaatcttggagtgtggcgtaagaatttgaagcttacagattcgtagagagagtcttaagagggagaagcaagggaagtgtcgccggagaagaataagaaagagatcggaggagtaattaatacgaagcggagttgactaacggtgcgtcattaacgaattaattattaataacagtcgtcgaaaatgatttgacaaatgtgtgtctttggatcgtgccaatcaaaaccaaagaattctcctgatggctttgaatataatttaaggaaaaaaatataggaagtgcaagtgttgtggcataccacgtttaagaaaaaaacatggaatattaaagaagaaaaacctaatacgtgaatcgaagttagcacacataattaacatgctttagaaattagtatgggcaataatactgcttttttttttggtaagttgggtaataatacaacttgagatttggtttgcgacgttcaatctgatttgattatatgaactatctatttctatatgtcttcatattatttcgtgtgttttggtggaaacgtgccactcgccaggatctgatcgtagctgtcatttttacgttaaagagatatttgtcttggttcattgaactcttcttgacggtggtacctttccacgccttacatttccatcaatacgcgttagtaaaatcttcaataacatagtgacgtttccttccgcaacaacggtagcaacaaaataaaaagggacatcctcaccatataaaacctagcctggttcgaaggagtcaaatctccctcccatacaaaatttattccatataacaaaaaccttatcgtcgaacagataatatttccccttgctcctctctaattttatggggaaatgatttcatcaacatcttttttataaaagaaatctgaaactgcaaaaaaaatggagaaaaaaacaaaagccgaagcttaatgactgcgggatttggtggtacttaggcacctccagatccatacttcttgccgaagacgattaactgcagcttgtcgtagccagcaagcacaccagcacctgcaacggcacgcaggatgttggcacccgcacccttgaacagagacttggctccttccttcttcacgatctgtgagaacgcatcaaatgagctcttgtacttcaccgcttcacctgatgtcatcatcattcttcttctaaccgtgtcaatcgggtacgacgcaagacccgcaccattcgtgatgagccatccaagagcaaaactagcgaagaaactgtcctgaaatatccagcaaggaaagaaataacaacattagaatcaggatccctgatttcttaagctgtcaccttacagatatataagaatagagctcaaacaaacctgcaggtctccagtgaggaggacaggcttcacagagtcgtacagtccaaagtagagaccacggtagacaatgataccagcacacgagatgttgaaaccacggtaaagtccagcaataccatctgacttgagggtcttcttgtagacatcaacaagaccattgaactgcctttcacctcctcccttcttggcagacttggagtcattggcaagacgggtacgtgcatagtcaatagagtacacaaagagaagggaataggcacacagcagcacctccagatgccaagttaccagcaaaccacttccagtagccatccttgtctttcttgaagttgaaaagcctcttgaagtaatctttgaatgcaaagttcaaggcctagcaagtgagagatagatcagtaaccaatacatcatatataactaagacattttaaaaaagcaaagaagtgaaactaaaccaacctgagtggggaagtaacggataacattagcggtgtttcctctccacaacgaaccaataccttcatccctaattgtcctgccgaaacagtcacgaatacccttgtatggctcagtaagccttccagccttaagcatctcatcctggttttgaatcaaaagcttgacacgctcaatgggagcagcagcagtctttgacacagcagcagaaacaccacccatcatgaaatcaatagcaaagttagtaaatcccttctctcctggagcttggacaaacacaggagaagtagtagttgcaatctgagatgcagccacaagaggatattgaaatgcagcattggagtagtttccgtaagctgcatgtttctggtatgtagcaggccttttggaagccgaagcataaccacgaatgtcctgagaaacactcgagctcaagagttggccagaaaccttctgaagaatcgtggggtgctgagtctgttcaaccattttaacctctacaaaattaaacaacccgtagtgtaagaaatggaatatgctataaagtgcagtaaaagcaattgtgcatctccagtggaatagaacacttatccaccattaagcataagagaggctacatgtagaaacgatgcaatcagaaactaaaccatgaacacattcagacgcaga

SEQ ID NO: 36221 - DNA, 2747 bp, Arabidopsis thaliana landsberg
tattattggaccttgttattgttgtaatcctgatttaagtttttgttcttaaatttttatgatctttgcgttataggatgacatggtagatcttggttcatggttcactgttttccaataaacttggtttgtttggttggatagcgttctgtgatacgaccatgtcttgtgttggataagaattctctgaatttccttggctggtttgtagtatgttattcacgtctggtttctcatcaatgattatgtgattttgcagagttcaaaatggttgatcaagttcagcaccccactattgcgcagaaagctgccgggcagttcatgcgttcaagtgtttccaaggacgttcaagtgggttaccagaggccttctatgtatcaaagacatgcaacctacggaaactactccaatgctgcatttcaatttcctccgacatcccggatgttggcaacaactgcttctcccgtgtttgtccaaaccccaggagagaaggggttcactaactttgcccttgactttctgatgggtggtgtttctgctgccgtctccaagactgctgctgctcctattgaacgtgttaagcttttgatccagaaccaggatgagatgattaaagctggcaggctttctgaaccctacaagggtattggtgactgtttcggcaggacgattaaggatgaaggttttggttctctatggagaggaaacactgccaatgttatccgttatttccccactcaggtttgttgagtttcatactctttcttgttatagcttttgaaaaaacataattttctgctaaccttcttttttgtctattgtaggccttgaactttgccttcaaagattacttcaaaagacttttcacctttaagaaggacagagatggttactggaagtggttcgctggtaacttggcatctggaggagcagctgaagccaattcccttatgtttgtgtactcccttgactatgcccgtaccagtctagctaattatgccaaggctgcaaataaagaaggtggtgaaagacagtttgatggtcttgttgatgtctacagaaagacacttaagactgatggtattgctggtctgtaccgtggattcaacatctcatgtgttggtatcattgtctaccgtggtctgtactttggactctatgactctgtgaagcctgttctcctcactggtgacttacaggtatgtcttgttgtctttctctctgatctgtgtgctctcttgcctatcattggttgatattgacatgttgtggtcgttctcttttggttatttcaggacagtttcttcgctagtttcgctcttggatgggttattaccaatggtgcgggtcttgcatcctaccccattgacactgtccgcagaagaatgatgatgacgtctggtgaagctgtcaagtacaagagttctttggacgccttcaagcagatcctcaagaatgaaggagccaagtcactcttcaagggagctggtgccaacattctgcgtgctgttgcaggtgctggtgtcctttccggttacgacaaattgcagctgattgtcttcggtaagaagtacggatcaggaggtgcctaagcattgcttcttcctccttttttcgattttaattgcggttttaaggcccgcaataaactgagatgttgatgaaattttttttgcttaagacttagggaggcatgtgccctaaaccaaattttatatcgttctgacgccaactttttttacttatggaataattcatgtttgagagagtttgttagactcttcgattttaaagaattttggatttatgagttaaattcttcttttatatctgattaccatgttatttatagtcttaatcaacttgcaatattgatttcgttatcttaggtagtatctacaatctagttcaggctgtaagttaaaaaaatgcacgcatccaaacctgtgtaacttagaagttttgtacgaagtagtgaacttaaactgtagcaacaatgatgaaagaaatgttgcaaactcattgttgagaatatcacttatatattgcatgtcaatatttcactcttcatatccctcatattgcaccgatgtctaatatcagtagtaatgagagagcgaatgcatagagctcggttaacatgcataaaacatggaaaatgagagtgaaaaatctactatgcaaatcgccctttagcatcacccatctctgaattatttttgtggaacagagtcatagagttgcacatcagtttggaattatgaacattgatagaaatcaagaaaacttccaataagaagacaccaaacagatatttgagttaacaaaaggtgtttctgaaagctttgaaataaattaaaatagtgatgtattagtgattaaggatctagagatatttaaaaggatctgtcattttgccatttgtctgctgccattggaaggattttgatccgacaaggatttcacatctcaaatcaccatgtcaattgtttggtgaaacaaaatagagcaaaagtagtggtgacaaagtagggttcataggtggttggttagtataaaagagagattagatagaaactgagagtggaggttgtaatagagacctcaattagtaaagtgaaagtgtgcccccaagagactataattgagtctttatggagcttcgtgccacacacaaccccctctcggcttttctcacgtgctctgaatcatacattaccaaaaaaagcatctcttttttttttttt

SEQ ID NO: 36222 - DNA, 8188 bp, Arabidopsis thaliana landsberg
ctttcacaagccactctgctaagttgactgatcccaaccctgcacatatcacatatgcacacatggaaaacagttgcattgtaatttggggaaaataatctcatcctgcacatctcctctgtttcctctttacaactccacagtatcttgttcgaatttatttatccaatcaaaaaataagtgatatgctaaaaaaaacttgtgggattaaaaccaagatgaggaagaggaaaccgtcgtttgcttgtatgtctcggagaattacgtgtgctgatgattataataaattaaaagtaagagagtcaaatatttgtttaaacaagaaaacggtaagaaggatgagaccaggttttgtggtagaacaagtccgggagataagatagttgcgtgactaggaaatggcgtgtctacacaagggcaccttttgatttcgatcatataacaaagaagtagataggcctaaaagagcccatggtatgtatgtatgaggcagctattgtgaggcctatatatgggcttacctcattgtccatttgtttccaaattattcatatgatcaacgatagatgatcaaatgaagatatatttctaatacatttagttttatcattgtcaaaatatatatttctacaaagaaactttacaacatgatcggattacgtgaaactaaaaagagggaagaaacttgatagagacaaagaggagccttttgttataatcatattagttatcccaggctgagaaagtgatgattcctccatgcatttaaaaaattgtaggtacataaagaaaagaaaaaataaataaaggtggtagatagtggagcaacggccaagagtaagataacattctatatctctaaagttgcaagttgggttatatttaactaaaagtggaaatactaaaaggggaaggcaatcataaaagcataaccgaatagtcaaattgacgagtgtgttggacgattctgttcttctacccctctgatctctcacaggggatcaaatagttttgatacatagagccacaacagtgacattagtgtgttgttgactactgtaagggttgggttttgaaaagagacatgaaggagtgttattaggttgattgtcttcaagtacctccagtgtcaaacaaacattgacgattgattctcttcccataatttattgttatgcattacatatcacagtaaacggactttcaagtcaacaccgcatttatttgccctcttcattgtttcacgtacgtaatcaaggaccaagggattttgttcttttggctaccatggccacaagatgcttttggtgttggaccactttgctcttctgctctcagctgcttaccggctttgcccgagcttcctctgcaggcggcgccaaagagaaaggactctcccaaactcccacctgggccgttgccctcgtctgtacctttttcattcttgtctccgtccttctcgagaaggctcttcacagagttgccacggtttgccctgaattaccttttttctttcttccgcatgtgtatcccccgcctctaaaatttatttgtctctttctcagtggttgtgggagaaacataagaactctctgcttgaagccttggaaaaaataaaggccggtaagaccagagaattgttttctcctaccgtatttggttaaaaaaactaagatatatgaaatggatgcagagctgatgattctaggattcatttccttgttgctaaccttcggagagcagtacattctcaagatttgtattcctgaaaaggctgcagcctctatgttaccttgtccagctccttctactcatgaccaagacaagacccaccgcagacgtctagctgctgctacgacctcttcccgctgcgatgaggtcatctctagcttcccttgtactaaaaaatttacgctctagctctatctctctaacacttttttgttgtccgcagggtcatgaaccactcatacctgccacgggtttgcaccagctacacattctattgttcttcatggctgcctttcatatcctctacagtttcatcaccatgatgcttggcagactcaaggtacgacaagccctgattttcttatctcaaactttcgtaatcctagctattcatcattttctgtaactgcagatccgtggctggaaaaagtgggagcaggagacatgttctcatgattacgagttttcaatcggtaggcgagttcttattcattaaattaaacctttgttttataggttactaaagtggctcctctctatgcatagatccatcaagattcagactcactcatgagacgtcctttgttagacaacattccagtttctggacaaaaatccccttcttcttttatgctgtgagaagcatgcatttacttcttcttgagcatgccctcgtggcatcaagtttgttgattaaaaattgatttttgctcgctctctcaaccatctgatttacaggggtgcttcctacagcagtttttccgatctgtcgggaggactgactacttaactctgcgccatggcttcatcgctgtaaggcaaaactcaattctctcttgtatttgccttccactaatggtgtgatgcttatgggtgagtctcctttaggcccatttagctccaggaagaaagttcgacttccagaagtatatcaaaagatcattggaagacgatttcaaggtggtagttggaataaggtacgtagcacaaaacagtgctagagctagtactgcgttgagaggtgtttgttgacattgctgatactgtactgtgcagtcctcttttgtgggcatcatttgtaattttcctacttctgaatgttaatggtgagtcagctttgcatttgcttgctcttttaccaagccattggttattgttctactgaataaattatcccattcctgtttaggctgggaagcattgttttgggcgtcaatcctacctgtacttgtaagacaagttatactcttgagcgaatcttatactgtgtttgtatgtctcatttttacaaccccttgcagatcattctagctgtcagtacgaagcttcaagcgatcctaacaagaatggctctgggaatcacggagagacacgcagttgttcaagggatacctctcgtgcatggttcagataagtacttttggtttaatcgccctcagttgctacttcatcttcttcacttcgccttatttcaggtacttgcattgttttcagttccaaacaaaactaccattgcatgttacatatacttgtcttcaacttttgtgccatgctgtctaaatgccccttctttttgtatagaatgctttccagctaacatacttcttctgggtctgggtaacaacatctctctatattctatgcgcaatacactagttgtttgccttttggaccatgtacatattctcttctattgatacaaatgacttgatacatttcgttaatttggcatgcagtattcctttgggctaaaatcttgctttcacacggatttcaaactagtcatcgtaaaactctctctagggtaaaatttattcttattcttctctagtgaataaactaatagatatatctctcttggaacgattagctcaacaagtttgataaatttgcagcgttggagctttgattttgtgcagctacatcacacttcctttgtatgcactagttactcaggtacatttatcctaatttcagcctttactctccagatatttgtgtctacgaagctatatagtagtaactaagcaacaaacttatgttgttgttgtgggcagatgggttcaaacatgaagaaagctgtgtttgatgagcaaatggcaaaagcgttgaagaaatggcacatgactgtgaagaagaagaaaggcaaagcgagaaagccaccaacagagacccttggtgtttctgacactgtcagcacctctacctcatcctttcacgcctctggagccactctactccgctccaagaccactggtcactcgacagcctcttatatgagtaatttcgaggaccaaagcatgtctgatcttgaagctgagccattatcccctgaaccaatagaggggcacactctcgtcagggttggtgatcagaacacagagatagaatatactggagatattagtcctggaaaccaattctcctttgtgaagaacgttcctgctaatgatattgactaatattcaaaatgaatgcagaacaaatccatcatccggtctttattttctattacatgtatgccaacaattgcttcgccaagtgttaccaactaggttttctgtataaggctgtattttagagctcttacgtatctaaagaaaaagtaaagcgatacataacaggtcggcccagataagtattacatcgtgcaactgactattactgccagaatctatcaaaaaacaagacacggactttgataaagattgtataaagaaaggattaaaccgtagctcacgctgatcttttacaatatctgatataaacagactcactcaggttcttcctcgtcatcagtgtcacctccaaacatggaagccattttcatcgctaaatttgcagctatttccctcctctggaaatcaggcatcaatcgcaagttgtcccggatgtttcctatttctgacatcaactgttccacatcttcaaactcgtaacatttttcattttctgtgcccaaaggtgtgtcatcaagaactatagctctgtcagagtcatttagcagctcttaccttgaccctgacggcagcagctcttcatcaactttattcggtttcaccatactattttctacatggaggttttcctgtgaagtggatccgccagcatcggcatgtgaatgcgtttcacttgcagaaacccatctttcttcaatattatcccatggatcacctgagcctgctgatagcacttcatactccaattcatattcagattcttcttctgacaactctgagaggaaatataagacccaatcaacatgaatccaagtggaaatgaaatgtcctcaccaggatttcttatctgggtcgagtttcggtctaccacttcctggtcgaacagaaactctaaccgggaaaggacatttcaggaactcatacatatatgggagaggaaagtggaagaaacaattaaccttccccttgaggtaacacaggttcatttatcctatcaccagatttcagaatcatcccaggccacatatgagccgaaagagcaccaaatagacgttcaaccccttgagaatccccatcgactgataaacctacaaggaccaacccgtgagcctcattaatgctagagagacgaatacgcgtattctctgctcatccattttcactcacttttcattcacaagttcagtagaagctatacaaggagtaaccagattacattgggcatattgcagtcaatatataatcagaaggaaggagatagaacttacacttgtcaaaatcaggattagaggcacaagcctcaatgaactcaatgttattctcagagcaccactcaagacatgctcccctgatatctagtgatgcatcttcacttcccaacaagctgcttccttcagtttcggagatcccaaagtcatcaatgtccgaatacagatctctagaggggtctgatgccttcaaaaggcgccgtctatattcataatgagcaaggtgatgagggacacgatctactttgttaccaatgcacaacaatatatcaaaactgttgatgtcagtatgagaaacccagtcttgaagagcaacaagggttgacagctgcaaagaatcgggtaaaaaagggttatgcagggatggtaaggtgagaagaatgaagcgtgtatcatcatcatcatcatcaatgtcaaacctcactcaagtcgaagaccataactaacgccaccagtggatgtgagttagggagattgggtagagagtattcatcgcaaatatgtgatatacatacagaaacatccgcagtgtaatacttagtgttaatcgtccagctgcccacattttacagagagaaaaaagagttcaaacgatgaaactgttagggtaagaaattcttcagtactagacgtacccatgaacttctgtttgagatgatgactccgatgaatcctcaaattccacagagagcaatcctgtgattgattacatattagagcaaaacaaaattttgaatcggatccgagagggagaagcgcgtacgagagaggagggtgcgcttgccgacgccagaggatccgacgaccaaaactcccggtcggctttccatcaatcttctccaacttcgcccgccagtgatcaagatccaatctaaacagatgctaattctgatttgtcgtcaagtgagaaaaggcaaacccaacgtcaagtgataatttgaagcccaaatatcaaaaggcccaatacaacgaaatattgaatgttttatctgcgttagcttgaccatgtatggtcgttttaaacacacacattttgcattgaaagaaaaacagttgccacaaaacacatctcaaaacagattgtgtcctaatcctatgtgtctagttttttttctttaaaaaatatccattattatcaacaacagaaggaaaaatgaaaatacaacataggcgacacttcaggatcaaaatttaccaaactgattcaatatgtctgtcttaaccacatatggctgaaactgcatagacatctgaaaacccaagtcatgcgaagttacactacttgctggtagagatggctttctcggcttgtggggctgagggaaacacaaagacacttgaagcaaccgcagatggctgaaactcagcagcatatcgcgctgatgtcaaagttatctttgggagttgctgttcaccgcaagtcagaggcactagcttataacttaagacgtgttctgacttgggaaggactgaaaccgtattgctgtgagacccagacaggacaaaactctgtgcatcagccagaccaaactttgcttcttgcagcaactgtgtctggttgcagattctaacagcgtaagtgaagggttctccaagaatggcatatggaggagagtccaaactcattaccagtggtgatgcctccacatttacttcaggaagtttgtgctttgttgaaacatatgcctctgttatgttacctccctctctcctccattttaaatgtactgatcccaaaccaagctttggagttctcgtcgttggtatgactgtgaaaacctttttgaactcttcccctggcgcaagatttgcagagcttggggagtctccacacccaccaccctgctgaatcaaacatgaagtttccccttgttcatcatcaaattcaatggacatggacaccagtttcagcgctatttctgagcaatttttggcactgacaactaacacacttttttcgttcagcggcagagaagacacgtcttcagaatcaggggcaggctttatcctattgagcaataggtgatcccttctatatggcaacataaaacgattgcttattaaaagaggcatcctcccttcaatctgcaagctcttgtgtatgtgaactttttgggtattggcttcactgccatgtggcaagtaacccaatgacacaaaaagcatcacaggcttgggtctatgccatttgatttccagtttgcacgaccatgattctccttccttcaggtatggaacagaaaccagcccaaaagattgctgaattttctttatgctccctgtttcagactcggattcattgttgccctctgccccatcaataccacagatttcaacatgatggctttctagagaaaacggttctgcttctcttgggctaaacaaaccaccaccacccacatcaactagattaatcttcaattcaccactgtatacggcatgaccctttgaagttaccacgattggcatcgcaaaatcttctccaactagggcaggaccagaagcacctagactgacgtccacctgtggttcgggttcatcaacttgagtagctttctggccaaatactgcaagaactgggtccttttgttgcagagattcaacacgattttcatgcttccagacaggtaaatcctccattgcagcaggactcttcgctcttgaacagattgtgaaaagaggccccaattttgcaagaactgaaagacactcaagcttgccgctttgctc

SEQ ID NO: 36223 - DNA, 510 bp, Arabidopsis thaliana landsberg
gaatcccatttcgttgaataatgctgtgcctcaaactttttttcatgtttttaggtgatcaaagactttgcaagcggagagatggggcaggcgtccagcttatttgactgcgacaccaagctcgacgagtacttactcaaaagtttctacaagacagcctctttagtggctgcgagcaccaaaggagctgccattttcagcagagttgagcctgatgtgacagaacaaatgtacgagtttgggaagaatctcggtctctctttccagatagttgatgatattttggatttcactcagtcgacagagcagttaggtaagccagcagggagtgatttggctaaaggtaacttaacagcacctgtgattttcgcgctagagagggagccaaggctaagagagatcattgagtctgagttttgtgagcgtggatcgcttgaagaagcgattgaaatagttagaaatcgcggtgggatcaagaaagctcaaggattagcaaaggagaaagctgag

SEQ ID NO: 36224 - DNA, 7297 bp, Arabidopsis thaliana landsberg
aggataagttacaaatccgagctacaagcaatgcccagtttataccaccaagaaatcccgagacctagcaattgtcagaaagatactttacttaagcaacatgatagtcacataaaaaatagaagagcattatagaagaattctccatacattagagtatactccacgtcgtttggcccaaaatctcatgcatcttaatgttgttctgaaattctgctcagaaacaaagaaaaaaacatgtactcaggctaagcaaatcatatggatgagtaattaaattttagaagataagagatttatggtcagtgagcacgaaacctgaatgtttggaaccagacgcaagatttggtcagtaactctacaaccgttgagacttcgaacagtttgctcatcagcattctgtagaatggagtcctgtgataaatctaagtcctgcaccattaacatcaggcagggaacacatttaagcctccataagaggaacaggaccagagctccaggttcagattacctattttctacgagatccactcataacattcatttaaattcatgaacataatgtaaactgtgtaatagagtgaaactaattgattgtaatcagtaaggatgagtttagtgaggttcaattcgataagttaaaacatacttatctacgaatttcctagtcctcactaacaatcacctcattgtggacaagaaattacctcaggtataacccagagtggaagttgtgcataaaggagatctatagaaactccattaagtttgaatcccatcaatggaacatgagcatcaggcacagggtgcagttcagttacttccggcatttctgacagcattctttgtagctcaccaaagaaatcaccctaatggaaaatataaagatgaatattgaacacaataaattgacagaagaaataatcagccaacatatagatgcaagaggttatagtacttctctagttgcatgtctaggtcccacacataaagtgtctatatcagcaccaggtccatgtacctatttgaagaagtaaaacgaactgttataggagcactcaatatgctagaaatcggagagaaggaactctttaggactctgaattctctccaagaaccaattgcaaccataaatagccccctattgtgtctaagatttaccaataattaaaatgactgaaaagctcagttagatatgattcaagtgacatatataacattgagacctcaatatgtttaaatgaatgcaaagagcatgtaaagacgagtgattccacttcccactcagggacgtctcacaagacaagacaacagaaacaaaacacagtttccaccaattcacattgttccctttccctctacttcgcaatacaagaagaatgactaaaacaaagctaaatcttctatagatcttaatcattacccctagtcgataagaaccgaaagtaaatatctttgcattcgcctcatgaagcagctgatcattcaaccctttggcgcggctgattgttttaatccatgtttttacaatctggacacatcaacaacgaagatttatcaagagttcgttactaacatcgatgaaaactccataagcacaagttcttaggattcaaaagtactacaaaacctgatctagtatccccagaacctcctcccttctaacagcttcctccttgctctcgtacaatccaacatcttgcaagtgctgaacaaccaaataacacaactcaatatactatcaatcagtataaaactaagaagtatatcatgagtaaactttaaaactaaaacaataaagcattacaagaaaaaagcattaagatatcagtaaaaccttctcgagctctcttgtcttgatcacatcaaactccgttggtcctcccatagagataggttctgaaacgccaaaccgttgcccattttgctggacactagccatctatcctacttactttgctcttttcctctcttttttctcttttttcttaatatttcaatcagattctacgaaaataaaaataattgatctccgcgtgcttgttatttggtttctccgcgtgagaccaaatcctcgctggaaaacgaatcagccgcgtgcttgttatttggtttctccattgcagtcaaatcagattccttctccaacattcgttgagaatcttacgcttaatcttctcggtctgtttcccggcaataatcttgtcgggtcaccgtcgcaaagaatgagatagtaaagtaaacacaaacaagttgcaagaatatataatttagtacccaaagtttctgtatattttattttaggccccacacttttaaatttacctgaagtaccttgaattttaattcgtatacggtattattacactacacataaatgattcggtttcttaaccatgatattcgtatatttgtgcaagtttatcaatcggcataagttttgcgaaagcatttgtgactttgtataaccacaattttagttttgttgaagcatttgtgtaagcaattttggaacttatagtttgttgcggacgatgatgattttatataggtggtacgttgtagtggaaatgatgaaacttggagagttggacactgccgaagcttgtttgaggtaagctttttgccttatgtgattgaaaaatatgttttgctaataatgcatctgaataaaccccttaagcagttgttgtatctgtggtctcgaggaaagggtagtctgtatagcccactacaggatctgaagtgtagaacgttgatctatcgtacctattcaacggctcattgagttcgaatctcctcgtcagatccggattcgccaagaacggccgtccataagccacaagatcggttcttccctcttccaccgccttgttcccgtcttctctagaatatcctcctgctactatgaacgtacctttgaaggcttttcgcatgggcgtaagcgattccgtgcattcgaagattccttcaagggttttcattctaggttcaaccatgtgaccgtagacgactccatgccatgcttgttcatagcttgcaccaggtagagccctaatgcttctggattcgagtctcctgactccatgtaatctgcaaatggcgagagtctgattccaacacgatctgaaccgatctcgttcaccactgcttcgattacttcaagagcaaatctacagcggttctctaatgacccaccatattggtcacttctgtcattcactttgtctttcaggaactgatcgatcaggtaaccatgtgcgccgtgaacctccactccatcgaagcctgtacttgtatatatgtcaagtgtcttgatcatctaacatccaaaggggaaaagactttgcttaccagcttcgatcgcgtttcgtgcagcgattctaaagtcgttgacaatggcgggaagctcgtcgctccttaaccgccgtggaggcttaaactgacctccatacatgttcttgcacatcaatggcttgtctgtagaggagacgggtgcttccccatttggctggtctaaagaatggagaaaatttagtatacaagaacctaaagcatcaaaatctttttcgttttggtttacaacaaggaggaggaagctacagtttttagcaaaccttgatgaaaaactctgccaccatgccaaatctggcagaagaagataccgcctttcgaatgaaccgcatccacgatgggcttccatgcctccacttggtctctgttccataatccaggtatatccggatagcttgacaaacagagctcacatgttagagagcgaagctattggtgtattttgaactataagctaaaaatattataatccagcagagttatatataccccaatgatgtctcggagactacacaggattcggaaataagaagaccaccaggtgttgttctctgagtgtaatataatttggcattaggctgaggaatgttaccatacgatctcgatctagtcaatggcgccaaaacaaccctgatcacaattcaaagacaacattcaagcttcgtaccttccataagcaaaagaaaagattttgaagaaacccagaatggtgcttaaaagttaaaaggttgagttggggaattctatcaaacactatgtgtatgcataagagtcaaaacacatattcaaatccaaacggactaaatggaagattcagggggcaactataacagagactgagacatggagaaaggagtacctgtgagaaagattgaagggtcccatcttatagggcatgaggagagggatactctgtttagtctccatggaatccgtgtgtgctgtctatgtgattcttcaacaactgtggaaagatattatttatataaatgatacatacagatttggtgtattgactggtcaaagcggtgcccaagtcgtcgtcttcttattagacaaagccatcatatatgtttgcagttgtatctagctagaagcttgtgtgcttgagccaagacatgatttgagttagtatatcaaagtacagctataggttgttttcttgacgtgcatgcgatcctaatcattgttttcatttctgtaatgcgtatagaaaaaaaaggttgcatgtccacatgataatgccttgtgagtttttgacaattaggcagttctttccacactcacggtgagtcaaataaaagaaagaagacgtgcacaaatgcttaaggttagagttttctaatttgttttctcaaacaactttccatcttgactcattcaacacttctgtgatgtaacagatgatgtctcttcacacaaagacatttcaagtttagttattattcagcgaagaatgagattttcttttatcccttagcctttgccctatcttgataaggttatggaaattgctggtccccatgacaagtatgtgattggtgtaacacaccatccgtacagtgaagattgcaccatcgatgccaacttgtattctctattattatcatctctgtctcaccccatttcgatcgatgacatcactactcaaaagttatgtgtcatatatactaaacaaaggacactactttatgagaactcaattaccatgcataaaagaataaaggcatttcagagcctcaaatctttgtttctctatgtaactgttacattcataacagaacgtcatcgtattaaaaaacagttaacttactcaatgttctaataaactactatcttctaaaccttatcattactatcatcatcattatcatttttaacataaaaatacacaagaagaacaagtaaaggataacttacagtagtaagtgaccaattaacaataagctgtgacattaacggaaccttacgagtatccacttgccaagccactgcagctcctgcactctgcactcctttgtagaatccactatatctactcaaagtctgcgaatcatcagccaatgctcctatcaaccaataaaccatactctgatacattgcatctaacaatccatagctcatatataacacgaatggtcccgcaaactctatcccggaatctttaaaatcaagtttcttttccggtagtttgtccaacgagtaaccgtgctgattcgctaacccgcccgcccatataatggttccgattaccgcgactagtgatattccggtgaatcctctagctcgccggcttttgaagctgaagtccatcacgtaaccaatggcgatggatccagccatttgagctccccagtagaagacattgttgaatcctctggttcttaagttaaagaggagtccattcacattgttgaattgatagctgtagaagaaattgctagcccaagccgcggggacgatgaggagcattttccgatcgaggaatagccgtagcacggcggctgcttcagttgacggacgggagtatttcacggcagagcatctagatccgtcgttacggatcacggaggtcgccgggaggataccgaaagagagaagaacgccggcgaacatgaaacacatgaacgctatgtacgtcgagtcgttgaccgatgcggcggagctacgttggtagttgaggataaacgggattaatccaccgataacgccgccgagattgaagatactccagaacaacgctatgtaagtgcctttccgatgcggcggagggtatgacgtcatcacagctccttctccggcccagagaagtcccgcgccgcaaccgagtaaagctccggcgactatcgcgaaggcttggtggtggtgatggttgtagtagaggaaagatccggcgtagagtacgtaagtcgaacatccagcggctaacgtgagccgtggaccgaggacgttgtaaaacccgccgcctaaaaggccgaaaacggtgaaagcggtgtaaacggcggtgttagcgttgttagcagcggttggatctacttgaccaccgcctcccatgccggagagagcgttgaacattcctggacaacagaaacaaacgaatcccattaagctcacttgagctagaggagaattaaatcgccatttgttctccggtgatttattctcctctcctccgccgtgtttctccgccgtagtttttccctcgtctctcacattcatgatcggataaaatggttaaagatgagaattttaatattcttctcgtaaactcaaaacagggctcggatctgtgactgtttgtgatccgtctgttacgattctttctttagtagtagcggacattttcatgggaataaatattaactaaaacttaattttctaacaaaacaaaattgatgctctctactggtttaatctaatcctagtaaactgtaataactagagcgaaaagaacatgtcaatgaatgttatctgttacgttctttctacgaaaataaaagtcaaacgtcattatttttagaaaaacaatagctacttcttcacgttgacactgacaaccaaaaaactagtactccctctcttgtttagaaaaacataaaagaaaacatgttataaatatataatttttttgtattttacaattttctgatttttaaattaaaaatgtttaattatttttcttaaaactaacaattcattaataataaccaataaatattacataaaaaacatattaaaaaaaatcaatcttttagaaacaattttttcttctaaaaaaatcaatcatttaggaacaaagaacgtaatatactattatatttttatataattaattaatatcgacctagttactactaaatacttttatattaaatgagtcaaaactataatattaaaatagttcaaatctataaatatcaaaaatagtaacagaaacaaatcc

SEQ ID NO: 36225 - DNA, 2633 bp, Arabidopsis thaliana landsberg
ttatgacagttgagtaatgaaaggttagatggtgacgttcctgcaatagtgttggtttatcagcaagcgaacaaggaggtaatgacaattattctctctgctattttacagataagagaatatgatcatcttattcttttttgttaggttgctatcatttgtaaccatcaacgtactgtctcgaaatctcacggagcacaagtggagaagctggctgtgaaaatagaagaactaagggtataacataagcaaatcctagttaaatatgatcaagatacaatttcaactttctcactcccataatctttgtacttctctgcaggagcaaataaaagagctgaatattgatctcgacagggctaagaaaggaagaacaccgttaatgggatctgatggaaagagaaagaggaacttaacacctgaagcgtaatatctaaacctctcttcatatacattatttatcgcataagcatctcctttaaaacaactccctctttggaaaaacagattggagaagaagataatgcaaacgcaaggtaagatcgagaagatggaaagagatatgcaaacaaaagaagatatgaaaactgtcgcattgggcacatctaagatcaactacatggatcctaggatcactgttgcgtggtgcaaacgacatgatgtccccattgagaaggtaatatgtaaagagcttcaacaaagtaacagaattgcaaacacttgaaatttacttgtgttttgctattgcagatatttaacaagtctcttctggctaagttcgcttgggcaatggatgttgatcctgagttcagattctgttcaagtaccgatgaataaatacatgttcgttgaggccagtttcacctaactaccattcaccatacatttacagagatatagagagaaagagttaaaaagagaagaagaatgatagcaagaccctgtaaaagaggtttcttctctcttattagtaaaccaaagactaatctatggatgttttatagaaaaacagttacaattttttactccaataaataaataattcaggttaataatattaagaattatacataaaatggtagtacctttctttaatctatatactatggatgattaataagtttatgcattaagtaatgaaaatttttaagttttttttgtgacaaaattcattttaaccttttttagtacttgaaataactttaataatttacaaattaactttcaaatggttaaaagttttgatgacacattgtttcgtatatctaaatagtatctaaatgctaaattatccgttgatacgtaattttatcccataagaatgtggatatccaaatgctaaattatctatcgacacgtaaatttttctgataaaaaatcttaagagaatccaaacgttaaattatttgatgatacatcggataaaaaattggatttctttttatttctgattttatcccctattttatttacttaaatatgcttcacaatttagtaaattaaccgatgagtcaatgtttaatcaattttttcatcttaaacccaaaaattaaggggattttggcaattaaaaagtttacggtaataagagtgaaaaaaattgtctatggcggtaagattaaacgatttggcgcgactcaatacgacgtcgaaacgaaaacaaaaccctcaaggggtgaactctctaatctaaagagagtctccttatgccttagtctcctcgtccttaaaacgatagaaaccatcgaagcagaagagaagagagaacagagagacggaggagagagataggcttcgctagacaatttcttcaatctctggaagaaggtagcttcttcaatccaacgtcaaatctctgaaatttgattgtattaagcttaatttgcatcattacccagttatagcacaaattagggtttcacatacgtaattggggatttgatatttcaactacactggattcttcaaatgttggttctttgctttaagattctctatttatgaatctcagtacttcattctctgtagtgtaatcattttgttgcttgtagttgtaaacttgtaatggtgtttgtttgcctttccttgggaaactctgacatttctttgtggtttgttttgtgtcttggtcagaagttggtctgagccttcatcaacgttgttctttcgggaatgggcactgaaacagtttcaaaacctgtgatggataatgggtctggagacagtgatgatgacaagcctttagcgttcaagaggaataatacagtggcttctaattcgaatcaatctaaatccaattcccagagaagcaaggcagttcctaccaccaaggtatcacctatgagatcacctgtgactagcccaaatggaaccactccttcgaataaaacttctatagtgaaatcctctatgccatcatcttcttctaaggcttcaccagcaaagtcaccattgcggaatgatatgccctctactgttaaggataggagccagttacagaaagatcagtctgaatgtaaaattgagcatgaggattctgaggatgatagacctttaagttccatactatctggaaataaagggccaacctcttcgcggcaggtttcttcaccgcagccagagaaaaagaataa

SEQ ID NO: 36226 - DNA, 2582 bp, Arabidopsis thaliana landsberg
  unsure (1)..(2582): unsure at all n locations
gatatccatgagcaaagtttgtagttccatctatgcataaagatattaagagactattactaagaatctcagagattccacacggacacatgaaaagaaagcaatgagatttgtagagagagctaaacttagaggatcaatgcaccagaggtaatcagaagacgaatcgccgatgatacctccttcttcaccaagaataagatgatcactaaaattcttcttcactacttccaaaatagcagcctcgcttgctttatcagtactgcaaattcatcaaaagtactaaaactttaatagcttcagccaatcaagtcaacatgaacatagttaaaacctcaagctaacaactttaaaaggtgaagaagtccttactcagttagtaagtcactgagacctttataagtaatattccttggcttatttacagcttccataaccacctaacgaaccagatgattcaattcaagttagttttgttattattctccttgtgcagttgtgccctatgaacccaagaacttgattctagtaccattgaacacaatttcaagtctcatcaagagtttttgtttccaataaacataaattcagatattgtattctacagacatgaaatttcgaacctcagcgccggttttagcggcgagttcaacgacttcaaggaggtgtgccggagatatagttccggtggttttagcgccgattctgggatatcgcgtctgatcagaaacctcagacagaacagctttggtttgaagtctcgttgtggacttgaagctattagacaaaatcctcgtacaccgatatcggaaagttctgttcactgtccggcctgaaaatgggttttgcagcggaagagatgatctgggtaagtgagagattctcaatgacatgtttccagagaatattagagaccttcccattgttggtgtcgccggagaattttcgaatttttgttgttgttcggtttttggtttatatgaacgcggccaagtgaacggatggtggacatgagagagtccaaaaagctgatagaacttaaaattgaaattaatgagaacattgaaccaaaatcaggttaacaaataaccagagataaccggtctctgtagtatactcaaatggttagtttttgccgatggtggtgccctaaactcgaaaaaaagatggcggcgtttttgcaaactaacatccgtctggagatcataccgggaagatacagttctctcaccgatcataagtttcgtgcgccgtatcgaattaggtgcgccgccgcttcaccggtgaaaaaacggtataacatcactctgcttcccggcgatggtatcggtccagaagttatatctgttgctaagaatgtgcttcagaaagctggatttctccaaggactagagtttgatttccaggagatgcctttcggcggagcagctttggatttggtcggagttccattgccggaggaaactttcacggctgcaaaactatctgatgccattcttcttggagctattggagggtatgtgtgtgagtgctgtttctttagcaatctgcttccaaatttattctgatcttgaggtttggatgattattgttcaggtacaaatgggacaagaatgagaaacatctgagacctgagatggctctgttttaccttcgaagagatctcaaagtctttgctaatttgagacctgctacagttttgccacaggtatcttcggttttgatttgcttagcacttgaattttgcttctagttgtaaataaactcaaatgtttctgttttgcttgttcagctagttgatgcttccacactgaagaaagaagtagcagaaggtgttgatatgatgattgttagggagctcacaggaggtatttactttggagagccaagaggcattacgatcaatgaaaatggcgaagaagtcggcgttagtacagagatctacgctgctcacgaggtaataacccttcacactgtgctctgtgacaatattggcaatgtatggatattaatgcattgatttatgttcttcagattgacagaattgctcgtgtagcattcgagactgctaggaaaaggcgtggcaaactttgttctgttgacaaagccaatgtgttggatgtacgttctgttagttcactgaattgtttttccacttttgtgtgttatacgaaatgcaaatttctttgtttcatgtaggcatcaatattgtggaggaaaagagtaacagctttagcctctgaatatccagatgttgaactatcacatatgtatgtcgataatgctgcaatgcagcttattcgtgacccgaaacaggtgcttctcgcacatatatcaaacttagtcgttnnnnnnnnnnnnnnnnnnnnnnnnnnagtactcacggtgtttttaaaacaatgcagtttgacacaatcgttaccaataacatttttggtgatatattgtctgatgaagcttcaatgatcactggaagcattggaatgcttccatctgctagtctcggtgaatcggtaaacaaaataaactaacatctttcaaggctcctcctgtttataaactaatgcgaaatgttaacttgt

SEQ ID NO: 36227 - DNA, 1706 bp, Arabidopsis thaliana landsberg
  unsure (1)..(1706): unsure at all n locations
agtttttctcagcgtgtgggagcgtgcagtcatgggagcgggctcttatgcgactatccacaaccgcatgatgtgtcactcaactgaacaataccagaagttgagtcagtactctcccccacccgatgagatgttctttgatgggccaaagagacgtgacaagcatctctttccaacggcgttatagttataacccaagtatcggaatctgtctcaaactcttcaagcttttccatgacatgttccgtgtacacatcgccgtgcttaagagaaccacggctaagcttaaaagactcagcaaaagcgtctttcagctgaccaaacagaagcatcacaccccctgccattgcaactttccgaaatcttttacaaacagcnnnnnnnnnnnnnnnnnnnnnnnnnatgattccgtatctccgaccatcatcatgagccagagcccactgatgtggagggaattggtctaaccatttccaagcttctggattcctctctttgatctccttcatgtaggaatcaaactcttccttctgacttgacgacccagcctcatccacaagaaaatgcatgttgtagtcgaagcctggagaaacgctacatagtttggagcacagatgatacagacagaacctgtgataagcccagggttctttccactgagatcctggttcgttaataacagcgagtatatcggggtcaggactggagatgaggcaaatgccttgcctctgtgttaccttctctctgattctagtgagaaaccaacgccaactatcaacagatacttctttagtaaccgcaaaggcaagaggaaaatattgattggttgcatcaaacgccgaggcaatcatcaacttcattttgtatttacctcccaagtttttggtgtccacaacaatcagaggtctacaatgttggaacccttggatagactgtgaaaatgcccaaaacaaaccgcgaaaggaggcgtgttcaggatcatgagtcaaagaatcatattgccagtctacaagaaggccattagaagagtgaagcacagacattaacttgggtatgagtctgaaactctgatcccaatctccaaagaatcttttgatagctttcactttcgcatcctccacaagtccttctgaacaatgctccaccacttgatcaagcgcaaagccaaattttttttcccaccatttatccaactctgcagttgagagagtgggctgtaccctgaccacacgctcaatctgaaatggtatacactcagcatcaaaatcatttagatgttcagggtaacaatcatgtggaccactacactcggttatctcaaaaagaccgtcttcttctcttctagaagcacaaattgaccacttgcagtgccatctttcacattcaaccacatacacgtccttctccgtctctcttagtaaacatttttgccgcctcttaatcgaacaccagtccactgccttcttcatctcagctaaatctttaaaacacaatcccacacgcattgtatcaccttcaagccacaaaccagacacaagagtcggtgttgatcctgaccctgaacctgaatttgtatcccccacttcttgttgcgtactcttctgtcttttccctaccacttggtgtctgctcttctgtcttttctggggattcattcccattgggcataaggaccaaggagcaggaggaggatcattaggcttttg

SEQ ID NO: 36228 - DNA, 1323 bp, Arabidopsis thaliana landsberg
ttactattattttttcttatggtcaaaatcaagaattattttttatgaactaaaaatcccataaggaaaatgtttaacgtaaaaaaaaaatctttcttacagattgatcactttaaaaaggttgacagaaagttgaaaagaaaaataagttaataaacaaaaaaaaagaaagtggagagaattcaaaaaaaaaaaaaaaactagcattcaagaagatagtctttacaagttgacttgttgggaccaagtcccttgcacctactacattgcagctgccgcttcaatacttttttcggaggcgttttcttcttcggcggcctccctggcggtctccttgttggtggaggcgttaccgtcactgccgaaccccctgaactctctcgacacatctctccttctaatagtggaaccggatttatcgactgcgcatacgttgacctgtagtacgcaacagtgaaatatttcgaacagtaatcatacggattacgtccgtaatagtttataaccgccactgcgtggtgacacggcaaacctgttaactgccaccctttgcaactacagtcacactcagccatgttcacgagctcatacgtctctccacggacttggaacaagttgttatctgctgatggtgctacgtgaaccgtttgcgctcttagactctccttctctagctttacttccatggagggagtcaaatttccattggcttcgttggcactaatccgtctcacatggatcaatcccattatttttccacggatcacatcaaccatttgagttattggtagatcgttggcgtcggaagcccagctaaagaacggttcgcctgagtgtgaagtcatgtggttgtacctagcaccacggaagtaagcgttcgcccaatgatcaggctggcttttttgcacaatccaatcataagcttcaggtgagaggcctttgatgttctcaacatgcctctcgaatgaatctgctctcggagcgtaagctgcagagtaaaagtcgtcaacgattaaccgcttgatctcatgagagaatggtcctttcaagtctttgatgagctcgtcagtcaaataccgcaaacaatacgcgtgaaacgacttctcaaacacttttgggatcgattcctgcagattcttctgtcgatcagcaacgaaagttatatagcaaggcgtggacagcagagatctcagctgaagcaagaaccattcccagttatcatccgtctccgcatcaaccactgcaaaagccagaggaaacacttcgtcgtccccatccacagaagtcgcagctaataaagtcccctgatactttgatttcatc

SEQ ID NO: 36229 - DNA, 772 bp, Arabidopsis thaliana landsberg
  unsure (1)..(772): unsure at all n locations
aattcacttttatcatatgtctacagtgttgaaacccttcaagcgactggggaaactttcaaagggctccagcgaatgatgcaaattcaggattagggaaaagctcatattgcagtccacaagtagcccattagatgagtgaaatgcagccaattagtttaggcaatactctgaaactctgatctttgattacttcctgttctgctgnnnnnnnnnnnnnnnnnnnnnnnatgtcaccaaacttttcaactctgctgttagagtgggttgtaccctgatcagacactcaatctcttctgctgcaaattacaagttgaagttttccggcttaatagaacaacaagtatgtggaccaactacacttagttatcttaacaagtccatattcttctattcaatctgcccgacgcgaccaattgcatttccatctgatgcatttaaacgtatactcgtccttctcaatctcttgtactacacacttttgctgccctctaatggaacaccagtccaccgccttcttcagctcatccctatctttagacttgtaaagatctacgtaactcaaaactgaagaatttcagatcgggtgtggcagagaagcttggattttgcaagaacttcaactaatttcgcctgtcgctgaggacttctccggtgacaaagccacttgtcaccgatgacgaagacaccacctaactttttcatatgccataaatggcacacctattcgaacataaataaaataaagtacaattgggccgaaagaagaaag

SEQ ID NO: 36230 - DNA, 1854 bp, Arabidopsis thaliana landsberg
gtcttatcgacgtcgtctgccacaagcagaaccttttgcttcttgagactttgtttgctagagttttctccttgaatattatccagaaactctttgtgtagatggctttcaaagtagttaccgtgacaaatccgtttcacgtttccaagaaaacaatggctatcaaagtgttgacaggatgtctgataaacatatttagctagagccgatctacaacttcctcctcttgcccaaatcccaaccattctcttacctttgttggaattcaaatccatcaatcggttaagttcgttcatgtgtttatcaatcccaactaggttcctcccattgcttattcttgtaactatcatcagctcttttgatatcttgtcagcgattacgtccaccagcttcgagtcatcttccctacatagacaaaaaaaataaaaaataatcgaaacttagcatctcttcaaatcatatctaacaataaaaattcaatctattttttttcctaaaccggaagactaatcttagtgtccggggaaaccatcaaaccaggtggcgggaattatcttccttttaccactggaccaaggcgacttggttaaaattcaattcaatctttatcaccaagttaagaaatttcaccctgaacaatcgccggagatactagccaaactggtcaatgctcgtctccacgacgcaactttctcatgatcttcttctctagcctcgtgcttcttaaactgttcagcgacatctccgatctgcctcctcaaatgacaaggatccacgccgtagaagataggcatcacggtgatggaacccttgttttcgaaatccataatcttcacaagctcttcgagacaccaacgagacgcagcgtaattcacggagaccacaacgacggcgaatctcgacccttcgatggcacgtattagctccggcgaaatcctccggccattcttcaactccttgtcgtctttaaaggttcgaatgtttcttcgaatcagttctctgtagaggaaactgatgaagttgcggcgagtgtcgagtcctctgaaacttagaaagacatcgtacttagtcgcagtaggagaagacattttgatttttgattctctctattgagaacttaactatgatgagtaatagaaataaagaactcaaggatatttatagaccactagagagtagttgaactaaataaaacatgtgcattggttagagactcccatagtcttcctgctaagtgtgtgtttcctggcattttctatttttttctgtcaggttctgttttactaaactactcagaaagaggggaagagaaaagatgggccgccaaagtaagaaaatgatgagcatgataataataaaatactactaacgaacaaaaattatcatcttacttttgtggtgtgtattggcatttactggttttgattatctgatcaaacgaatggttgaaactgaaggacgaaaaaagatcatgagattcagttcttgtcggctggttttttgttgatcaacccaatttctttcatatctttattcgtttgcatcaagtttattaagcttgactcacattttccaataaatgatttagtcacgtttgtctgtgattgaaatcttccacgtacccaaaaagcataaatcagaaaagcaggttaaaagagtttctcattaagggaaaaaagcgagaaacttgtcagtggctttgaactgtagtagtgtattactattattggaggatcgtcatgtaaaaagtttaaaagcttttcttctctgttttagacatatgtagattccaactttggaaagttagcgactttgtgtctcctgtattaatttttaaatttattgggcattgtc

SEQ ID NO: 36231 - DNA, 1776 bp, Arabidopsis thaliana landsberg
  unsure (1)..(1776): unsure at all n locations
accaaaaggggttaaaggattacttgtgggattcaacatttatttcaaggttagtgacatggatacattagtgaagggagattcataaagatttcaaactataattgaactttatgttgatttaatggcgcaagcaagctctctcattttacttttcttattcttggtaacaataattgatgattttgggaaatagtcggcgatgagatgacttaatatatataagtgtaaaatgacatttttctatgaagcacgtatagtgataattaatcaaagcacaacttgtacgcaacaatttatctttactagctaggaactctgttattcatgtaacctcactatgattaattatgtggattatgtatttttttcttttacaaatatggatccttatgataatttggaaaagccgtgcatgtgtggctaaccatttacgttatctttttttcacgataataaaacgaagttgtttggtatgtgaacaaagaaatcaatttcaaaattatttttaaaaagtcaatttcttccattgttttcacaataagagaactaaagttatttggtatgtgatgttctatataaaaaaaaaaattccatcgtcgaaactaagaatttgttttctatatatcttntanaatgtaataaatattaggtaatattatgtttttctattgtatttttttttcaataacctttactattttaaatctatctgcaaatattattttatttgaaaggtaaaaattttggtttagtatttgtcatatgatatctgattatggttttcaggagccgattagatgtcatttttagtcattggttttagctttcatcaacgcttttgaaaattgaactcaaattattttggcctaacttatgtcattcaactaaaagacattacaataactgttgtctaaagactaaagaaagatcttaaatttaagaaagaagatactatttgtcaaaagaggactaaaatgctaaatttcggaaagaaaatgaaggaaggtggtgggaagtgtgtgtgatttaacttgatattgggaaaagcacgtaataacaactaagttaggagaaaagtaacaaaaaaaaaaaaagataaacgcggacacacacagctaacacgcacatcacatcactacaaagaggatgcagtgtcatgaattgcgtttgcttctaaaatctgtaaccgataatccatcttgtttcagaaaaataaatgtattcgttcgccggcttgaattcgacgcgataaggccgaggaaagacatcttgctagaaacggctctttgtgtactatatagtcttaattttggtggagtaggtcggtgtgaataaggaaatataaaagcctattgggtcaagtaaggcccaataatagattactgtttatataaaatattactgtttatataagatattagactaaactttagtctaatcagattataacattttttttatttttatctcactcttcttcctcttcacctgtaatctctccaaaatcagaaaaatgacttcttcagtactaaccccaagcttaaagcttttagctatgacgaattcttcctcttcgacccttttttgtattccttctatcttcaacatctcgtcctctgaatctcaccgcttcaatttttccttatcttcacgacccgttaatctcacactctctctcaaatccaaaactcttcgtaactcatctnctgttggtactttcgtttccaaacttcgaatnggttgaggaagagaggtgaggatggagcatcggag

SEQ ID NO: 36232 - DNA, 2364 bp, Arabidopsis thaliana landsberg
ggttaggagacggagtttgacttcgaacttccatagagtgttttaagagagaccgattcggtcggatttggaggaagggtttttgtgttttgggtctatgaggtggtggagagaggaggcggcggaggaggaagatggtgcggtggttgtggtggtggatggttgagatttgcgggattgttcaagctcttcacggtcttcgattttgagttggatttttgttggttttcttctcaacatttcttcgatacaaagtgatctctgtatcatcctcatgcttttgttcttgtgattggagtaacctaggcccatatatataaggtccgttaaatagttggcccatttctggcttgctggacttaaattctctgattgtggattctggattgtggattgtggttgtggcaacaggtttgtttaccgagttttatgttctttggtggatctagggtagattgtgaaaatgataaaaacaaatcacgatctgttcatcaaccacaacaatcgatcaaacaacccaaaaacgcttccgattaatatgaaaaagataacaatgtgatccaatgttcataaaacaggggaatcactagatccaccttgcaagagcaatgttcttcacagaggatgaattatattactcaaaacctagaaacctcaaagagggaagaacaactaacttcaacaattattcacgactaaaataaaaaaaaataaaaaaatccaattctgatcttcagcttcctttaaacccaaccatctttgataacttcatctcagccgttgattcattcttataatcaccactgtccacgtgtctactcttcttagccctcctttcctatatcaaatttttcctttccaaaaaaccatgcccacatgggggatatgaagctattgctgcaacaaagcatacaaaccgcccaagcagtctcagcatcatctatatttgatcacttaactagaaccacaacaaactttggacctcttcataagctttgtggttgtgtatcatagtccttgcagcttctttccaagagagattgtcacgtttcttaaccctcatctttctccatttctttttgttttccaattaagtaacgatcagaacaagcggttgggtagtcttcttctttctttttcttagttttctgaaattgaacatccaagacttaggacatttcatgtgtttcttcgtactctgcaatctaataaagagatccgttgaatgctgaagcaacacattcacaactacaccatcgaaaacatgtagttgttcatagtaagcagccacttctaactcatggtcaatattttgcgaacaccgagccttccaacgataccacacatggtaataaaccaataacctactgcttaagggctgcttccatttgtcactatgttcccaaacaaaatattcataacgcactataggacaccagctcttccataaccattgtaacaagtgatgtttcttcaatctcagcttagacagtctccccgtctccactaattcaccctgtatcagtctgatttggtcatgaaagttccaagatttaccacacttcaatttgcattccaccgaactgcttttaaatttaaatttccaggatttgggacacttcagtttctgcatcttcctttgcaagtcgtatcttcttaaaagagcttgtgatgcatgtttgatctgtacaaacaatctcatattcatgttcccatttttaaaccactctccaacttcaaacttgtacttagaactcaactcaatgtgtagtctcttcataccttctttcacagatttgtacttaaaccaccaccgcttggaaaacttggtctttttgtttcttatgagtttgtgaataaccaaactggtttgcaacatctgttcctttaccattataatctatcatacacagattgttctccatgacttggatcactcttcttatttctgaatttgaacatccaagatttgaccctttttgttttcttcttcgttcatgttttttctttatttcgaaacgtcctaccaaactcataagcttcataaacttctccaacaacgattaagctcacagaattcttgacatagacattatcacttccaccaagcaactttaccttttttgttgttccaagcgtatcaaacctacgaccacacaaatttgggaaggataacgcatgattgagtagtctccatagtctatcgttctcttgtttatatttaaacatccaagacttcaagccttttctccttttcttcaatttcgatctatctttagcctgatatcttttaccaaacagttggcgtgtacaacaatgttttgtgctacttaacactttcttactcctctcaacatcaacatc

SEQ ID NO: 36233 - DNA, 2130 bp, Arabidopsis thaliana landsberg
gaaagccaagattcaagttggtgttggttcctaaattatatcaacaaaacaattcttcttgttcgcatctttgagtctcctcttccacttctgaaacgcgttgactttggcttatgtcggtatttgggccaaacaattagtgttagcccatctttgtaataatcagtttgggccttcggttttagcccttgaagttttctttttggtattttttgggcttagttttctttttcttttagccttgttgtatgattgtttattttaccaaactcaaatatttgttttaatggtaaacaaacaaaaaaaaaaacaagatttctttctctatttggacataaaaacaaaaagtggaatagaagagcaacataacatttttaactaccaaaaacaaaacaacaaaagcaaactaaatttttacaattctcaaattatccttttgagtattatttttttttgttgctaaagaacatgtcaaccacttatattttctggtaggttttagtttcacacgtttttataataaaacagccgtacttcgaagatttggtgacagaattgattggatttttttctcaataataatagttattacctttagtcaaacgaatagtagtaatttttattttatgggattcttgttctgtcattgaccttttttcgtaggcagactaaaattgctaactattttgtttggaatcaccgtaccgaatctgtaattccattattagaacagaggttagtgaacgtggtagccatttggcccatttccctgatatattatcttaaataaccttttttttaaaacaaaatcttaacttttttttaccacaaataaggtatctctccaaacattcaaattcaaaattcaacagtgttataaaaaaaaaaaaaagattgatcaattgtttcatttttcccagctggttgaaatatgcatcttctaattttgttacgtgtgcacatagtagaaattaaaaagaaaaaaaaaagttgagctaattgcacatgtatagttcgtcatttacaagaaagcaaattgaaaagaggaaagaattggtaaacataacaacaatgaatcaaatatacgacggaattgatgaaatgagttggcaattgatcaaagccacgacttcttcaaacattcttctttactaactttctcatagtagtctgtagtcgtcatcgtcctcctcaccccatagcatctctatataactcccctcaccattttactcctcttcttcatctctctctgtctctttatctatcttcgtacattatatataatgggatcaaccgtggccgccgctctcctcctcttcctagcggcagtccctgccgtctttgccgcaactttcaaggtcggcgatatttctggctggaccagtaatcttgattacacggtttggctcactggaaagactttcagagtcggtgacactctaggtaaataaaaatgcttgattttacactacatgtagattacttgtttcgcaagaatcatctttttcccctctaacaagctgatgattttattcttacagagttcgtatatgttctttcacactcggtgtccgtggtggataaagctggctacgataactgcgacagtagcggagccacacagaactttgccgatggagacactaagatcgatcttaccacagttggaacaatgcacttcctttgccctacttttggtcactgcgccaacggcatgaaactcgccgttcctgtcctcgccgccgctccatctccttcgactccttcttcgcctccctccactccttcgactccttcttccccgccctccactccgtctaccccttcttcgcccccctcccctccttcgcctccttctccatcgctcccccctagctctctgcctccatctgcatctccgccgaccaatggcacgccggattcagagacattgacgcctccgccagctccattgccgccttcgctgtctccaaacgcggcatctaagggagtcatgagctatggaataattggagtcacgatgatattgatgtacgctgttatgacctaaataacagggtggaaacagagcattgttttgctccatgtcttttttggtcggcggccttggaaatactacaccactac

SEQ ID NO: 36234 - DNA, 4313 bp, Arabidopsis thaliana landsberg
gtcccatccctaccttcttctcctccacctctgcatctgttcctcctcctcggccatcgccttcaccaccaatcttagtacgttctcctccgccctcagtgcgtccaattcaatctcctcctcctccgccttcagaccgtcccactcaatctcctcctcctccttctcctccttcaccaccttcagagcgtcctactcaatctcctccttcgccaccttcagaacgtcctactcaatctcctccgcctccttctcctccttcaccgccttcagaccgtccctctcaatctcctcctccaccaccagaggatactaaaccccaacctcccaggagaagtccaaattctccaccaccaacattctcttctcctccacgttctcctcctgaaatacttgtcccaggttctaacaatccatctcaaaacaaccctactcttagacctcctcttgatgctccaaattctactaataatagtggaattggtactggtgctgttgttggtatcagtgtagcagtagcacttgtggtcttcactctttttggtatctttgtctggtgcttgaggaaacgagaaaaacgcctttcagctgttagtggtggcgatgttacaccatcaccaatgagctctaccgcaagatcaggtatactaggctatgtaaaagttgttacttgtgtttgcgtttcttgattctcattacattttgatattcttatgtacagattcagcattttttaggatgcagtcatctgcacctgttggagcaagcaagcgttcgggcagttatcaatcacaatccggtggcttaggcaattcgaaagcattgttttcctatgaagaacttgtgaaggcaacaaatggtttttcacaagaaaatctattaggtgaaggtggatttggttgtgtatataaagggatattacctgatgggagagtagttgctgtgaaacaactaaagatcggtggaggacaaggtgacagggagtttaaagccgaagttgaaactcttagcagaattcatcaccgccatttggtttcaatcgtgggacattgtatctctggtgaccgtagattgcttatctatgattatgtttctaacaatgacctttacttccaccttcatggtaaagaaaaagcatctccaagattacattttatatatatacacacaccactgggactgacactatctacatgtctcttaaacaggagaaaaatctgttctagactgggcaacacgtgttaaaattgcggctggggcagctcgtggactagcttatcttcatgaagattgtaagttgttgcttaaccactagtttaaccttttcaatcaaatgctagtctctaaactcttgtctattatcaggtcatccgcgtatcattcacagggacatcaagtcgtctaacattcttttagaggacaactttgatgctcgggtacaacattagtcttgctattttagatttttttcaaggtttcagttaaatggtgacttgaacagtatttgatctctcattttttttgtaggtttctgactttggccttgcaagattagctcttgattgtaacactcatatcaccacacgggtcatcggaacatttgggtaggtgcttgccttgtttgattagttagtcgcatattttggcatctagttgatatttttcattcatctactttagctatatggctcctgaatatgcatcaagtggaaaattaacagagaaatcagatgtattctcctttggggttgttctgctggagttaatcactggacgtaaaccggtggatacatcgcaaccactgggagatgagagccttgttgaatgggtacgctcactatttgaacctttcttaacatgtaaacctgtttcttgaaatcctcttgacctttgcattatttgtttttcaggcccggcctttgataagtcatgccatagaaaccgaggaatttgattctttagcagatcctaagcttggaggaaactatgtagaatctgaaatgtttagaatgattgaagcagcaggagcctgcgtgcggcatttagctaccaagagacctcggatgggacaagtaaaaacattttcttttcttctttccttgataagagtttatttacttaaaacttgcaggaatcttgaaatatattttgcagattctgagagcttttgaaagtttagctgcggaagaccttactaacggaatgagactaggcgaaagcgaggtctttaactcagctcaacagtcagcagagatcagattgtttagaagaatggcatttggtagccaaaattacagtacagattttttctcgcatagtagttacaatagcagagacgcaaacgtgtaaatatcatacacagattgttctttttcttctctcgccattagtggcaacaaaccattaagaaatatcccagttgtgtctcaaaaattcaccatctttcgcgactaaaaccagcacatcaaagctgagccttctcagagtgattgaaacagtaagaatctccctctggttttgccttctcttgatttgtgctcatgttttgtttccttattatggtttaaactaaagacactactaatacaatatgtagaaacagaggattacagaggagctagtggttgaacagaaagatgagaaaaagggatatagatgggtacaagagaggcttcgtttcttacatgaaattacttttgtatctattttttctattcttatacgttcaagtttgcacattatgtgacattacttatataataaatcaataaaaatcaatttgtctcactgtgtcattgtgtattcatgtggctcagttttttagttgcagaaagactgatttttaccattgtgagttaccatgttggagagtagtagaatcaaagaaaacgaaagattgttagttgttttgacgtccaagcttcctaaaacaatgcttctaaaagcatcttaaatcccatgtgatcctataatatgtgtaaaaacaaacacatgggtgttgctttgcgttgcatttgttgataccaatattggcaaggaacatattcctttgacacaatctgatgtcacctcttaacttctgttttctctatctctttcctttatatctttgttgttaccttaacagttttttttttttaatgcatctttgagtaataatggaagaagattgtggtgcttttgcagcagattgtgttatcttctgttgctgctgcgagtgttttatcttacaagtctttatctttattttctttaagattccttgtaaactttctcagaagatgaagaagtttgtgactagaaggcttggacgaaagaagagaagagacacggaaatcgtcctaccgacaaaggacgatgattgcagagaggagcatgggtctgaagttagttgcatggaagacgtagaggagatgttgcaggaactttccatgaaaggagagtttgtgtttgggagtttctggagacaaggagactctgcagcaaacgattttgatttcggaaactcacaatacgaaatagctaattacaaagatcatcgttccttgtcattgctcattacacaagatgtcttattagagcgttaagaggaccgaaccaaaaggggtatttaacttccctatctatgcattctccatgttctctaagattgagaatgacagtaaaaaagtaaaggactaatggcaatcttgaaagagcaaaagaagagaaaagacaattggaaatctctctactgagactccaaggtataatcttcagctgttctgtaaacacaatttactggacataactgtaagatcttgtttcgtaaccgggcaaggccgcaagaatcagaatgtacaacaactggttggatagcctttatcgatccagtctgaagcaagtaagcttctagcttccatatattcttggtgctatttacgttctgcgagtcaagttgatgtttggttagttttcgttgtcatgatgcaggctcagatatcctcactgatctctttttagcttctaatctggcagtgaacccaactgttgtaggccttattgatctttgccttactatatcacagtactcagggtcattacactgaccctcgtaccttagccattgtatcatcccatggtacattgggaaaaaactcatctgaagtgcagagtagatgaagtatggcatcaacgtcgctacaactacaaagagagtaatgagccagtaagataatgaaggcgcgagagcttcaacaaagactttatatgcaccggttgatattcttgatggaagttctccgtacaccgtgatgaaaaagtaccaaacgaca

SEQ ID NO: 36235 - DNA, 5741 bp, Arabidopsis thaliana landsberg
  unsure (1)..(5741): unsure at all n locations
tttcacaaaacaaaggttgaattttaatttgcttctcaatattattatataaagtacttatttaatgaatatctgatgatagtctgatagaccttattaaaactttcacaaataaggaaaattgcatgtaatcagtgtaaaaagattttcttattgcaccaaaagaaagcaattctagagatggtaacaaattttcaataaacaattttcttctaatatgctttctcaaaaaaaaaaaaaaaaacgtggaccaagagacaatttaaataacacatttgttaaaactacaccagctcaaacaaatataagccttaaacaattccatccatttcaatataaatacgtgagtttactaaacttctctacatcaaaatgagttgtcctgcaatgaaccaaccaagacataatcttagaaattttatcttactgtccggcaattgaaaaattcagatttctaaacaaagattactataaacgaatgtcagaatcttatgaacctgaatctctttagaaccaattctatctttggagtttttctccaatatcaaggatctcattcaactttttattctacttatgtcctcagttctgagaacagtcatcataagtctaaagtctcgctcgatttattaccgttagcgaaggtaaagatcgaagtttgtgacccaagtcatgggattttgctttgtgttgatcctaagtgcgatggaagaacaacgtatattgttcgagtgggatgtattgaaattaacctttattgtatgctatttatgatatggtaaaaatagatttgaatattttcggtgttttattgatgaatttgtgtatactaggattttgtgatcagtaaagtttagttttacaatattattttttgtaaaagattgaagtgtaatcatttagattttagaattttggggaaagaaaaacagtacttaaatgaaatatcaaagatgattgtggagaaaaaccggtttagtacaccctataaccaagaaccgtttgtatccggtttaacatccaccaacttcttttgccgcttctcataaattcgaattagcccctaaaacttactagttataagcagagccgttgtgcggtggctcttttttcacgagccgttgtgcggtgggctctgttgtcactggccgggcaactaatgtatcatacgacttcgaggagggaacatttttggaactgcgaaagcttcttgccaacggagactcccggaagcggattaaaatcagcagcgtaaactccaagaaaactctctgtgttgtagaatttatttacatactgcaagtgatcaatgttcagcctcctgaaaaccgctatcacgtgcgaacacggatatctgtaaagttgccatatcccacatgtgcaagcccgatcgctgcgatgaacaaagaatttcatgtttccaacttgcatcacttccgtgacctgaaacctctgtccagactggtctaatggcaggacatcgtgtgttatagactcttcaagctttgtcatgacatgtttagcatagacctctcttctgtttttcattgattcctggagaagaccatgtcgcagtttgaaaagctctgccaggtgatcaaagattagcaagatacaagttgtgactggaagattacggtctttgtttatgaaatcgtaagtcttaaagattgtgtttgtagtcaagacgaccccgaatctcagcccgccaacatcatgagccagagtccactgacacagaggcaatttgtctaaccatctccgagcctcgatattcgtcttttcgagtttcttcaagtagtaatcaaatcttgatttgcaactcgtggatccagccttgtaaacatactctgtcatgagattgttttggaaaacttcataaaatttacagcacagatgcctaagacagaattagacaaatgccttccctctgcgttactttctttctgatgcacgaaaagaaccaacgccaagtatcagctgacaaatcttcttgggtagtaatggcaaacgcaagtgggaaaaggctgttttcggcatctaatcccgctgcaaccaacaattttccagggtatttaccactcaagtctactgtatctactaaaatgagaggtctgcagtgaggaaacccttcaactgactgctgaaacgcccaaaacacagaacgaaaggatgcatttttgggatcaggaaaaagatcatattgccattccaaaagcatcttgttagatgagccaagggcagccatgaacttgggcaatacgctaaaactcttgtccaaatctcccaagattgcagagatcgcttcctttttagccttccacatattagcatacgagactgtgtagccaaatgcttctttcacccaattgttcagctctacaattgagagcgagggctgaacctttactagacattcaatttcacctgccaggaaatctgagcccacatctgctggcttacaagcatgtggacctgtgtattctgttatcttgaagccatttccattcgttttagctgccttgagaaaccatctacagtagttcttgcaccctgattgaaaggtacccgtaatggggatttcgaatacattgtattcacgttgccttctattagagtacaacttcactgctttcgccagctcatctttacctctaaaaatcatcccaacatgcaactcactttcatcgagccatgaactagagaaaatcaactgcttcgagactactatcactgacgccttccgttagagttggctttttcattttcgaatccttctgtgcgaccccattatcaccagagtttccgacatccgtactctcctcatcttcaatccaaccattatggttatcctccgaaggacttcctagtttagtatttctcccactcacatttacatctgcattgacactactagcatcctcttgcagaaaacgcttcgggggcacattcttttccaatggggactgatgagatatagaaannnnnnnnnnnnnnnnnnnnnntttgatctctaaatacacctccagactgttgatagatggatggtagcatggtacctcaagcatcatctccaaactacaatcgtccacaatgggcaaacgcacatacttgaccatctgttgttgaacaatggaagggtacctaccaatcaaatcaatctgaaactttcccttttcaaaaccagtaagtcgatgcagatcatccaacaaattggatagttcgattttgctatcaactctgatccctcttggacttgacccttcatagaacggaccatcaggaccatctttaatacaaccattccaatagcagaacaacggaatctttcttgtatccatgaacaccacaaaaccttcaaatagaaataaaccctaaagattaggtttttttttgttgttgatgcaaaatgcgacatatatgaactgtgagtgaggttaaagactacaaatttgtacttagcactgtgaaaaatggtcactttgcagaagagagtttttgtaattttaccttttcttccgccgccggcttcggtgacttcgtcggcaaaagacaacagtttggtaaaatggtctgttcttttttttctcgtagttaacgacggtgtgtctacgagatagtgattataagctacatatttgtggtaaaataaaatattgggaagaaaacaagtcaatgaatattcctgacaaagaaaaaatgaaatgaacaataacacaatgtttctcatcactcactagtaaataaactttaacaaataaccttcaagctttagaattccatcttcaaatttcagataaagatgatgataataaaacccataaacatatatagtacagacgaaaaagttgatattttagacatttttattaaagttaaaacaagaagaagaaagaaacagacatgaaaacataaacaggtgctgaagcatacgaatctttgtttagcccatggcatacttctgagtccagtttcttgcagtagcctcgtatttggctctgtcggttttgtacatgtgtgcaatctctggtaccaaagggtcatctggatttggatctgttatcagcgaacatatcgagagcaacacctaccaattgcataaacatttccattaaaacagctaaaaactagagatgatgatcttactacatacacaaacattcaagaagcaaagcttgtgcattgagcaaaatcctagctgaaaatgtagatgctcttgctatacttttggaacataaacgaacattggagaaccgatgtttctgaaaaatgagagtcaccttggaaatggtgagggcagggctccattgttctttcaaaatgtcaaggcaaatgcttccgttgctgttgatattagggtgaaacaccttcgtcctaaatgcaacctgcaaataaaaacaaaacaaccaataaaagtttcaagattaagccaagaaattgatttgatttgggggcaaatacaagttttaattaggtccaagaatttcaaggaactctactaaacctaaagttcgtggtaatctaagagttgttccaatattgaatacctttggtggtttgaatggatagtccggagggaagtgaatggtaacgagaaacacaccgcctgaatacggactctctgcaggacccataattgtagcttgccaatgaaacatgtcttcagcaactggacctgcaaaaactaaaacataagcaaaaaaaaacaccacaaaccaaagaaggattctagtattctacatttctcaactcttctaactctgattagtctaataattagagaaaagtagaaactaataaactgaaattcatcataaaatcttaagataaacataagccaaaacataagtagacaacaccacaacgcaaagaaggattctacatttctcaactctgatcagtctgaaaagtaactttcacctttgtgatctctagaatgctaaatctctggcatattaccagataatcatagataaagtaatggatccaacaagaaggagaaagatttgagatttttgaagtgaacctgcactgcaggaggttggagggtctttctggagatccttcagctccttcaagatccgtttcgaagccattttctcactgagaaacccctacaaaaagtaatccaagttaaacctagatcaatccagctcaaatccagaaactttttctaatctgattgaatcgaacaagaagagacgagctttttgaattcctacaaaagaagagagctttttctcgtgtgggttaatcaaaaggagaaagctttgatacctcagaaagaatcctccaaatttggttttgcgattcactcctgcagatgattggaagaaagcaaaacgaaagagaaagttttggtttttatgctttaagaaacggaagcgaataatttaattggataaactatgatttattttagtaataatggctgcttaagaaatatctgtaaacattataattttaaaatactatctaatttttttaagaaattataaagggtgggctatatttgatttgaccccacttagattccaaatgattctgaatcacgatgaattttcaattgtaaaattgtcctctttggtacatatttgatatttctctatttctatagccaagtgtagagatatgaacggctgattatatttttgtaaaaaataaaaaatgaaaccagataaccaatcataattaatgatattttatctagtttttgtgacatgattattttaaatctctat

SEQ ID NO: 36236 - DNA, 5060 bp, Arabidopsis thaliana landsberg
  unsure (1)..(5060): unsure at all n locations
tcaatatctgaacgttaaccatctgctaaagaaaaagtgtttattaatattgtttcaggatctctgtttaagaatcgttgagcaatttcctggttcttgattttattagaaagaaaacacagaaaacaaccttttgttatctgagaagatgaatccagaaacgaaaaggaaaagttccaagttctatagatacagtcctcttcggcttgagggttgaggcaaatttaaagccaggattatgattaacttcaaacaaatccctcaacttaaacatgataattatttccgtctgtggcttgtaatcttgtcgctagcctttacggtggagactttcatgaagaagattcaacactctctatgggcaagtctggttgtgtcgcccattcagtccacgacccatcatagatcggcacgtcggttttccccagccggtgaagcccctaacagagcaagtcactaagtcagtctctctccgtttatatataatctcaaataaaataaatggagttaccattgccaagatgcaagctgttacaccagtcccacacgaggccataataggcttgtccagtgagatatctgcaccaaaaagccttgagatcttacaaatgttttatataaataagattgtgaaacttattcttcgagatgaaatagtttaccttcttggtcaaatcgtttcttcagctcctnnnnnnnnnnnnnnnnnttacaagaatcaaacatctgcagaaagaaggaatttatcacattaactctggggactagatgcagaggaagtgtgggaaggaagcanattctcttagggtggcttttacctgaggaaaagggatccatttgcttccaggtatatgaccgcttcttattcccttacggggttctttagctttaccatcaaacctgtgaaaaaccccgtaaaataatcaaaatgctacactgagtatcaaattagtgtgaaggagcctagagaaaaatccattagtcaaaacaagtaataactcggcatttatagtacctggctttggaacgagcgtctatgtgttgataagtcggatcctccatattgttcttgacctgtgaattcaccaaagagagtcatgacctaaaataagagtctgaacaagttattgtaacacaagcgcaaactcaaaatcaggcatctacagacatcaatctaccaacatactgagctatagtaaaattgatatatcacaatcacaattctgaaaaacgggtataaatatagaccaaattaaagattcttaagcagagaatgatagttaacaataatgtgaagacaaaaccattcaggaaatgccaacctgatcaagtgtccacactagatgtggctggaacttagtttgaaaggttatcggactgacctgtgcaaccacgagagagaaaatttatatgaagaaaaaacacatctttactgctcaaaactcatcatgaatctacagaaatacgaaccagagaactattatccaaattagtgacttacggtttgtccttgataaattttctctatagcctcacttgcggcactggctttcagaatagcatcacctgatgcactagattcaacatcataacctgatgcacgccatcttggtagacctccatcgagcacccaaactttttcatgtccaaaaactcggaacatcctatttaaggggaaaataaagaagcacatatcaattataacaatacccgaaaaaagactcaggacaaagtaaaaggattaaaagaacaaacaagaaccagaactcaccaccatacacgggctgcactaaagatcccctttccatcatagacaaccacttcatctttgttatcaattccaagagcagaacaaccagcagcaaaagcttcctcagtgggcaacatatgtggcaactgttacaagtagttaatatatcatacaatattttagatgattcccttaagatcggggcaaagagatgtcttaatgaaaacacataataacatatactaacattaaagagtccagacttattactttatctcacataagaaaaagctacatactatcttaaaaatggcagcaaaagaagataatatctatcgataaggtttcatttatgcataaaagcgatatcaatgtgaagtgaaaacttcaaagtaaactgcaggggtacatcttctgtaaaagaaaagatggcgatacttacactagtttttcgatctgatattccatccaaatcaaagaagagagcgcggggaatatgagcaacctatataggagaggacacagtttatgtccgacagtatcatcaaatagtgtactaagtgtggtttcgctcatccagaatgaatacaacctgaacaattgtgaaaacaaagaagccctcaaacctctatctgttcatactctcacctgatattcttggatcggatttctctgctcatccggcatataccatgaagcatccaaaatctgaacagcatacaaacaggtaagtttcagtttggcagacatattctccaagaagtttactagcagaaagggtagtcaccttcaaatcaggctctctaagattagcatgaagccaatcaacagaaacaacaggttcactggttgatacggatgatgtggagtaaccggcttttgtctcaactccagtagaagccatagctcgacgagcccaggtagttgatttataggctgtagaagcggagcctaactgagagtggagtgacctcttcagcaattaccaacacaagaagaggagaccaaccaaaaagtcagaatcatatacagagaggcgaaactgagcaattcacataaaacttcactacctaatttatgattacaaaactcataagtccaatttcaaactttgataagaaaagcatcgattgacatagacctcatcaacaattaagcaattctctatagtctattcaacatttcaaaagctcgaaaacccagtagaaccactgtcaaatcatagaaacaatccaaacgctcgaaatcaatccagacactctcaaacccagaagctaacgagtggtcaaacgaatggctaattgagaacagatcgcgaatcagatatcgacttacactgagaaaggtggctggattaaagatcttttgcggaagagaaggagtaatcagtcggtgactagcagccaagaaagttctggagaaaagggtcgaggccatatccacctcaaatattctctcgataaaatgcaacagagatgatgggttgagttagaaagacgccaaaactatttgctgtcagattgattctcttcaagtactaaacccaaaaaggttgcaactttgcaaacgtttttatcaataaagaggattttgtcactgccgccacgaacgggtctggaagagagacacgtctagggcgtctttggcgtttcgtttcaccaaacgtgcttcttcgcgttttgtgttttgatatttttctattccggtttaactaatctgatctaaaccaaaacatgaaccgattcaaaagtatccattgataaagctggaaaattctacacaatgttacatctttaatgaacatatccaaagaaacaaaagatgaaaaagagattcaaaaggggaatcctttacggatgtatttcttggatttctcagctaaacgtttcatgtttttggatttctcgtaaaactccatcagctcggttgcaatatcttgtggatgacacattacataaaccttcaagaaccgtttctcgctcatccttaccgctctgaaaatgctcacttcttttatcaatggctttagacgcatttccaagactctcttaacgagatccgcacgaggttttagacgagactcgaggttgaggagaagcaaacaagggtgcttaaccacggaatgagctggaagtttcatcgaggctatgacgaaagtcatgtttctctgaactttctcaacagagagagagagaaggattgggcattttccatacaggtgccaaatctcttcttccgagaacccaaacttttccaagtttctaactttctcttcgattgtctccatcctcgagaccccgatgatgactgcaacatatttaaacatcttggattctctggtgactccagttttctcaatgtattcaaacttctcattgttaaagtttgttcttggaatcaacgtgggtcgcgatatcaacattgcgacaagatcctgttggctaaagcccaaccctttgtagtattctatcgcgggtttgatcttgtcatcgaggtcatacaacatgagtgacggattccggataatgactctgcgcaacacctcttttgaccccaaaatctccatgaagtagttgatcctttcatcaaggacaagacggcaactaaagaacctaggacgacagttaagaatcttcacaaggtctgaagacgtgattcccagtggcttaagaaggcttaacttaaactctaactgagcaacattggctctctgcaaagcaggcctacgagtaaaaagcttggatatttcatcatcatcacaaccccatcttcgtaaaacttgtaaaggactactagtaatatctctcactttctctttttcaccaacttctccaacataatcaaatttttttctcctagacgatagatcagaatcctcaatgcattcttcagattcattcaggcataacgtcgaacacctggtggtaaaggtagcagaaatgagatttctacaaccagcctttctgaccaagctcgaactagtaaacaataatctgataacagctaagaaatttctcttcccggtcgaatgcatttcaagggcgtaatcgagagtttaacaaactggagaaataaaggagcaaaatttctctaagaatcaacaatggctctgcctcaacgacacaatcagcgacatttacacgcgtatttcagatgcttcttccatccaattttccgaaatagctagaaaaaatggaacaattaccagtacacgaagcttgtgatgaacgagcgaagaaacaaactccgaccaacggaggagagtttgtcagagaagaaggaggcgatggagagagacacagccaattcg

SEQ ID NO: 36237 - DNA, 1308 bp, Arabidopsis thaliana landsberg
  unsure (1)..(1308): unsure at all n locations
agaggacaaagacgtgcactcgttacctcgaactttacaagattacgagacacatttcaacatgatccagacaatatccgtatttttttcttcttggtaaatcaattcacatctatgtctaagtctcaaatcatgtaaacttccgaccatttcgtctaaatgtgaccgttgtttgtttcataagccaacgatatcccggaaatttacttttattgggctaggcccaaaactgtatatctttgaatcatcgaaaaataattttaagatttttttttatctttacaaccagagattaagattaccaacctaattacatatattcccccacccaattaatctaatcacccaatcaaaaaatcccgaaccctttttgatctttgagcttggcatcttaagaaaaacgccaacagctttaagaaacaagagcttgttgtggtttccttgtcctgtccaggcatcacgacattgtaacatttcctgtactgttcgcttcttcaactcttttagaagaagaaggagcttcttgtttcataaataatgcatagaagagctcgttccacgtgtcaggaacaccgggaaggcaccagtggctacagtcttggcgatgaagcggtgcaggaccatgcggaccgagatagtagagtgatgggtgaccatcttttctttgagcagccattgccgttatgttaaacagtttcactttaacagtctctgatctgtttgagtntatgtgacaacacatcttggaggatctttaactgttcccaggtctctgatgaagccaatgaggttccaatttctggtaatgtctccatatgacatgttcctcctgttttccaatctcctcccctgtttcatacatacaacgacgaagatatattgaaactaaatgcagaacattctacatcataagacctaaacctaatcaagcaactgaatattacaaacgattgagtctttatcaagagtaataccgtacaaacctgaaatgcacgggggcgaaagtgcgaaagaagacttgagttttgtttgaatcgagctcggtatgtatccatttcacaacggtattcagagctcgcttataagcatcatctacattcatcttcaattttacttcttctccttcttgaaagtaacatcccctgttagtaacaacattcaagatttggtcacaggaacaaatttcagacaagagattaagtgacacatcgaactcgggtatacgggacaaaaacttacgttctagtagttttcccctcgttccaccagtgtccagtattgagcactaaaacgtcagcatctctccat

SEQ ID NO: 36238 - DNA, 875 bp, Arabidopsis thaliana landsberg
ttgttgaaggcataccatgttgatacaggaaaccaactagcagacataatgactttgtctcttcatcctggtccattctactctggccttagtcgactatcggtttcaagccttttcaatccttcggatgattcggcttgagggggggtgtattaacatatattggatagttatatatgtagagtataggtatagtattaagtctcctttagcttgatactatatataccatattgtatcttcattttacagttaatgagaaatcacacttaattctaaagtgttaatatggtatcagagcaaaagctctctttcttattcgtttacccagaaaaggaattacagaatcttcatcttcattcttcttccatcttctttcacaaatatcttcatagatcttcgattcatcatcatcttcatcaatcctattcatcatcttcatcgattcattgatttttcaagctcaatgagctgatttttttttcacttttcttggagaatttcatcttccgctactcaagatcatcttcgtttcaagttgttctctcgatttcaatcgattctaatcaatctacataagatttgtttgatttcttggtttctttgattctacgatggctactattgatcaatacgacaatccataatttcttcacaactccgatcacacaggcttagtacttgtgtcagatcgacttacgacaggtgctgattttcattcttggcgacgatcggtgcgtctggcactcaatgtccgcaacaaactcggatttatcgatggtacaattcctaaacccaatgaaactcgtagagattttggatcatggtctcgctgcaatgacatggtagcaacgtggcttatgaattctgtttct

SEQ ID NO: 36239 - DNA, 3257 bp, Arabidopsis thaliana landsberg
gtataactagccaataagttattcccgtaatttagagtatacaaacaaagatattgttgatgtccaacaaaactggtgcccacattatattttcaacaaaaaactttatatgtaactactttttttgctttttcatgtgttttttgtagttaggtatgggcagtgcagtcgaaacactatgtggacaagcctatggagcccatcgttacgagatgcttgggatctatctccaaagagcaacaatagtcctcgctctagttggcttgcccatgacattactatacaccttctcgtaccctattctaatcctactaggggaacccaaaacggtgtcgtacatgggatccaaatacatcgccgggctcatccctcaaatcttcgcttacgccgtcaacttcacggcccaaaagttcctccaggcccaaagcgtggttgccccgagcgccttcatctcagccgccgccctcatcctccagatattgttgacgtggatcaccgtttatgtaatggacatgggctttatgggcatagcttatgttcttacaatttcttggtgggtcattgttggatcccagtgtttttacattgcggttagtcccaagtttagacacacgtggactggtcttagctggagatcgctccaaggtctttggagcttctttaaactctctgctggctcagctgttatgatttgtctggaaatgtggtattcgcagattcttgttcttcttgctggtttgctcgaaaatcctgctcgctctctagattctctttccatctggtaagtccattaattagttagtaacttgattcttgattctatatcattttcttaatcacttatactttttttttttggttttaatgtgaaggaatcacttatacttctcttttatctaactatttttttcttgttatttttgtgcagtatgtcaatttcagcattatcattcatggtctctgtcggctttaatgctgctgtaaggttagtatttgtttctcaatcaatttcagattatcatccaaacattgctcaggttaaatcataattttctatacaattactatgcatggacagtgtacggacaagtaatgagcttggagcaggaaatccgaaatcagcatggttctctacatggacggcgacttttgtatccttcgtgatctccgtgacggaagccctcgccgtgatttggtttcgtgattacgttagctacattttcacggaggatgctgacgtggctaaagccgtctctgacctctgtccttttcttgccatcaccatcattctcaacggaattcaacctgtcttgtccggtataagttcatttagatttaaactagaaaacttaactggtgcaccttaaccgaacatgaccaaataaatctcggtttggtgttgttgtttgtaggagtggcagtgggatgtggatggcaaacatacgtggcatatgtgaatgttggttgttactacgttgttggtattccggttgggtgtattctcggcttcactttcgattttcaagccaaggttcgctttcaaatatattatgtatagtattagtatatgctttgttactatcagtttaataaaaataattttacgtgaattttggttatagggaatatggaccgggatgattggaggtaccctcatgcaaacactcattttactttacgtcacgtaccgaacagattgggataaagaggtaatgttacatgaaattaagttatatcatagtgtaagctgaatttgattcaaagagtttgtccaaattattaaggtttattattattgtataataatgatacaggtggaaaaagcgaggaaacgtttggatctgtgggacgacaagaaggagcctctccaaaactagtaatggattttacagaataaaagtatatttttaaaaataattaacattaaactttacaatctgatatttaatattcaggttataacaagtttggtggagtgatagacaataaagaaaaggaaataagtgtcgtgtgtgcaggtgatttcaatgtacgtagcttttcatggttattatgcttgttctatggaaatagaacaattaaaatatatttttgtctgatggattattctttatttacgaaaagttgttcttaaattgatgtttctttcctttctcagaatgatttattatgtcttcactctatagacagttattaattatttattatggaattttgatgtaattgggtgtagtaagtaaagtagcacatcaatgtgacatagctatccagttttcttttactgatacattgtaatttaatggatgtttatttgtcgaaatgccattattcaaattaaagtcgtttaatgcatattattgacatataagaataaaagcttctctactcgaaaattagaaacaatgcacagtattgtaacgagaatcgtggatcgcagtttcctgtcatacctaaaatccaaacacgagttacatgggcatctcttgacaaattgtgagggccacgctattaataactatagtgacgggtcagtaatctaaccaatgatacatgattcaaacaaatataaatgtatagttaataggtaaatttcttaagcaaacaaaaataaaattagtcaaacggggaaagtgacaaaaaaatattacgtaaaatttaaatcgatacattgtcttcagtcttcaccaatataattaacaaatgtcactagattgttttttaaagatttattagcaaaatattgaatatattactggacatattaattattatatgctataaatatggaatgaaatagatttgttgatttttgaagaccgaaaaagaagctaaaaggaaatttttgattaacgatgcaattcatctttcaaaatcatcttttcattaagtcattgagctgataaagtctgttgggcacagccatatataaattacgcgggtaaacggattatatagtaatcgacacttaaaaaacaaacacaaaagttgattttgttgaccgactttttctgtgtcttggcctaaattggcgtccaggttttaaaacatataagacatagcctatattttgtcaaaaataaataaaaataagacagctatatacgtacgtttttttcttttctttttctgtcatctggaattatattagagaattaaaacttcaacacatgaaaccaccgattacaaggatagactaaatcaaagatgaagcgaacaagagttagcttaccacaaggcccaactccaacatattcaag

SEQ ID NO: 36240 - DNA, 2110 bp, Arabidopsis thaliana landsberg
  unsure (1)..(2110): unsure at all n locations
caaattccacgttctgtttttttcaatgcacgatatttctcatcgacatgcttatatccactcctttagttccatagcttcagaaaaatcccatggttcctcatcgattgcaagcagaagccgttcaccctataactcgaacaagagaacgtaatcctttagataggtgggtggtcatgtttgtccctctgatcttcttagcatgggtatttcttcttgtattgaaactatatcgtttccatcaagagatgaatcttcttgtatatcctcatgatcatttttatcttcttcatctttctctgcttattgatcaacactctcgtctcttatgcctttatttccaaaaactccaaaactgacactaaacattcttggatcattgtctctctcgtgctcagttttgtcccacttccagcttttgtcttcatcaaagactacatctcgacttactactattttccgctttgttggatccaaaagacgatatgcttttgaccccgactatgttcctaaatgcactaacatccgagatcgatcatcaagtttcttcaaatgaggagcttcagtctttgcgtaacacacacagccaaacacacgtaagtgctccacattaggtttcttgttctttaatgcctcatacggagtttgattgtttaaagttcttnnnnnnnnnnnnnnnnnnnnnnnnnnnnnnnnnnnnnnnnnnnnnccccaaagaaagtttggaatactcatgtgttttagaacacttcatgtcattcctaagagcgttttgttctgtctttcgacaactccattatgttgtggagagtatggtgccgtcaaatgtcttttaatgccagagacatcacaaaacgtattaaaatccaaggacacaaactctccacccctatatgttcgaaatgtcttaagagtagctctggtttcgtgttcaacacttactttaaagatcttgaacttgtcgaaggcctcgcttttctcctttaacagaaacgtccacatatatcgtgagaaatcatcaataagaaaaaagatatacctcttgtttgctgttgtgggaggtgtaataggtccgcataaatctccatgtactagttcaagaggatttgaagctcggtatgaagttgattgaggaaacgactgccttacttgcttcccaagtaagcaggaagtgcacgtttgtttctcgacgatgagttttggtattctaataactagctccttgttgatcactgtcttcatgttgtcaaagccaatatgtcccatcttgtcatgccaattcatggagtcactagacatagagagttggagacacttgttttgttttacttcaagtgtcactttatacaaacgatttcttgctctgtttgcccagatcaaaagctctccctctcggtcaaacaacgttacgtatccctttctcattctcacgtcacatccagcctcagtagcttgaccaagacttattatattgcttcttaagtccggtatgtagtagacatcttctagtaactttgagtctccattcttgcttacaaagggaatggaaccttttccctttatatcaattcgagagtcatcgccaaaccgaaccttccccgtcactgtcttgtcaattttagaaaaatactcaaggtttcctgtcatatgattgctagcgccattgtctaagtaccacatgtctttaaaatctgagttctcttcaagagcttttggtcgtacattcttctcattaatgtatactagctcatgcatcatcaaggcatcagcttgttgagtgtctccattctcactttcttgagtctcttgtagctctagtaatctatccggacaatccgaagcataatgtcccaatttgtcgcaacggtagcatattactttagatctatcacgatatcctccattacgacctcgtcctcttgcccttccgtaggatctaccacctctcccacggtttgcgttccatttatcttaagagtccgcatacatcaacttcccttgatcctctacttgatcatcgtcgtcacacgttctctcttcatacacctttagacgtccaacaatgtcttcaaaacctaacgtgttgacatcaaagtacttgctcaagtgc

SEQ ID NO: 36241 - DNA, 1476 bp, Arabidopsis thaliana landsberg
  unsure (1)..(1476): unsure at all n locations
tcatgtaaaagaaatggttatacgtaggtagctttaaacaacaaaacttactctgtagactatataaagatcaatacttgatgcagctggtaaaaaaaaaaaaacgaattgactcgagcagtaaattcctattgattgtgaaaaccaagttttgttgtttcaatacactacaaatacgggccgaacaagaatccaatggtggttgttacgcagtttgcaataagaggagtgtcacatgcacatttttcatcttttgttttgtcttattctaaagaacttagcgaaagatatgggaaaggtgtcacgccaccttgagagcacactacctacgaactatttttctttccaattttattttatctttgacttgctattttccctatttcattaatcgactacatggctacatactttatgatataatatacaggtcttaaattatgactggattatgtataatattaaaatacagatgcttcacgtaatagtgtaacttgatggagagaccaagatggactgaaataataattatagctacctacattaaaggctaaatttgcatggataacaaatttttaatttgacacagtttcgttttacaattttggtttggttcgatagttttttccgattgcagattttggtccgcattccttcggcccatataaaactaaggcccatataaagtttcccgcgtaaaggaaaaagaatcgtaaaattaatcttccccgagaagtttcgaaatcagattaatcccgccggagagaaaatgaccgtcgccgccgcagccgaagaaccatctcagagacctctcaccgacaaagatatcattcgtttagcacagtaccaccattgtcaaaccggattctctctcccaccttaccttctctcaccgtcttcccacgattcccttctctcatacctcaaatctcgctcttcttcaccatctccgtcgaaacaagtttctgagtatgtaatcgctcttctatctctaatatctctctcccctactactccctctctctgctctctcctcgcttctcttctcatctcctacacccaaatcttcaattcctgcaaaatcccaagcgattctgattctatcaagacgattcagctcttcggtactctcttacgatacttacacgttaaggaggtgaaatctgtagttgattcgatcttatcaggtgtgactagagttatcactgttgatgaagcccaggtgttcgatttattgcctgtgtgctttgatttattgcgtagagaaggtaaagctagtgaaatcgatttcgttaattcggcgattgatcgtgttcttagttgtgaatggaacaaagcgttgttgnnnnnnnnnnnnnnnnnnnnnaaggagttttcatttctggataaagggagaaaaagtgaattggtagagaaagtgtttgttggtattaagttgatagacttgcaggatttgccttcacttgtgtatcaatt

SEQ ID NO: 36242 - DNA, 1461 bp, Arabidopsis thaliana landsberg
agggcatcttattaatgggttgatgatatcctacactcctaagtattttggagatcccatagttttgttacttttcttcacatgtttatgttgtttttctaatctcaggttgatgtttgatccatatgccaaagttgtatatgactatcttgggggaatagaagacattaaaaaagctaaggtgtgaacatattctgttacacctttttcccccggtaaattattttcaaatatcgttgttctcattgtggttctttgctcacaggtacggacagtgtttcatgctggcacatcatttcaagaggacagtggtgagttttctggaaaaataatcatcttatgtaacatttcctccatggattcttttccaaaatcctgtagagtctagaaaaacaaattcttgtatgattaccattaagagtctagataatagaagcttatgtgtgctttaccgattataacatatccagccaggattcttcgtggaacaagaattgctgcgcgtttaggttttacaatttccaaggaaacagctcatttcttaaagaacctttccttcctagtacaaagactccacagggtactactactgcttcactccacaaagaaatattttctccacattatttttacaacagtgtgttcatgaatgattctgtattatacatgtagggaagaatcttgttggaaatgaattacatgttagcgtatggatcagcagaagcttctttacgattgttgtggaaatttgggatactagaaattcttttaccaattcaggtgagtgtttccactcatctattgttatgtcttaaatgtatctttgcgtctatctaacttcaatattcacaggcagcatatctcgttcgcactggtttcaagagacgcgacaaaaggagtaacttgcttctggtaatatgcagatgcgcattctgcaatattcgtcacagagaagtttctattgcttaaattattgagtacagaacttatagttaacatttcgtaatgcagtctctcttcggaaatttggataaattgttggctcctgataaaccttgccacagcagcttatggtacggtcctcatcttctataagttcctgaaaacacaatccttatcatatacagtggataaaattgtaagacgcaacactattgtattggaaatttgtaggctaacaatcttggctcttcacaaagcacttgctgatcaacctcgatatccttcagtggtagccgcgtttagcctcgctgtccacaatggtggagatgttttagaagctgtaaaaatcaccaggaaagtcacaaagccacataatagaagcttctttgagctactggagccagaggaactggactcccaaaccttgttggatgaagtcatggattttgattcatctatcaaagaagccttgggacagatgactgatgggaggtttatttccaggctatggcagcgtac

SEQ ID NO: 36243 - DNA, 3694 bp, Arabidopsis thaliana landsberg
tctaacgatctctgatctgtttgcataaaattaagttatttgcagatgtgtgccattttcatgttaataaccttcttggttactcctgtttttagggcacttttctgccattcgtggttccacgaacagtatttcaggggttcctatggacaatctggttgactgttctgtgtactctaaaggtatggtatacaggttgcataattggctttcttgatttatgatcaggaagtgctgatttttttttctagacaccctaatgtgtagtaaaatgttgtgtagatgtttcaagctttggctagagatcggcttgatcgattgaatgcatctccttcttctactccttggacatactttcgtgtgtattcagcactgttcatggttctctctactgatttgtgctggtatttccttaactctttggtatcatgtgaaattttgagttgcggctttttcaacccgttttttttttttaatatgagtgcactattttccttcttctatttcaaaatatgagtgtaaagttttcctcctagtttctgtctctggaaccagatatatattcttaaaataaaataaagtatagttgtatatcagaggagacaaaacaaattaaccctaagtctctgaatggtgcacatgactttcatgatgcatatagttctagtgaaagcagtgtaattttctgctaagataaaacagagactttagtatgttctgagggtgcatatgctgtagtgagcggagaaaatattgtgttctagagttcccgtatttattatactgcagttcaatgaggagaaaatagggagtttttaattcatacaccagaccctctggattatcatattctgttctagtgattgaagaatgaacttgttcgtctctggatgttaattttgtcgaatcttgcaggataaagctttcccttatgatatacaatacagttggttcgtctgtgtatttactgttactttttgagccatgcagtatagcttttgagaccttgcaggtacttgagtaagatagttgtattcattgtttatgttacccttctttgtaaccgtacctagaaatatagagggttgatcaatcgcataatggatcatttttttcaggcgttgttgattcacgggtttcaactgcttgatatgtggatcaaccacttagcagtcaagaattcagattgccagagatcaaagttttatgattccatgacagcaggttttgtctttttctcggcatatgattgtaattatgttttctgttagactgcaggcgtgcattatttgaaattttttgtcctgtttggtgttcacattactaacttgacctcttacccattgaataggctcgttattggaatggaaaggcctcctcaaccgaaatcttggtttcttcctagacatggctaccttggtaatggccctcggtcattatttgcacatctggtggctccatggaatggccttccatctggtggatgcagttttgtttctcaacatacgtgtaagtctgttaattgactttctttgtaaaagtgctactctactggtttcttaataggcacatacctaattgttaagttctttgtgtgttcccgtttgattttgacaggccttgctaagttcaattttgaaacgaataaaaggatacatcaaactgagagtagctttaggtgctcttcatgcagctcttcttgatgcaacttcagaagagctacgggattatgatgacgaatgtgctatatgtcggggaagtttctgcttgatagtaattggtctccttacttttttttagtagctcactaatcttggaaccattatgaatgataggaaccaatggctaaggctaaaagacttcactgcaaccacctttttcatcttggctgcctacgatcatggtatgctagctctgttatgttggcagccttgtgctattgcggttctgtgagaactgtaaatcataatgatattttgactctggcaggttggatcaaggtttaaatgaggtttactcttgtcctacttgccgtaagcctctttttgttggtagaactgaaagtgaggcgaatcctagcagaggagaagtctcaagcgatgaacacttagcccgtcaatttgagagacaaaacaattctgtgcatgcactaaccactggaatgtttccaactgagacgccaaatttcaccgaaagtgatccttggaggttgggttcattgttccatatgttttcttcttaagtgcattaaagtaacagtgtgttcataacaagatcatcaacttcctgtggtttcctatccctgagctaaaatactatgcattctctaattttgtctaattatacttggttcttttgggtagcaagtaattgttggttttgtgaggaccaagcttgtgcccccattgattttctttttaaagactggctttcttaatcgggattagcagttctcacctttttctcatgccatataggaattcagaggtggatccaagctggctgcaaacatggtcagatcagggtgttgatgttgtgggttcctctgcaggctccagatccgttgggctggggcaggttcaattgatgatgaggcatcttgcatctgtaggggaaggttctgctcagactacacttgacgatgcttcttggggtctctggccaatgaatccttcgcaagcatcgacttcatctacatatgttcctcctggtgctggaggaagaacaggtggactgcatctaagaactgtctcccgtgcagcaaataacatggcgagtatactagcaatggccgagacagtaagggaagtcctcccacatgtgcctgatgaaataatttttcaggtaaatattagatgcatttattggtatgtgtctgctttgacaagcaagctacttgctgggttgaattgctaggatatttagttagtttcctgcatcaaatgaaaggaaaacatttgtatatatgaatttgtgaagcaaaattttcattaagaaattaatgggctcaatttttctgagtttaatggccatttgttgtcatttgtttgcacacgctgggtattgaagtgatgattgattcaatcttctttcaggacctgcaaagaacaaattctgtttctgttacagtgaacaatcttctccagatgtgaaaattggtttgcctaaaagtaattagcagttccattcgataaggtagacgcatcaggaaacatccttgtcttttaagtttgactcaccaccacacatttagaagcgttgtctgctgtaaataggaggcattcttgcaacagactttgcaagagtaagaggctctagagtagattttgttcattgctcttgtgggataaataaagctcatttagttgcattgttcagtctgatgttggaggctttattctctggagatggtaaccagtctatgggaatgcacgtctgaggactgatgctacctccatttgtataagaacgtgtaattttacaataaaacaaaaagcagaatgtattgttattgatccaatagatcttctcaattgctgaaccgtttctttaaagctgggtcctgctgtctactctataccggtttctttagcttgaatttgcaggtttcatggcttcttgaaacagaggaaagacattctgagggaacattcttggtccagatgttgggttcttggttcttgaagctatttta

SEQ ID NO: 36244 - DNA, 7312 bp, Arabidopsis thaliana landsberg
ccgtacattccgttatcgccacgaacctagccactacactatcatcgaattaccggaatgtttctcgccgtagaactatctccacctctgtgaattgttcggtggagattacggaggctgatcggtcggtgaaactgaagaacgggaacgattcactggagatatgcagagttctcaacgggatgtggcaaacgagcggaggatgggggaagattgatcgaaacgacgccgttgattcaatgcttcgttacgccgatgctggtctctctactttcgatatggctgatcactgtaagtagctaacaagtgaaattgaatattcagaattgacttgaaattgaaaggttttgtgtggagattagtaatagaactgtgcttagttttgatcttgatgaccttcaatgtgtggagctatgttttggtcacagaagaattgaattgtgtggagattagtgaaatagagttgtgcttagtttgttttctatgatgttcagatggtcctgctgaagatctttacggtatttttatcaatagagttcgtcgagagcgtccaccggagtacttggagaagattaaagggtaagcaaatttagtccaattgattagaatttgtataagatatggtagggtggcttaatggttaggctatatttaatgatgtagtttgacaaaatgggtgcctcctccaataaagatgacaagtagctatgttcgtcagaacatcgatatatcgaggaagagaatggatgtggctgctcttgatatgcttcagtttcactggtgtgtgttactctcgtcgcttaattgctagtcgttgacgtttcctatcttcttgctaaagtaaacctgttatgtgggaataggtgggattatgcgaatgacggctatcttgatgcactgaaacatctcacagacttgaaggaagaaggtaagcgagaggggctatatctttctcctttgttgtgattgtctatttgtttatctattgggctgctttaagtgtagtattgaaatgctttcagggaaaatcaagactgttgctttgactaattttgatacagagagacttcagaaaatcttagagaatggaatccctgtcgttagcaatcaggtgaatgtcagcccgatgtccgaacattatatatggcctttattcggactcttttttttttttgtaaatctctaactctctgtgcaaactctttccaggtgcaacactccatcgtagacatgcgtcctcaacagagaatggctcagctttgcgagcttacaggggtcaaacttataacgtaattatactttatgaaattcttttttgatttctctctttaaaactgatttaacaacacatcgttggtctttgtgtgtagatatgggacagttatgggtggtctcttgtcagagaagtttcttgataccaatctaacaatcccttttgctggccctcgcttgaatactccatctctccaaaaatacaaaagggtaagagtccaatggccgttcttgttttatgagtttaggatggctgatgcatgatcatcctactttgtactgttttaagatttttgagagttacattacagatggttgatgcatggggagggtggaatctatttcaaggtttacttcgaacaatgaagaccatatccacaaaacatggagtctctataccaacagtggctgtgagatatgtactagatcaggtatttgttcttcctcacattactctttactcttaaggccaatctggtttttgatttgtcggaaaaatgaaaatatcatctcagcaaggagttggtggatcaatgattggagtgagactcgggttagcggaacacatacaagacgcaaatgctatattctcattggtattggatgaagaagatgttaatagcatacaagaggttaccaagaaaggtaaagatcttctccaagtgattggtgactgcggagacgaataccgacgtatatgatgtggtagctatgtactctatactgtatacaatatcatcaactcatgtaattacacttttatgtgtagaggaatcatttttacatttataagacttctctggctttatttcttttgcttctatgcatgtttggagagacaatactaatataaaccacaaagctacatgtaagctatagagtatacatgtttaaggtaagtaaacatagttttatcataaaaaaaacttagcaattctttgattcaaaggaaaacttggcaaataccacttcttattgaaatactagtttactaattattcagaggacatgaccaagataactatgaaaacaaaatttatgaaaagaaaggtttgaacgggcacctagctcccagcacatcttcttttggaggtttcaccaccagactacttcacagctggatttgagtcaaacttggaacatactcaaacaaatttggcatagatgatgtgaatccagaatacacctgttcaactttattatcctctccaacaatgtatacctcttgtttgaggggaatactgatagaccaacaagtttcctcgatgtcgagataatcttacacggcctatgtaaagcaggagcggatccatgttgatgattatgtggacaagagcactataacttatacatatttgattttatacagaagaaagtataatataaagtggaacattggtttaaaatacacgcaatattacaattttagtgtgattctaggcttttttcatcagatcaagattttataattcaacacaaaactcatgattctataattttcaatttatgcttttaatcacgagtatattaatattggcaccaaatttctatattttctcttctcgtgtaggtctcgcatgtacgtacgccaagaaagaactcacgagaatggagctgcctacttcatttttttttccttacgtaaaacttaacgtgcaccattctctcaacatgcaaacattgtatttaatatcactcccacatgttaaatacaagctttagttagttatttacgtactcttgctctcattatgtaagtatagtttatggactaaaaaactttcgaatagaaatgggtggatttactggatttggtgttttgatcaatcagaacattcaacagcctcgtaaggtcagtttttcatttccatcaatcaaaggacccggggaagtctataaaaatgagatcatgactaggctagtttgttgttgtaggccgcggccaagtccaagatacatgagaatgttaaatctggttcagtttcagagaaagatactaatattcaggaaccttggtattgggatcctgatgtggacccaaagttgaaggccgagtacaagaaaaaccattcgcatgttagatctatgccattgtatgctatcgatcctagatattatgacttagctgaggtgaataggcaagcaagactttggtctggtccaaataacaagcatccatggtatgatgctcctgctacggtgaaggtaataatagtagatcagcaaaaaaaaatctagctaatactagaggaattttgctagaattaagaaaacaaatatatgcttaagtaattaacacttggttatatatatatcttttatgtttgaaggtgaaaacaaaaaagggtctttgcaatttgaacatagaattcacattgggatggcctcctcaattagtctctgagatgcttactaatccaagaaacataaatttcttcagattattcgatagggactttcgccaacgtttggtttgtttttttctttatatagttgtatgatttaaattaagcataattatgatcgataattgaaagtgtaatctttttaatttctacaaagacaacaaatcaacaaaggttttgaagaaggacggaccgcggcagatcacgagagtgaaaaaaactttgagatataagctccttgggcgctctatagctatcccgatacatctaatcatcgatgaaaaccataaaaacctaacggtaagaagcttcaccaaacctttcacatgaaccaattgttaaattttgtgttttggaggaagtgaatattttggttgatctattgcttaggcaaaatataagaaagagaaaatgatgtacatgaaagtgtttgagggtagatggaaagtggagctactatacgcagatcaggaacgcttatgcaagtctaggtcgcggattaatgaagaagagtacaaaaaatgtagtgacggaaaaggaaggattggatcaaaggtgacaatggagcagatctttcagccttgttctcttcttaatgtgccaccgatttcttggttcatccgtgagatcaccatcaaaaaaataaagaatttgctcgaagatcttagacaatttgttatcgacatgcacaaaaattcagacccggaatgagccggttataatgtagtggactggtattattgcatggattggttataatatatatggttattacgtcactacagggaatccgactatgtggaaaatgaaaaaagaattgtggacaaaacttatttacttgaaggaacaaaacaaaacaataatcatggccaaacagtttgacatgattttataacagaaataataattgatgcccaaagaattgttatcgtagtcttacgatcagctgttggtacatgtcaaagtttaacgaatatgaaaacgttatagtatatcatcggattcttatgagtaaacgcaaacaactagatattttgtggcaagctagatacattcattgtagattaggaagacaacgtccatgtttgaatattaggcattacgatccaactatttattggtcaataaaaaaatagaatatcaaatataccctcttgttttattcaaatactatatgtctatacaagacaaaataaagaaagataagaggaaccaaaccacatataattagaaaatgcaactagttaaagtcaatgtgtattattcatcacacatgaagagacgtgcaacgcgttccgttgactgacttagccctcttttattaacaccaatgtcaaccctattatctctattaactcttgagttgtgtttctgatcacaagaacaatctcatttctctaagacaaaaaccaaagaaaaaaatacaaaaaatggggaagccaacgactcaaaacaatagctttattaaccatttcagccacccccaccgccttcaactaaccccggcgacgtcatcaccaccgtgctccgcctgcaaactcaccggaggtaacggccgggtttactcatgtaggccatgcaacttctctctccatgagtcgtgtagcaagatgaagcaggtaataacacatccctctcacccttcgcatacgcttagcctgctcgtggctcctgtctacgatggtggatacttcaactgtgacggttgtggcgtccacgggacgggttttagttaccaatgctctctatgcgacttcgacatccacgcgctttgtgcttacaagccgctctcaatcatccacaagtctcatccgcaacacaatcttaaactcgcgtttcaatctccatatggcgctaataaaggtttctcttgcgacatctgtcgtaagattgggaagaaccagtggctttaccggtgcatcccctgcgaattcgatgctcatgtcggttgcatcactggtcctaatcctcacctccttcaacatagtacttccgcacctaatcctcatactcatcatgccggtcaccctcaacatcaaaactcgcttcctgtgcctaatcaaggcagtaacagggccagacccatgcctatgacaaggcccaataggcccattaatcctaataggcctatagctcaaaacgcggctgtcaatggaccaagaagacagaacaacaacttgggttataatgctcaggttgggcctaatggaccaaatgaacttactggtcaaggatcaatagatgggagtgactacaatggtaatacagggaatggagagtttgacgttgaagttgatgtcgatgttgatgttgatgttgatgttgatgttgatgttgatgttgatgttgatgttgatgttgatgttgatgtcgatgtcgatgttgaatatgaaggtgatgtgtatgttgaagaggctaatgacgagggagaagacgttgatggtaacgacgaggaagaagatgttgatggtaacgggcttgaaattgtggtttgtgtcgataatttaagtgttgcttatagtgagagtgattttggaagcagcagtgatgctcgtagccaatgtaatgatttgtctgatgctgatctctatccaccgtctctggataacacacaaggaccaagaccggttcgtatgaaccaaggctcgaggggcggaaggaagaaaaacacgaaccagaatggtcaggctgctcgatcgaagaaaatagttggtaatgtcccacgtggtgggcttcaaggatccaagagtccaatacaaagccctagaggacctcaaactagagtggtacaaaatgtgcgtaacaatgcaacaagagctcgtggtggggctatgagtgtaagagttaatagacctcgtgacccatatgcatttattgcacctcaaggattcaatgggccgagtggtggaccctccaatgcaatagatagtggtgccaacaatgataactacaacgaagtcgaaggcactgatgtctatgttggtgaagataatgttggttacgaggagagttatggtggtggtgatggtgattgtgactttgaagttggaggtgacttcggtgatgagggctatgatcagtcttatgatgacaattatggtgaaaatgatttcgaaagctatagcgacatcactggaggaagtgagtctatgtatgaagatggtgaatcttacgggactatggatgattcacaatatagtggtttcaatgaagagcctaataaccagtatgcacccatggttgggccggttggtggaccaggaatgaataaccagaaccaatacggtcaaaatggtagggcgaggaatgtgggcatgtatggaagaggtggtacaaacatgaacagatatgggaacgtgaaccaaggtgtaaatggtatgcagccgagaactatgggtggtcgacctctccaatataggcccaatggaagacctaacatggcaaatggaggagtacccaatggacctctaggacttggcactccaatgttgatgaatacaatggtgcaaggtttatgccaaagctttgggatgaacatgctcattggtggtggcagtgatgctaatggtggagcgggtgatggtggtggaggaggcttttttggtggtgaaacagaattctaaaagagatgaaaa

SEQ ID NO: 36245 - DNA, 3762 bp, Arabidopsis thaliana landsberg
ctttgatggtctaagagaaaaattcaaagcttaatatttaaaggttctttcctgaaattcacgtatagagtctaagacaggtatttcttaatgcatatataattaagaattcccaacactgatcccaaaaagactttgtaggaacaagctagagattctctcactctcagagtagaaaaacatgcattggcgatgaagtaacaaaagcacgagaagaatgcatacaacaatagagatcattatattttcagctgacgattaggcctaaattctcagtaatcgagtcttaaaagctatacaaagtaacatacaaaaaacttgaactggtcacatccacgaaatcctcaataaaaaagaaacaggtaaaaatgagaatacctgtgatgaactgaaagcagcacaacgacgccggaccaaagacaccagtgaatggaagatgaagatgagctgtgataacagcggaacaaagacttggaataagagattgattaatagatagagcgcaaaatcagggagccgataaccagaggtcagagaaacaagcctgaaaccggtgacaaatcagatacgctgcgatcgatacagaaacgagagagctcaagcgatgaagtagccgtataaatcggaatggtttctaccgtgggaactcaaattgaaaatattcaacagcgatcgatgaattacaagagaaacgaattcagagctccacggtggtggacttggccgaatccaactttaaccagattagggtttcgttgttgttcaagcgaaatatgaaaaggcgtagatgagttttttttttttttaattgaaaaatccaaacatctcaatttctttgccataacaaaaataaaaaacaacatgtatatattttttttttttggaaaaaagtaaaccaaaacaattcaagttgctaaaaaaaaaatacataacaattcccaaaaaaaaaaatggtagccttcaaaagaattgtgtatttgtttattatttttcagttaaacgtgttatcatggttggtattgatgtaccattttcaagtgttttcttcaatatcaagtgttctaatcttcatgattaacttctatgtattccaccaatcaggtagccaatacagagtgtgagtgagaacaatttgacttcaaaaaatcctctctttttgatacataacaaaaaaaaaacaggtaaatctatttatgggcacattgtttgtgaaaaaggagaagaaaactaagaacgaggcgtccaagctgaagcagtgagtaacgaaagatctttccatccaagcttaagtgtaccattatcatcaaccaaagtgtaaccatccgaaggaaacattcccaacagtagagtcgcttgtgtagctgcatttccagctaaagatatacctttaaacccacgttgttgcattttctccctccagctttcaaacttcacttcaccgcttctcgatggtcctccaaccgctaatacattccgtatctctttcgataaatagctgctgttccacgacatgtctctcttcactctcttcgccgtagcttgctcccagtgagtcaaagagtgcagagtagtaatgtattgcctctacaaatcttcctaagaaagaaccagcgtggctcaaatcttgttccactactgtcacaactttaggagctaatctgttcattcccaatcattaaccaaaaaagccactttttagaacatatctttcctatataatcttaaaataatttatagataaagagtgattaaaaggtaatgtttattttacctttggagtaaccagagagtgtgtgcatcagagccagtgacatcataaagagaatgttgaagccagtgaacagccacagcttcccttttcctcacattgagtctctcagtgtccaagtttccaactttctcagctaaagggcagaactcaaaaggcaggccaagcttatctgcgaaatccgaaagacgtttccctgtagcctgaagagcttccatggaagtaccaagtcccgtgagtcgcacgtgtggaggtcctccaggtctagaagcaagaatgtggaataaaccaggccattgaagtccctgcatgatgtccaagtcaatgatgtgtacactgtcttctttctcaaatgcttcttgaatcgcctgattcgctgtaaagtgtgagaatttcactaaagggcttatcccattaaagacctgaaacgcagagaccattttcaagctatgcgttgtgaggcatccaccgtgaaggcaaagcgcagtaaattccgagacacgagttgagtaatctcgctgacatagcttccgagaagtaagcagctactctctgcgctgaggtcccgtaaggagttgataactgagagatctcaagaagaagcttgtttgcttcttcgagattatcagcagagacagcttcagcacactgtagcagcaatgtgagaaggtgtaatccttcttcgtcttgcttctgcctcttaatctcttccttcctctctcttaaagcctccgccgtatttgtttggacggcgggaacagtggccgtcactgtctctggttgcggtggtgcatcggtggaagaattttctctttcttgctgctgaatcggaggaggaggaggcttatgctgttgttgttgttgttggtgctgctgttgctgttgtggaggagaaggattgttggagatctgatagagaggttcgaaagtttgaggtgaagggtcagaggaagaggaaggatcaaggagcatgagagatcggagcctgtattcaagaagagcaccgagatttgggttacaagggaagataatgtctctaacgttttggataagttgaggaatagagactgaagttgaggaatggataaggtctctgataatggcgtcaacccatacagtaggtgaagcagaagaagatgaagagtcttgatccattggttgtacggacatcataacattccgaccaccacggtctgaaggaaaaacgggaagaccagagaagccacaaacagagagtggtgggtttggttgagaagatacagtagccgccgccgtaagagacggtggttgttgtggtgtgacagtattgtagttggagtcaagaaggtgagagacacggcgaggaggacgagaggagttgttgtagtcagggttagaagacatctcggaagctaatctttttctcaccatcactaaaggaggaggaggaggaggaggaggaccacggttgttgctgctgctactaccggaagaagttgttctcagaggactatgaggaggaggttgaccaccgttgaaatcgccggattccgccatggagattgaagggttgttggtcgtgagattgcatggttataaataaggtaagaaaagggttaaatccaaaatcgaaaatttccaaacagaaaaaggtttggtagtagaaaagctagactcttttatcaatgctgggattcttaaattacttgatcgtcttcacgatctccgatgaggagaaaaagcaaaaactcagtgagggttgatcgttttggaaggaagtgggttggagatgaatcccggaaaaaggggttaggggtaattgaggaggacgaggaggacagtgaagcctggccgtatactaagtcgtcttccacctttcgaattattgtgaatgtcgcttcgtacatttaatgactctttctatctctattcatcttaactctttctctctctgtttctgtttttttcttcttaattaatttgagttttgaaaaataataaaaatgggaagagat

SEQ ID NO: 36246 - DNA, 1390 bp, Arabidopsis thaliana landsberg
  unsure (1)..(1390): unsure at all n locations
tgaagcttgactgtttgtcgcagtttcgaaactgcggtccgagaattaactgatggttggtcttaaaaatcgttgagatcacactttggtaatgaacgtcgtcgtttcttggatcaaatgacaatgtcttcacatttctctgttgctcttgaatttgccctagtctttgaactctactctttcttgcaccgtaagcaacccgtccagccgccccttcaacaaacgtttgagagacgcaatcgctggaatttagcgactggtgaacgcagttactaagctcgtcgtccatgagctgccagctttgcacctgagaagctcctccagtgattctttcggtcatgaaagaatcatgatcatctgctacttgttcatgttcttgatcgaaaccgttggtagttctgctcggagaagctgttggaaaaggctccgtactgaacataggcgcgtaaatctcgtcgcctagaatctgttgcggatcaagaacgttgtcgatgtgataatcggatcttgctggtaatattgtagcgtacggatcaggggcttcgannnnnnnnnnnnnnnnnnnttgtattacattcatgtcttccgtaatctacgagacgaaacacaccaagaaaaagccttgaaaaagttttcaattataactataccaacgagctagtaaaaagtacaaaagccgtattttcgcgttttgtcataaccaaaccgtggaaatctttaaaaatcgagactactaaaatattagtttgtgtgttcttggtgtctataccgttattcgacagattgaaaggtcaaattgaaatgttagaatacattgcggtcactctataattattctttttttctaaataaaggattttcataataaattattctaaaacattggaagcagaaaacacaaatatgggcttacatgttctgtggtaccaatctcaacgactcctccaaggtacggaaagcaaaccactgtcttaccgcaagcactctaaaccaccacaaaacgcaaacaaaaacgaacgattttagtgttttcaaatcgcaaaaaagtgttacatagcaactacatcaattactacaacttacttttgctagaagagaacggctaaacactttactatccgccgtatgagcgttgcacaaccatatcggttcaccgtttgcaaacgtccgtccaggcattctgcaaaaagacaggttcatttagaaagcagcaatgcattctaagcttaatttttccacattttttcttcctaacatattcataattattgaaagttaattagccgtgttcataaagaccaaaatgaaacgaattttttaattaatccggacagaaacaaacttttgtgatgataaataaaccgaactaaactcgaatcgaacacagata

SEQ ID NO: 36247 - DNA, 3854 bp, Arabidopsis thaliana landsberg
cccgactgcgtagtagtacctcgaatccaaaatcaatggcgaacgaccaatttatgagtggttggactgaccttctccattcttcgtcgaagcttctggagcaagctgctccttcttctcagtttcctcctcttcaggttcttcctctttccgctggttttgaggttcatcgttaaagattagttcgattgatttttgtctgtttcactatcagagaaatttagatcagttggaagcgttatcgaagaagctcaaggctaaaaccctgaggaacgaagctccttctcagtctattgctgccactaggttaatctcatttttaccgtctcattcacttgttattgtgttttgtatgcgaacaagaatttgaaatgtcttgaattcattgctcagctttcaaatgggacgtagctactacccaaaagcaagcgttaattctcttgtctttcttttttgtcgttggacattttgcagactactcgcacgggagggaatcaatgcagagcaactagctcgtgatcttaaatctttcgagctcaaggtgacatttttcatcttagctgtctctccttataatgtgcttcaaggattactttgtctattggtgtgtttttccttgagataagaaagtacaatatgtgagtaagtagttttctttttacttgtagtgaaacaaatttttcatatgtcgtcaaacgaatctacttctttagctgtcttagcaaacaaattcatgatcacttgctgttgtctgactgtgtctttggtccgactattggtattgtaaggcattggagtcccacctttgtatgcttacacatctctcagcttgctgtctgctattcaaatgtgattattcttttttgccactatgtgatgtttttatttattttgaatactcttaaaagacaacatttgaggatgtgttccctgctgaggcgacgagcgttgaagaatacctgcaacaggtacttctatttctccaaggtttactatatctatcatcatatagattgattttcttggcgaggattggtcgatatgatgtgtattgttattgttttgttttaggttcatgaaatggctatggtatcagctattcaggaagcccaaaaggataatgttcgaagctttaatgactacatgatgaaagtgttggaggtttgtattctggctatttttaattttaatttaatgataagtcactgtgatacaattctgcaatgttgttgtttgtcaattctacatttgtactatgcttttatctttgtaaagagacttttcatggatgtggatggtttgctaagtgatatattagaaagatatggatgctaaatattgaatgtgaattttgacttgacaggaggattggagaaaagaaaaacgtgacttccttcagagcctcagcagaatatcaatgctacctaaaacaaatatgattgatacaagcagagaggctcatgctggtcaactagtgccggtgggttcgagtcctcgagtatcctcaactccaggcaaagaactcgtggctctggctaacatacccattcatgagaaaaaagcatatgtctatggggaggttgtgaagaaacttaacacttcaagagaacgaggcatgccatttagagtatgtatttcctataccttgtcttaaaacttagtattggttcacttgaattgaattactgttgatacttgtagctgaaaaaaattcatttccttatctacttttagaagtctagctagaattgttataactttctgttcggtatgcactctagctttcatgcagcagccattgaagctggctaccctcatattgattgtttggttgtgctttctactgatcctatttttacttttgtatagcctgctatgtgttttaaggacgcttatgatactcttggtgctgaggtaactcgtggaaaatcagtcaacatgcagaaaatatggcagcttgttcaggtaatcttttgactggaaactatatcttccagccaaccaccctcttaaggattgtttttatctttccacctttcttaatttcatgcaaatgactgattgttgacaaactttttccaggcaataacaggtgaagattcagcagttcgacagggtgtttcgaagaggatggccctcgcgataggtgcaagacatcatttacaacatgggcatgagaaatttataatggacacaattcaaactcaccctacacaggtatccattttttgtatacttaataagaagagttaagacttgtatgtcaatacatattttgattatcctctgcctcaaatggttgggtgctgtctgaaaaggttccatgatctttcaatcctatttcaagaatgttggtaatcattttgacatgtttcttgctttttatattcctgttctaggctgctcttggtggatctgttggaaatttgcaaagaattcgtgctttccttcgggttagtgtcccagattgaaaccacacagaaaatgttcatagggctgtttagctttcttattttcatgttatctatactgtgcagattcgtttgagagactatggagttttagattttgattcaactgatgctcgtaggcagcctcctgttgatactacttggcaacaggttttggattatctccctcttgctttgaattttaaaccttttcaggaccatatgattgagatagagagatttacactgcggacctgaatgagttatatctatctcgtaaaccccagatatatttttgcttgcgaactgggtattatgaggaggctagggaaattgctcggtcaacacggtcatctcagcaatttgcaccactggtaggtttactttagattttgatatattatacaagcgttttggaatcagctctttctttacatttcctttttttggcagcttacagagtggattaccacagatggtatggtggctgcagagtctgcagctattgcatcagaagaatgtgagaaaatgctaaggatgggcgatcggttgggtcgaacagcttatgacaagaaaaaactcctactctacactatcatttctggttcccgtaggcaaattgagcgcatactgagggatctatctacactctttaacacaattgaagatttcttatggttcaaattgtcatgcataagagacgtcactggtggatcctcatctgtggtcctgaatgatggccttgcgccatacagtttggatgatcttcaggcttatctcaataaatttgagccttcatactacacaaagaatggaaaagaccccttggtatatccatatgttttgcttctcagtgttcagttgctaccggccatcatgcacttatccaaagaagcaggagacggagggtataatattgatgctgttcatatagctatttctttggtggatcattccgttttatctgaaggctctgggactggccacaaactaagtgtgatggattctaatgctgaggcatctagcatgattaggcaatatgggtcaatgtttttgcatcacggagatctccaaatgacggtagagtattatgcacaagctgctgctactgtaggtgggggacaattagcttggtctggaagaagtaatgtggatcaacaaaggcagagaaacctaatgctgaagcagctactgactgagattctgcttcgagaaagaggtatttactttttgcttggagcaagaggttctggtgaagaaggtcagcttggaagatttttccctgattctagattgagacaacagttcttggtcgaagctgcacatcaatgtcaagaagctggattatatgacaaagtaagtaacttctcatctaacattgtttcgttgcacagcaagtaagtc

SEQ ID NO: 36248 - DNA, 3313 bp, Arabidopsis thaliana landsberg
aattcagaacaagaactgctttctcgagattcttccataacagaacctttaacacaatgacaccaaaaaagaaaacataacccatctctacatgtctcaattgcttcaaagaaatttacaagtaatgagtaaaaagattaagacgctcctatgctcaacagatgagtaaagtaagcatctttaagctaaatatctccattaacatcatctaaaacttcaagagtagtactatgagcatcaaaatcatactcagaatcgaaagttccagactttaaatccgttaaaacccaaaattataactttacaaacaaatttttacagttctatacacttcaaatgagaactaaaatggaaaaggagaatcatcgagtaccttagatcacaacagatgctttcgctatcacagagcgtctcgggagagaagaaaaaaatcgctagggtttttgggattcagaggtaggagaagatgcagagattataatgggctggatatatgtctgttaggcccattaacttttctttttagcccgtttagctaattgtgtcttttcttttaccaactctctctaatgatatttaattatgattaaaaattccgacaaagagaataatgttttatgtcatcaatggcgtgtatccggcagttaccaaacaccggtccactcacaccattttattaatggaatatttcaatggagaattggtaatatgttgtagaatgagatcatattattcgattgttttcttttttgatatacaaatgtttttttgttagacttagcattgtctctatcctaatttgaataagcatatgactagtcttttgaaaatttcagtaaaacgttttccgcaaactcatcacaagttaagcagaatctgaaccgaaatctaaatgatcaagtgatataacatggagattaaatcactataaatcgttatgtaatttctttaaatgattgcatattgtgggattgaacttgaagttatagcgatttaacacttttggttctagtccaaacctactttgacactacacacgggtttaatatagtattacttgtgtgtataattttattttattttgcaaacgagaagaagccagaatcaagtcgttaacccatgcctttcaattacccaatcacctaagatattttttttatattacttcctttgacaagttaatccacttccaaatatactataaagttgcacattgacaagaggttttagcagaagctagaagaagaaaggagaagaagaaacaaagagagaagatgaagaatgttatgctgattattgacgagagcaacgcaagttatgatttactcatttgggcacttgaaaaccaaaaagataccattgagagctccaaagtttttatctttgcaacacaaccacaaaattcctttactcctcctaccgtactttcttcatcagtcggctttgctcaaattttctatccattttcacctagtaagtcattttatcgactaatttgttgggagttttcaaataaacatcaaaaattctatccattttcacttagtaagtcttttgttgaaacttgatcagtttttatgtgtgttttgcagattcagaactcataagattggctcaagaaaagaatatgaaaattgctttgggtatattagagaaagccaagaagatatgtttaaatcatggggtaataatctattgactgaatcatttaacccgttattaatacaatatcatatatatatttttaaataccaaagttttaaaagaaaaaaatgaagttcttgttgggacaaccattgttgcaatattttagtctcatgatctaatcataatcatgttgaaaacagatcaaggcagagacaattactgatgttggagaccctaaagatctaatccgaagataattaagaacgaaatatcaatttaatagttacgagcgatcaacaagtctcaaaaagtaagaacatcttttaatttcaaatatcagttaaaaaaacttagtattgatggaaaacttgagataacgtacatcttttaattaaatgcaggtgtacacaaaatacagattgttctcttcttgcgtgaaaaagacttcgcaaagattaaagattaaggaagttacaaaattcaccaatatatataattttctatgtggttaattgagattgtgtaatgatttggggttgtagtttcaggtgttgatttggggttgtagtttgaacttataattgtgttatgtgtataaatatttgtgtttatatatatcaagttagtataaatactataatttcttatcgtttcttttattggcactggtgtcttgatcatcccgactaattcagacatgagcttatctgaaaacccactttggacacaaacgaattgatacgaacgagtaacgactcttttattgaaaacgaaaaggcctaaatttgctgtgaaaggcccaataaacaattaagtgattatgtaagacgatgtcgtttaactcttaagtttctcaagaaagttatctctctctatctatcttcctcaaccttatccttgaagctttgtttcatctgttgttccctgtgaccatggctactccactctcaatctcatcaaatcctctcacctcccgccattgttaccgtctccacttatcttctacttcattcaaggtaatctctcattcttctacaaatgtcaattttgaatgaatccgtaaaattggaatttgaaatgtgtacagggaaatgtaagtgttttgggggcaaacccaagtcagattctatctctgaaactcaaccaaacccttaaaacgagaaaccaacagcaatttgcgagaccccttgttgtggttagccaaacggcggctacgtcgtcggcagttgtagctccggagagattccgtttggataatcttggaccacagccaggttcgaggaagaagcagaagagaaaaggtagaggtatctctgcaggacaaggagcaagttgtggttttggtatgagaggtcagaaatcaagatcgggtcctgggattatgagaggctttgaaggtggtcaaactgctctttatcgtcgtcttcccaaacttagaggaatcgctggaggtaaagttttgtttttgtttggtatccaagttttgtgtagcccaaatgttcgatgagatgtctcatccaaaaggctctgtttaaatttggtgatgctgctttcagttttatttagttagggcacatttgtttcatagatttaatattgggtaagagagccatgaattgacgactatggatcaagattgtagttagtgaatagagatatttcatgg

SEQ ID NO: 36249 - DNA, 2185 bp, Arabidopsis thaliana landsberg
tcacttgatagaagagaactgttttgccacttccacttatcccagagaggagtacagtattggattttgtacgtctaaacaaacgaactgcagaaatcagcaaaagtgacaacattaacaaccaaaacagaggacatacaatgcaataggaaatctatacctaccaccatagtaacatccaaatcctaaaatgaatctaataccaaataaggaaaagatcaatgagaagaagaatgtcgaggtgttcactacttactagataagagccaaatggtagctaataagagaacaccaatggcagtataaagctgaggtggtggtattttttgaacaaattcaagtccttgtttagaccactgctctgccacaatcttcaaatcttccaagttgtccattttctgattttttttacaccttgagaacataacaatttaccactattaagatcagacaatatacaatcaaattggagatcaaaccatcaatcataaaacgaagaagaggaattgaatagaattgatgcctataagtgaaattagtcaccgatcataaaacgaatgcgaatgcaaaaaaaaaaaaaaaaagagaaaattttaaaattgagatcaatgaaacagcgaaagaattagagaagaatactggaaatttaggactcagtgctgcgaatcaatgcagcagagacggtgatggagagacgacgacgacgacgccggcgaaattgttgttgttatttgtgagaattgggactgataagggtttcttgtatattttggaattagacaagggtattttcgtcagatatgcacaagttaataagttatgatgagtcaacaacgcattgaattgagtacggttctaaattggtaatttatacctaccaacttgaaccgaaatcgattggttcagatttacagtaattcgattgattacttgtaatcacactaattcgatttaattcgtacaagaaatttcagtaatatcaaagttaacaaaaacaacaatattgactttttttttgggtccaaacattaatatattgacaaatatacattttttagaagttttaaaacaagattacaagagttactttctagctctcataccttcctctgttgcttgtgtttgagcggaggtttcatgtaaaaatttcttaggagcaggctgaatcaatattcacacctagggatgttagcaattgtgaatcacaccacaattgctattttgatcatgctttgtggagtcatgactcatgaaaattgctaattagctggtcttgcggagcgaaaccaagtgttttccaagcaagctgagactgacactctggtcgctgaaaacccacaatgactgagtctgagtgttaatttggttcaccgtccaccaggagtaaaagaattgagagattgtagctgatgaaaactctaccttcaaccacttcgtctcaatacggcttccaaataagagtaatctacatcagccgtttgattcaagttcttcataagttactcggtaggtcgatcccaacctctctcgacctgcctgcaccaacattcaaacacaagaaaacctatctttagtctttacacttgagagtttgttttactgttacttaactggtgtctgcctttcgagttggtcaataaaagattcatagttgtgctctctttactaagattttcctacttttttatttaacatcatgttaaacaaaacaaaaaagtagactttgaagtgtaagtgactttgctggtaaaaaaaaaggttaagaagtgcgtgagcttataaagaaaaagagaatacttggcaaatatgtgtggagccaatgttgccttctccgtcttcagacttgaacagtagaggcagccaaaacatctcctttttagtctttatactctgatttgaggacccaaaacgatctattttgatccttctcaagcgtggcaatctctttcaagagattcttaaacaactgcttgtcattaaaagaaactatgtccctgaaatggttgacgatgctggtcgtgtctgcacttccacctttttgctgtacaaagctgcatatctttcggatcaggacctcgggctgcaacgaacctactctgctgcttgaacccgaagaagaagggaatgaagactgtggctgctcaagcccaacgccaatggcttgttctctgcttccgcggattct

SEQ ID NO: 36250 - DNA, 10129 bp, Arabidopsis thaliana landsberg
attgcaattctacaaacacacaaacttttaattcgaaagtcctttgttttcagtttataagagatcatagttggataatgaaatttttgaatagaagtggtgttgaagcctagttctctctagactacagaacccatgaatatgtgacttcacatgttatgtacatgagcttaacaatatgctgtccaatttctgtttgtctcactacacatttccatcttcgcaggtagtaggtgaattgctcgatcatctaacaagctgggacgctcttagagctgtacttcccgttggaaccgtgagcggagccccaaaggttctctctcactaaaacaacaaacattacacattcaccatactcaaaaatcatttgttacaggtaaaagccatggagctgatagatgaacttgaagtaacaaggcgtggtccttacagtggaggctttggaggcatttcgtttaatggagacatggacattgccttagctctcagaacaatggtcttcccaacaaatacccgttatgacacattgtactcatacaagcatcctcagagacgtagagaatggattgctcatattcaagctggagctgggattgttgcagacagtaaccctgatgatgaacatagagagtgtgagaacaaagctgctgggctagcacgtgctattgacttggctgagtctgcattcgttaataaaagtgatacaacaatctaggtttcttgccacacaagctacgtcctctaaaataaattagttgatatatcatttttattatttttatgttgaatcatgaattacggggatatattaagttatattaaccagtataaattaagaaatatatttctaattttatcaaaatctcatataatggaatcttatttcaaattttcaaaatttaatttttcatgtccataatggttgctgttatggttatgctataattggtcaattggacatatgtgaagtgaaagagtcaagcttttggttcaggtcaataaaaattgatatctatcaattaacagtataatattaaagatgttttctaatggaataattaagttctagttgcctcaaaggtttgagtcatcatctcgtgtgaataaatacattatacatacaaaacaaaaagctctttgtgatagtagtagtaatacatgtcgcaaacctatatgatgaaatgaaatacgtggtaagccgtatagaaacccctatggtaccaaatattgaaagcttttttgtagtattttcaatcttgataaataaaaaggtaaaagaaatttgttattcacgaaaaaaagttgttcttttatagcttgccaagtggccagatagacgctatatgctaattgttactaaactactaatccaagtggacgaatgaaataataccacaataggtacacataatttatagacaaaactattaaaagaaaaacaaaattatccaaaaaaagaaaaagatctggtgacgtaatcgtttggaatagactaaggttccttccttcaacgtaaacaacgctcattgatacacgcagctgacgtggacggatcattctgccgcgatggcctctggtggctcacacttgaccttacctttttgtttctcgtgtctctctgacttttctttccacctgagtttacagtttttttaggtgttattatgtgcatttcgttttccttatcaaacataaatcagatgttgacacaaataatatcaaatttgaatctgatagaagatctttccccaatttaccggtcgttgagctttaagcactagaggcgtatgtacataatcgtgaaacttgatatccattgagccttaatttattactgttatgtttttcaagaaattttttgttgattgatgatactataagtttagcaagaattatccataaagaccacaacatacatgcttctcgtgagttcacatataagaagtttctttcaatattagtcattagtcaacttcgcacagccctaaagttatgctcaataatgtgtactcgtttaaaatgggttgctaaattctctaaatggttatactgacaatcagtcaatgtttgtttggtgtgatagtaaggcagcaattcatatagcgacaaattcagtctttcacgaacgcaccaagcacgtcgaagttgattgttattttgtacgcaacgaggtactatccaaaaacatatgcctgttacatgtacaaagtcacaaacaacttgcagatatctttacaatgccgttggggaagcaggaatttgatcggttctgtatcaagttgggcatacaagatttgcacgatccaacttgcgggagggtattaacgactcaacggagttggcggaccaagtcatgatcccgacgatcacgtaaccatataaggaagttgctctgtttttgatacaatctgtatacgattgatcaattgtgattatgcattgattataatttaggattttctatgatctcttctatagcctataaaagacatttaatatgcatcaaagtaaatacaagaaacaatttacagtttctaaatctttataatggatatagttgagtgctttggtatcgaatctaggttattgtgtgggctagcggagaattacatagtggtcaagatttgactagaactatttagtgcatggatttggtttgtatgatcaggataataagctagagagattgggagttcctgtgttttcaaacatcttccaggggtttggcttttgtgttttgcttgagggccaacaaaagctaagtcttggggagtttatatacctcgattttcactgcttttagctatgatttaggtatagtttttaaagtcctttcgttatttgtagagtcttttctagtctttttcaggtctttacatgtttgggatgcatttggagattatggagcattctggagcaaaacagacaatttaagctgcagcagcaatccggagacaaaaattgacgtaggtgtcgatcgacacaacccctgatgtcgagtgacaccaacacctgacggcaattcaattgcgcaacttattcgtgttttgaaaatttccaaattcggctcagaactctctcttatatccaaaaaaggcccaaacgtttttaggacttatatattgatttttatggtcattgtttagaggcataactcttattatctcttttattcttgagagcaaaaccctgtggagactccctttagagaagattcttctaaactcttttctcttattaatttcatcattgatttcttattcaataatgttttgttcttctatgatcatgcttgagtagtcctcttgttgggtttagggattctcattagtgataaaaataaattagtagatcgaaaacccttttagggtaatatatttagaattcttcatctttcattgctcttaatgctactttaagagtaactaactagaacttgattttaggataataggtatgcccaccataggtatctattactggaactatcctagatgagcctagtatttagatgcgtgctagcgtccattacttaggtgaacttatcaaacctgattataatgcttgcttagttctagggatttacaagagagttaggatcaaaactattgagcatagtgagtttcgcggaacaccaccggttactttatattagtgatttgtgttctagagtggttcgataataatcctaatttactgctagatatactattctgatatttcctgagaatttccctaaacccgacgtcttaatcatctgaatctacaatctcttttatttcttgtcttgtcttttacttttattacattctctgtttagctttattcgaaactattaatctactgtgtgatccaataactttgtggaattcgatccctaagtgctataacaacctctttatttgagagagtagtcattagggtaatttgactcatatcaaatttggcgccgttgccgaagttctcttcgattcaccattagattaggtgtagaatttagtctaagcttttcttttcttttgttactcacgcgtttttatttcttcttcttcttgtgtttcaggagtttaaggaattcaaacgcaactacaagatgctgatagtaatacctgatactgctggagtgttacgcgatagagctggtcagacatacaatgaaaagggtcagaaaatagatgaacagggaaacctgataccagaaattgccgattgtgttgatcgacgacaacttggaaagcaataaaggttagttttctcaacaacttttataatgatgcaaggtccgaggagctgagaatgaagatctctaccttctctcaagaagcagctgaagcatttaaagccgcttggatcagattcagaggatatcagagagattgcccgcatcattgtttcagtgaggttcagttgttaggtatcttccttagaggagttgattgaaagctagtaatgggaatttcatgtcaagatatccagaggatgcaacaatgttgattgaaagcttatcttctagcattagtaccaacaacgttgacattacaaggaaaacgcaagttcagtatgttgcacatgttgaaagtttagctacttcagagaagatggatcaacagagatacatgagctacaatcaacaatctatacatcagaaaccggttcagcaaactaaaaacttcattcagaatcatgcttcttcaacccaaattcaccctccacccgagaccactaggaagattgaatctcttctcgaacagattctcaaaggtcaagagaagcaaacaacagattttgatcacaaactggttgcattatccgacgatatgaataggaagattcaaatattgaacaatcggatcaagcaattgactacaaacaaagaagatgttcgtgctattgagttaaggagtggaaaacagccaaatccagtgcttcaacgagagcttcctgcagccaaaatcgtgaatttggaagaaaatgatgttgcagtttttacagaccagacaccagtgtcgaccgacactactgggtgtcgatcgacaccagccacggtagacactacagaacgcgacagtgtcgaccgacaccaacagggtgtcgatcgacaccaacccagtccaaacctgcgaattctccaaaacccgatttcagctgcagcaaaggtaaccaaacccaaggttccttttcccaagagtcctaggaattccatataggagcttgatgatgatgctagatgcaaagctatgatggataagttgattgtagagatgccactcatagatgctgtgaagtcttctcctatggtcagacagtttgtgaggaggatggttactaaggatttgctaattgagaaagctgtgatgaggatgtctacacaggttagcgacattattcagaacaagattccatagaaacttccagatccaggtagctttgttctcaattgtggtatccttaacgagagttttgagcgatgcttgtgcaatcttggttctagtgtcaacttgatgccacgttcagttgcactttggcttggtttgacaaatttagagcctgcgcaaatcactcttgttcttgctgatcgatttgttcgtagacctgatggtatcctatgtgatgtacctgtacaagtcagtactagcaacattcctaaatattttgttattttatcttataagaaagaacctaaagatcctctaatcttggtaagatctttcttagccacaagtggtgccattattgacataagaaagggtagaataggcttgaatgtacgtgatctaaaaatgcagtttgacacgaataaggtggttaagaagcctaccatcgatgggcagactttctatgttgacactatctcgtctctagatgaagaattcctggcgggcagacgtactgatcgatgggcagacatgctgatcctttagagcatgctctaataccttaaatagacaaagtttcccacgggtatagtaagctgctagatagaaatgagcatgtaatacaattggttgttcaagaggagttaattagcacatctactaaagcagcaacagttggcgactggagcaaaataggcttctaaagttgatctaaagccacttcttgtcattgttaatgcttatttaaacaacgcagagcttactttattgctaagcaagctctcttgatgatattacaggtatctctcccgacttgtgtatgcatagaatccacctcaaggatgagtctaagcccttagtagagcatcagaggagactaaacctgaatctgaaggatgttgttaaaaaggagatcatgaaattgttggaagctgggatcatctatcctatttcacatagtgattgggttagtctagtgcatgtggttcctaagaaaggagttgttacaatggttaagaatgacatgaacgagttgattcctacaaggaccgttaccggccacaggatatgtattgactacaggaagctgaacgctgcaacaaggaaggataattttcctctaccatgcattgatcaaatgatggaaaggttagctagtcacaagtactgttgctttcttgatggatactcaggattctttcggatactgattcttccagatgacaagtacttttgctttcagacactttcacgtgtccgtatggcacttttgcctatcgcagaatgcaatttggtctttgcaatgctcctgcgacatttcagagatgtatgatattgttgaataatacatattttgctttcaaaccatactgaagaagtcaaagagagaacaagtagttacatgtgaaagaagttggtttgaatgtagttgcttttggaaaactaagctataatctagagtaagcatgcttgtagtgggagcagcctggaatagtgtattcgtgtaggtgttagaagctagtgttttgtgttttactttatgttttgctataagaatgtatgtgtgtgtaagaaagaattatggaaaaattttaagaaaaaacagagtttatgcatttctctctcaacttctaattcgttttaattcacaaaacatgagtgagaatcacaacaggtgttgatcttcacaaacatgattgaggatttcatggaagtctttatggatgacttttctgcttattggtcttcaatagaagcatgcttggagaacctgtgcaaggttctagctagatgtgaagagaagaatttggttcttgattgggagaagggtcatttcatggtttaggaaggtattgttcttggtcacaaaattacaggtgctggtattaaggttgataaagccaagatagaggttatgacaagtttacatgcactagttagcgtgaaatcagtaaggagttttcttggacatgctggatttgatagaagattcgttaaggattttggtaagattgtcaggccactaacaactttgctttgtaaggatgtgaagtttgacttcaattctaactaccatgctgcttttaatcaaattaagaaagctttagtgagtgctccaatagttcaaactccggactaaaatttaccttttaatttaagaaagctttagtggagctgttttgggacaaagcaagaacaatagacttcatgttatccagtacgcaagtagaacacttgatgatgcacatcgaaattatgcaacaacagataaagaattgttagctatagtttttgcttttgagaagtttcgctcttatctggttgggtcaaaggtgattgtgcatacagatcattcagcactcaagtaccttatccataacaaggatgctaagccaagattactacaatggattcttcttcttcaacagtttgacatcgaagtacaaataagaaagggattgagaatggagtttctgatcatttttcaaggatcacagatgaagataacgtttctatcaatgattttctgcctgaagaaagtatctacttggttgagacaagtttgtaggaaaatcttggcagctgcgattcatgcgccgatgtggcagtgttgatcaacactactttggtgtcgaacaacaccttatatgaagcgaatgataatcgaccaactaatgttgtcctcaatactacctctcgacacaatactttagtgtcgatcaacacccctactactattgatttacactcgcctcatctgtattagtgaacagagccagaattatcctcaacagttagttgtcgggttagtcaaactccaacaagtacaagagctattgacaagctaaatagttgcaccattcatacttcattcgcatcctattaagctaaggtattcaccctcccctcttaaacctcctgatttcatcaataagactttaaaattttgcaagactgtttcacggttaagcaagcaacgagtttcttgtcaagcatttgtttattcttttgatgattgtttacgaaaaggagtattcaaccatgcatgagtcccaccctgctgatgttcctcacatccttcatcgttctctcgcgccaacagcttatacaccaccatggatgataagaaacatatccaagaagaatgtattgccaccttctaatccacctgatatatgaactccagcaaagtcaagctaatgactaaaaataagcgattagtgggaggcaacccactggtatgattctttgtttttttttgttccatttaaggttttcttttattttatttatgctaacttcggatttgaatgtcactgggaacagtgtcgtttaagtctgggggaggtcgttgctgactacgtttttctttttgagtcttatttttacttttatatttggttttctgtcaatttattgggtcaaacttttgtagggaattatgatatttctctcgagtatattgcctagttgattaatgtttcagattcgactcaatccgactaatggaaaatccaaagggcaaactgacagactaaaggatatccacatttccaacataatccactaagccttgagctaatctcactgctcttccttttacgtcgtcaaaacggttagtgttcatagaacttgactcctttctcatacctgataaatgagaccaatgtgaagagaatagtattcctctcccttatatactaaaaaaaatatgaaaagagagaaattgagatgatgtcctatagtgtaaagggctagatatatttcctttgatcccatttattttacattctaaggaatcataaattgcaaaggttggaaatatgcggaggatacctataacaccccccggaagcatcacgatcgttggcgaccgcctggagacgaatctgacctaagattacccaaggctaagcccgaccacaaaagaccgctcttcgcgaccacgagacttagaggctttgcaacctgtactgcgaccgcaagttgggattagtccagactagactaatgagaggatacacgatttcttattcatagataatgtattgaaatacattaccaaatacatgtataggttttgggtacaaaaggcgaagcttaatcgagtcgtacatactagtttacaaaaataccattttacaaaggcaacgcaaaactaaatcggcttccctaacatccatacttaaaataaagtttacgtctaaggttatctgcgaaagagagtggggggatgagctctactcgccctatgagtcctagctccctctaacaaaaaataaatccccaactcaaaacccaatataacaagtagcatgcagaagtataacaatattgaaagcataacatcaagcaatcaataaaataaacaatcaagctggttaccatgagtacgtcgagtacatggaaccacatgcaacacgcaatcaaacataactagaaacttaccttgctgaacggtttagactcgatctaatcctaatcctaatcagcctctaatcgcctaactaatatactcggcagaacttcggcagtacccgaaagctcctcgggacgaaccagtcgtaccggactctcaactctcactcacggacttttcagagagattttagttcgtttggtgtgaatgaggaagaatgaggcggaatgactatttatagggatggtggggcggttcgggaagcacgaggtggcgagataggctcaatcgagcttatccgtaactctatccaaaaacccgcggatagacttga

SEQ ID NO: 36251 - DNA, 9033 bp, Arabidopsis thaliana landsberg
  unsure (1)..(9033): unsure at all n locations
ggtagtggcctttttattaaccagaagagagctctgttagataagtttttccccaaccatacagtatattttggttatattataacttttatacagcataatgcgggacaataacaaggattttaccatctacacgtcaatcagccttagttgattgtatttcatcgacaaaaattgcaaataagttaatgtgatcgaggttcaataatgcatacctatggaggtcggattcagctggtgatacagtctacgacttttcaggatgcccatcttcatcagtccatcacacaacaactcggtctgcaaaccacaaagcatcatctgagtccaaacataattttgtttgcaaacaaagcttttaagttttctgatggtatttatgaaatccttttttttttttttttttttttgtcgaaatggtatgtatgaaatctctgatccattttagcttctgaaatatttgctaacaagccttcgacagaagtagaataatattttcacatcatagcaaacctgttaagagtaaacggtacattttgtgtgtttgatacatcttaagtacaaagacacggcttaagataagtttgtaattaccgaatatgtgtttagttggcggatggttgtaccaggcttgcattgttttatgcattctttgtttgtctgaagtataagatcatatagctcttcctggaaaaaacacaaatgtcaatattttgatagagaaagttttaagaaagcagctgtacagttacttttcatctgtgtaacataattgtgaaatcgagcgaaggtcaccaaaaaaaactatgtaacctgcacatgtccaaattctgaagaattcctaaataaaaattataaggaaaaagctagcctgtgaaacgtatatctcagaaaaaagtaagaagtttggtagtagagaatgagatagtaagtaagggataactctcggttgcatcatacaaacaccaccggcaaagcacaaacgtaaacagaagaatattgaactaccagacaaaaaaagatgaaagatgagacagcagaaacatcaacctgaacagaactgaattttccgcaaggtggccatgtccgagtaagatcactaacataaccatgtaactcacaacccatgtccatcaagacaagatcaccatctttaatctgcagataattataaaaagaagatactggtttcaggaacatctctgtactagcaatcaaatagggttttgtcaaacttacacgctgatcatttcgtgaatagtgaataacactggcatttgaaccaccaccgactacaggattgaacctgaggaataaatcatgtcatttttcttgtcactagaataagaatactaggaaatacttattgtaatagaccctgaatcacatatttattcatggaataattgtcgagacttacgccattcgctgagcacctcttacccggcactcatattcaacctgggctgataagatgccttcatcaggaaacccctttgaatgtaacattgttttcagaagaccctgaggatgaaaagatcaaaatcactccatacgctcattgtctgtaatagctattattttcaacaaatatgtagaaaatggttcatgacgttttattggctctatgttccttttccttagcactttggccacaagacaaacgtaaaatttctaatatattcactttcacatatcattgagcaaggcattgctttcatgagcctccaatcacaataaaacaccctcaaccaaaattgtcccatcaggccatggcttgggagctttttatgggtgtgttcgtcactttgtcagatcaattcttgagattaaattcactatatacacacacaattgtctgcaaaagttatcaacttaaccaactttccccattatctcttgtaaatttctccaacaccttaaatttccagttactctctagcatctcagttgtactaaaaaagctaaaaacagaaattttctaagcataacaatggctttgttggaatacaggaatacctggcacgcaattgatgcagactctctcatcaatttgagttctgcaggtgatttaattaacctcagctcatgtgttaaacttgaaagagttttcactttgccaagagatgctgaattttgaaagtcatccaagtttgtgtatctttgcgaggccgattgaacattatgaaacacttttgaagaatgtcttatcatgtctgaaagaatctgtacataaagaacgtgaaaaataaaacaaatctcgcgttacaaaagtaataaagtctacaacataggaaaatttaaaagagaggccacttagggaagaaatataagctacctcgggtaatttgcttatcggatatgcttgatctgccttgaagacctcggacgctgcatcaactccagcaacttctccttcccaagcaatatcctacatgacaaatcaattcttataaactgctatacagaaatcaaaaccactctgtatacaaaaactcatgtactaagaaatcatcataccttaggagttgattccggcatgaacatgcataaaccgcgttcatcacttaaaacagccacaccacctggttgctggcagccagttagatacaaataatcagcatcttgtctgaacgtatatggaacaacgtcagtcatcctcttcacgggggctgacgaaatgatggctaaactattctcagggagaagctccacaagtttcttccttctaccaatgtattcctcaattcttattcctggtgtgacctctctttctgccattaactgatgggaaagagcgaaccatctgagcatataaatagcatttgcaaatccaagagaacatatagcacatgagagttacatgaggatgagatgctggagttggctgaccaatgtctctgaccgtttgggttgaatatgcatttcgactaacgacctgaaaccccattttaaaaagaacatgtctctcagtagattttaaagcacatgtagaaacagtatcagttgatgaaacacaagttattagcatcggaggtgaagtagtctccgaaatcaagtctcaaaatttctgcaaactttatagaaagtcaattcccattcaaaagatgaaactttatggtacagaagatctatgcacttggagggaacccaaaaaattcgatctttaatcctcaaatatatacaagtcttcaggaacagagtatggtaatgaacaatcccaacaaggaggaggcaaattacgaagaaaacatgaattgggagcattacctgagttctcgatactctccgaactagattccgcgcaagnnnctgcatctcttccccctcacagactcgcagactcttgagaggatcgaattggacctcgtatgatgttctattggtctgtctctggtctggtaagcttcagggtttagctgttttgaagttgcgttctctaaacgtcgcgtttcagggttttaaaacgctaccgcactttccgaatcgctgaatcatataaggctcaatgtctttcttttttttttttttttttttggcctaactctggctttgagagagacagagaggtagagagagtaacgatggctgctgtagaagaagtagacgatgttggaagaacaatagaggaagagactgtgtttgaaaaaagagaaagaggagaggaagctgaaacattgactccatgggagcaacactccagcatcataagcatccctcgattcgactacaaagctccctcttctctgcttcatcattctcattccggattcctcgtcacctgcaacatcagtatgatcttctttacaatactcttttgtatcatcctttttagtttctatgtgttaatttcgttttgcgacatgaccttcaatttctcgaattcctttattgtctccgagtttatgacttgtggaatctgtgtattggactaaacgagagtcgaattgagggattgaagttaaactatttctgattttcacttgttatcagaaagggagaaaagtgctactaaagaggtcatgtccatccttggaaaggtatcgtcacaattctccatcattagtgaggcaaaagtttggatttttgttccttcatttagaagataactcagagtgattgataaccaattgtggtagagaaacactatatttgaaacgaaagtgattataagtgcagtggtgggggttctctaatgttcagcttgtctcacggaaatcaaacttttgatttgttcagtatattgggtccatgcatgaggagaaacctgaagttctaaactctactgcatccaaaaaacaaaaagtttgtgcacaagagacagaggaaggcggagagaagactgtacctcttgagaatgatgccttgcaggaaacaggtaactttcatttgcggatttgagcatattcaaattcttgtttttttttggcttatggtcttgtctttcttttctctttctgtgccttgtttaggtgaaaatccaaatgttgaggatcttaaattagcaaatgaagaacacaattctctcatgtcattggttaagctaacaaagagtggcttgcttctctttactttccctgttgaaaactctcccaatacaacgaatatcgtatcacgagtcttccagtctatggaatctggagctttgaaggcaccaatgtaagtctatctggtgtaatgctagttagtgaacctttggtcaattgattaatcagaattttatcgccacttgccttagaattcaactctaccttgaaataagcatgcttatagagttctgatttagtctcgaataatttttcaagtcttataatcccaaagagtggtatctgttacatatcagacctatttcattctttttggaccatgtagttatttatccactctgctaggaacttttggtcattatcttctcagattcccttgatgtaagcatgtctttgtgtcgaaacaagtaacttatgattcattgatgcagctggtgccatcggatattcccagttcaagctacttgtggtttgacagagaaagaacttcgggaaacagtatcaaagcttgttcagcggtttgtcaatgataaagacaatacactatcaaaacctgtgaaggtaagaaagagtttccgttgtataggagtatatgttatgaatattgttagattcatggcaatggttaataaccacataccaccatatagtttgcagctgggtatcaacgtagaggtgcggaggagacgaaaggaaagattcggaaagacgcttcagatgttctagttcaatgtccgttgctggaccgcattaaatgctttgaaactgtggcagctggagtgaaagacattgtaccagattcagttgtggatctcaaatctccagaggtagtgtgtatagatagaaaataattctatcttcgttgcatcatcccgtttataaagtctgaaagattggagtaaaaatgtgcagttatgtgttctggtggaactgttaccgctctctagaatatcaagtggctcctttgtagctgctgtttcagtgcttccacatagactcgttagcacaaagccgaaactctgcatcaagcctctagtccctgaatccaaacacaaaaagggaccaaactgacaggtgcaaaggctgatcgctgcattcgattttcgagagccaaagatatcaatagaagttgtaatctctctgtttttgtttagatatgtcttttgctttcagtatctctaatggagtaaacaacaatgtctgacctatgttattcaagagaacaaagataaacccatctccaccgctttttccctatgttcacaatgttacagtttgtaaggctaagctatggcaacttggaaatcaatcggttcaattcggtttttaaattaaaccaatcgatttataaacaaatgtcggtttaagcaaggttcggtttggtccacctctggtacgtggttttccaaatcgcgctctgaaacagtgttggcttcctggttccatcttcgcgacgccaagagcctgagattatcccagtggaaagaagagaaaccctaatgggaacgagctcgtgtggcgatcacgagaagcagagaattgaagatgaagagcaatacggtgtgttgctgtactacaagtacacctctgttcctgatctagatgagctcgtttccttctatgaatctagctgcaactcattaggtctactcggccgagtcaggctctcccctaaaggcgtcaatgttactgtatgcttctaatctccttttctacatatccaatgttttatacttgatttgaccattttctgagttctctgtttcgtctgtggttcgcgtctgattgagtattaaagccatgaatcgaaaattctaaccctttatgtggtgagagaactgaaaagaaaaacttaacccttttgaactgtgttctgttggttgtttgattgaggattaaagttctccatgtatagttacgacttacgagtgtaatccatcttaaccattaaagaagtagacaccaaaagtttgaagcttttgctagagttctgtttatacggttgggataatagaaaactttgcttattggttaggttggtgggaaattaactgcattggaggaacatattgccgctgcaaagtcgaattgtttgtttgaagggactgacttcaagcttgcatcttgccatcatcccttgaatgacaaagttgctgaggaatgtgggtttacatcactctccatccgagttgttgaggttattgtcttatctttcttaccaaacatagttaatgttatgttaagttcttatctgtggaacacgtaagattcatttgcggggatgataaaaatattcatgttatgatctccttgctcatctgactgaatgttttctactaatttataaaattcatgcctattctttccatagtctccataactgatgaccttgatgttgtatgtgctgattaaatcttaaattttacaagattaacgatgacttggtgtcaagttaagctttttgtcttctccggacttcaaatgttttctctttctgtacttagttccattttttgcatgtgatggatgaattttttgtcattgtgtcgaggttcttagactatgactttacttcctcagcattttgatagatatgtggcattgtgttgtgatttgcaggagttagtgacctttagtccttgccctccccttaaacccccagaaatttcaaatgctgggaagcatctctctgctgcagagtttcattcggtcctgcagagtgccagtaagtttcttatttgttttattacttactgctatattgcgtttcttagctgattacgtttccttgcaactctgctgaacatctggatggagatgggaagtctgagaataaggaacttgttttgcttgacgcgaggaacctgtacgagacacggattggaaaattcgaatcagaaaatgtggagacccttgatcctgaaatcaggcaatatagcgatttgccaacctggattgatcagaatgccgagaaaatgaagggcaaaaacgtgctcatgtatgaataatagttttgtgacatacggagatttcttgttcagtttactttctacatcactgaagtctcatctgttggcgaatcaggtactgcactggtggaatcagatgtgaaatggcatctgcatatatcagatctaaaggtgctggatttgagaatacttttcaggtgagatcctggatcgcaaatggatttgatacaggtcactgaacttggctgactccatctgttatttgtttcttgcagctctatggtggcatacagagataccttgaacaatttcccagtggtgggttcttcaaagggaagaactttgtgtttgatcaccggtatatatctagcatctttctattctaatctacgaggaaaacaatttttataggtccaggtaacatttattttgatgtcggatttaaaggatctcagttgggagctcaaaagaggatataataggcagctgccttctctgcaacaatacctttgacgactattctccacgttgccgttgcagattatgccggatgcttgttttagtctgcaatcattgtcgggtaatgcacccagaccacttttgttgatcaactccataaggattgtgtatcttggacttatgatgtgctattgcaggttaaaggagatatatatatatgtgagctgtgtcgtaaacacggaaaaggggaagtccctttgagtcttgatcccttaaaccaaccttctgaaagcaatggtaaggtctgtttgttcatttttggatcaaatgtttaaaacatcagaggatttttcaaaattctctagtcccttttcccctgaaaactttgtcaattcacttctatggtcaggtgacaatacaagacggaagctgaggatcttgtgcttgcatggatttaggcagaacgcgtctagctttaaagggaggaccggatcactagcaaagaaactgaagaatattgccgagcttgtgttcatcgatgcaccacacgaattacagttcatctaccaaactgctacccctccatccggagcatgcaataagaagtttgcgtggttggtgtcatcagattttgataaaccgagtgaaacaggctggacagtggcccaatgccagttcgatccattgcagtatcagactcaaactgaagggtttgataaatcgttgacatacttgaagacggcatttgaagagaaagggccttttgatggcattctcggattctctcaaggtgcagcaatggctgcggctgtatgtgggaaacaggagcagctcgtaggtgaaatagacttcagattctgcgtgttgtgctcgggtttcacaccgtggccattgttggagatgaaggagaaacgatcgattaaatgcccttcacttcacatattcggaagtcagcctggaaaagccagacccattgtgactcaagccagctcagaccaggcgaagttgtttgaagatggttgtgccaccattgttgagcacgatttggccacaaattc

SEQ ID NO: 36252 - DNA, 3616 bp, Arabidopsis thaliana landsberg
  unsure (1)..(3616): unsure at all n locations
tcagttagattcaatataaaatgccatccctattgcgtgccaaggtcaacgaagaatattttccactcttgtcacccgaaccatcccctagaggttctcctccaagggccacctagttactctgacaagaagtgcagcctctgtcaacggaaactctccaacttcgtttaccattgtaagttatgcaatttcagcatagatatggaatgcggaaacaggcccccgccccacaaagtggatcatccaaagtgccacgagcatgcactcaccctcatgggaagggaagtatccttcacttgcaatgcttgtggtacgcatggtgaacggaacccttatgtatgcctaccatgctctgtcatgtttcattatgattgtattgatctaccacacgtcatcaacatcaatcgtcatgatcatcgcatttcacattcatatcctctcaaacgtgggaattgggtatgtgaaatctgtcgtcaagatatcaacaccacgtacggaggctattcatgcaacaaatgtccagatttttttgttcattcaaaatgtgcaactagaaaagacgtgtgggatgggaccgaactcgaagggatacctgaggaagtagtagacgttgcgccatttgaagtgatcgaggaaggggtaatttatcatttctcccacgagaaacataacttattccttattgaggatgtttttatagatggtgctgaagacatgcattgtgaagcttgcgcccgtccagtctcttctgagaagcactacaagtgcgtggaatgcaagtttattcttcacgaagagtgtgcgaatcttcctcttacgaaacgacatggactttccacaggtatattttatcttcgcttcgggaaggattttagcgaacaaaatttcagttgtgatgcttgcaatagagatggaaggggttttagctacaaggatgaagagggtgtggtactcgatgtgttgtgtgcgtctctctctttcttcaagcaccccaaacttcatcctcacacgttatttctaaccacaatagatcgtggtacttgcttagcttgcggtgagaataaactcaatgtgctgcgttgtgttgattgtgattattctttggattacaaatgcgccactctaccattagtcataaagcataggtgtgatacacattatttagttttgcgctctggggaggaggcgcctgaaggtaaatnnnnnnnnnnnnnnnnnnnnnnnnnnnnnnnnnnnnnnnnntggttctatacatgcgatgattgtggggtcgtgtgccatattgaatgcgtaaccggggactttttgaacataaaacctggaataataatgaagaacagggagaataagtttgaagtgggtttcaacgatcacgattctagaccaaaatgcactgattgtggctctcgttgtaggttccctaggtttttcaaggttactagaaaaaatattgagtactactattgctcaaaagcttgttttcagaatgcgaaattctgaatgcctgaaggaaggcgaaaggaaggatttggaaacataaaaagaatatgggtttttacagatggaggctgtgtaatgtttttcaattattttcagataaacttgttttctatatttggatttattgttggtttgctcattcagttcataaaactatttatgagaaagagagaaagagagagagagagagactttgaaggtaattattcttcacaccttttattataattcaccaaaattgggatgtttgttctattcttgatcacacgcctctctgtcgcttccttttgacgatttctttcttttcttagcttttccttttatctttcgcgtttactgtcttttcttttccgtagtaatttgggattccaaatttttttcattcttaaatttctccacgagctcatcacctcctttcgtctctgcctctcatttgtctacaaacattttttccttatgattcgtctctctggtttattgctcgttgatcgtttgtttctaaattgcattctgatttctgatggatcgtgattttcatcgtcgtggtcaagtggtaagcattacacgcaaacacagctttgatcattaaaaatgtcatcttatttaaatcatgtcttgagatcacgtaatggtcttaggtcaatcaagatcaacgcgcaacaaattctaatgtttttacaaaatttgaaaatacttatctacaaatgtatttataaagaaacctaatttgcctttgtgttgatcatgatagacaattgttgttattagcctgttgatttgaaggcagagtcctctgttttcctgcaacatgttagaacagctcatttatgtgttttggtgaaaacgcaggcgaatgatcgtacacaaagcaactttgttcgattggataaaccgagagctgtagacgatcttgatataggcaagagagggaagatgcgtaggtggttgtgctgttcttgtcgtgtacaagaatcttacccatcagctgaaaataaccgattgaaaacccctcctactcgccattacgactatggtatcgctctttcttcaccttacttgtgattgaagtaacctatcaaattttattcttggcctcttttagttgcattccaaatgtgcttttggtccattcctaacctttcaatattttttgcttgtgtaggacgtaacaacaagaaaacaccagctcctgtgaagcctcctgttttgaaggagcctccgcatattgatgtccccgcaatgtcattggttgagctcaaagaaaagactcagaattttggatcaaaggcattgattggagaaggatcctatggaagagtgtactacgcaaactttaatgatgggaaggccgtggctgtgaaaaagcttgataatgcatctgaacccgaaacaaatgtcgagttcttgactcaggtctctaaagtttcgaggctgaaaagtgacaattttgttcagcttcttggttattgtgtagaagggaaccttcgtgtccttgcttatgagtttgccacaatgggatcattgcacgacatcttacacggtaagaaagatttctttctgctcaaacatcaatatggcttaggatggagattgataaacttgatgctaaacagggagaaagggagtgcaaggagcacaacctggtccaacacttgagtggatgcaacgagtccgagttgcggttgatgcagctaaaggattagaatacttacacgagaaagttcaacctgcggttatacacagagatattcgatctagcaatgtgcttattttcgaagatttcnnnnnnnnnnnnnnnnnntttaatctttccaatcaagctcctgatatggctgctcgtcttcattccactagagttttggggaccttcggttatcatgcaccagagtaaatatgcttcaacattgatagctcggaattttcttgattcttagtaactgaaagaatgtaactttgggtttgcagatatgcgatgacaggacagttgacacagaagagtgatgtttacagttttggagttgtgcttttggaacttcttacctgggagaaaaccggttgatcatactatgcctcgtggtcaacagagtcttgtcacttgggtacttaacttacttaa

SEQ ID NO: 36253 - DNA, 2129 bp, Arabidopsis thaliana landsberg
aaaaaaaataaaataaaggagttgacaattgactttagaaaaacgtatgtaaatataaacacattcgtattgcttttatttcaataaagagataggtctttaatttagatgatttacagaaaaaaaacagattaatctttttgagagagagagatggaattttctgccaaaatacatatttttttaattaaaaaatagtagtttaaacgttgaaactaattaggctccgaatgataactccgttttgcggtctacaatcgagaaaatgcgcctacaaagttaactatcaatcggtttaaaaattgaaactaacaatcgagattttctgccaaattgcaaaaccaaaatgttgatgcaaaaattatggaattaaaatttggtgcaaaagtggcagaatccaaatatgggccacgaaaattcatcttctgggtacaaggactataatgaaaaacttacatgaaacggatttttatttaactctgcctaaaaattgcctttacttttgtttgcatcacattcctcatttctttggtaacagaaacaactgagtcatatatttttagaaaggtaagtttcttaagctctttgggatatcatataataaaggtctaagtcttgtgctttgatttggtctccaagatatgaagatcaagcctatatatagctagactcaccttgctacttacatatcaagatttgacattgtcatagataaaaagtgttatataacgttatatatattgatattattattttgataaaaacaatagtatacatatgattccaactcacaaatgtaaaatatatataaatgttcaacagattattgattttgcctccgataaatctaaagctatgaatatactataaggcaacacaactcggtgacggtgcacgtccagggtgagccagtggaccgtgtgcactgtctggtcttgttgcatctataacaatagtcggagttacactttagacagggggcggacgaatcatcagattcaggaagataagtggtgacgatctcgatataacttttactgcggcattgatttgatacactccctccagtcccccgtttagagcttctgtagtcaatattgccttccaaattcctccgcatcgtgatcatctcttctgcatcacgtacccatacaattcagacttcaatttctaagtcaagcaggtagttttgaatatataaaactaatgtatatattgactaattaatgaagcgacatagtaagtaacattataggcttatagcatattacaccaaatccgaatgtataaacatgaggtagatattgtagtctctaaagatatataattttttttttaaaaaagaaaaaagataaatttacgttattattcttgtaataaatgactaataaaatgaatatgaaaaagagatgaagaaatatatgatgttctcaaataaaataaactaaaaaactatgtgaaaacatgtaattgggtcaaataacttaatagtatactatagttattcaatatgatcaatatcgatatgtaatcttactgagtttgcggatcttagtttgagcaccaagagcttcatccacataaagcgaaaacacgaggacaagaagaaatagcatggaatagaatgtcgaagatgccatcttaataatcactctgttacttatgatcacttatcacaaatttgacctaatttactttgtatgtgtgatgtgtctgaatccgactcacgtttacgcatttatatagaatagagaaggtggtcgagatgaggacttagtttgttgtggggttttgagttatggtctccgcacaccatgtatccgtatgatcaagtggatttcattccatatttacatgtccaatccttttttccacggaatagttttatttttaaataacaaaataaaggaattgacacttgacttgagaactattgtccaaaaaaaaaaaaaaaaaaatcgcaattactatagtggtgtttctttttatttcagtaaagagatcagtctttaaggagagggatttctacaaggtttaagaaagtgacacgaagaaacaatgtgaaaagaatagtcagacgttcaaaaatgataagatacgttaataattgtaagagagagacaaaagac

SEQ ID NO: 36254 - DNA, 3486 bp, Arabidopsis thaliana landsberg
gcaagcttgatgttgaactattgcagcctttggtaaatatcgtcaggtgacgtctccgataaccacaagacaatttccatattaactagcagatcatgtggaactaatcacgagaaacagaaatgaaacacctaagaaaacaccagaagacatatgttatataccttctgcttggcagccattttctcttccttaactttatcaagttcttctccgagagaagcctgcactttttcagctgcaactctagcttctttttctcttctatgacattcaatggcgtcctagtgttcaataagtaagaggaaagcaaagtcaagtaatgaatttcattaaaagaaaacattcacaattagaaaaaccaggcaccaaaacccttgcctgtgtactagactcctcctttgcaagcttttcatgtagtgacactacattctcttccaactttgagatagtggcctgtagctcttcctcttttgtcctagcctccaactctataagagtcaaaaagttagggactaccaccaaatgagtgaataacttgtttcatgtaaaaaaatcgcaagaagaaaataacctttgtggttgtatttttgttctgaagattccaaagaaaccttcaaattttccttctcttggacatgggtttcatcagcttgttggaaccattttacacaaaccttcagcctcttgataatatccgtcatttgctcaatcttagcctgcagggacagagacaaaaaaaaactccttctgagtgaaaccataaatgaaaacatctacaatgcttagagcacagagcaagtgtaactcaatcaatataccttagtatcaaactttccagcttttgctctctcactgagcaacgccaatatttcatcttttgtaaagtcaactttaccacattcttcaatgctccctacatcgctgttcatcgtgacatcttgtttattcacagccgaaaaagcttgtcttctcccagtacctccttgcgtttccactttccttcgcttgtcaaatgaaatgccaccgagaccctcctttttctgaaattgaatcaaaagccacagatttttcatcagtttcataacaaaaccaatatccagctacaagaaatgtagaatcccagaacccacgaccactctaaattctattgataacacccatcagagtaagaaatgcaaagccgatgaagataacaccttaataaattcatctggtaagctcacaaacaaaacccaaaatgcgaaattaataattcgaccagtcctagggtttttctcaaacccatcctccagaacactcaaaagtgacgacgaaatgtagtggaaaagcatgaaaaagggagcttacggcgtttggactgcgaggaggacgattctggttgcgagaagccatctccgagactcaaaattgctacaaatttcttctcctttcgctcgtcaagtgcataaaaatcccaaaatggtagtcttctccctaaattcgggttaccgacaataaaatctccgattgattctcaagatcttagagaatcaaatcgaaaaccttctcaatcgaagtcgagaaactaggattcttactttttcctaatttggggatttttgtgtgtgtgtaagtgtgtgactgaagcaggagcctgtagtttcgaaattcgaacgattttgaaattagatgtggcggacttctggaattatcataacgttatcaatcaataaagtatttaaacatatgggctaactttgggcctacaattcggcccaaatgtttaaataatcttgccacgtggctttaaggcggacaaaaatgacacgtggttttatatgagtggctacaaccatatccaagttatctaaagtacagataaggcgctctgtgtcggagaatgaaaccaaccaatcatataagcataaccaataatcatcggcttcaattttcgtcttgagaaagaaaaacaaaatggcttcgatgggtggattacacggtgcatctccggcggttcttgaaggaagcttaaagatcaatggctccagccgtctgaatggctctggaagagtggcggtgggctcaaaggtctagacttgtcgtcagagctcagcagagtgaggagacttctcgccggtccgtgattgggcttgttgctgctggtttagctggtggctcgtttgttcaggctgtcctcgccgatgctatttcgatcaaagttggccctcctccagctccttccggtggccttcgtaagttaactaacaaactaatcttccaatatgatattcattctcattgttaatgagattaggaatttaaacgtgatttaagttatgtagatgaaaaaaccataaaatgtagtctttaaatgtggatgtttttgtataagaatataagagactccataataatcaagcatgtgtatgaatgtttcattcggatttgggttagagttcataataagcaagcaaacatgtgttcgagttagttcttatatcgatttttctggtataaacacacttaactcgatctctatatgacatacgacggtagatatataacacttacacattgttttatgttttatgaggtgacaacaatttgttttgtttggtgagcagctgggacagataactcagaccaagcaagagactttgcattggcattgaaagacaggttttacttacagccattgccaccaacagaagctgcagctagagccaaagaatctgcaaaggatatcataaatgtgaagccattgatcgacaggaaagcttggccatatgttcaaaacgatcttcgttccaaggcttcttatcttcgttatgatcttaacacaatcatttcctccaaacccaaggatgagaagaagtcactcaaggatctcaccaccaagctcttcgataccatcgacaatgtaagtttctcatctaacttcgatcaccatctatcaagattttgtaatgtttcttgtttgtctgatcgaaagtttgtttatgattgattctccggcagctggattatgcggcgaagaagaagagtccttcgcaggctgagaagtactatgctgagacagtctctgctttgaacgaagttcttgccaagcttggttaagcattttaatttctgcatttttcttgtaaattattattcttggtttttgttcttgagtactttagactcaaattcgtgaatctgaatttatgtttcacgttttcaccaagtaatggcaatttcttgagtatgcgttagctttgtttgcatggtgatttagcaaacaacaacataaagtctattcgtacagttcttaattcagtttcatttataaatgacaacaccaaagtattagggtgaattataaaatggatcaactctttcattgaaactacaaaataacgaattgaatttgaataaaacatttctagctttaatttcactatagattgtccaatagtattaaataactctgttgaaaatcaaaattgtacatttttaatctag

SEQ ID NO: 36255 - DNA, 3554 bp, Arabidopsis thaliana landsberg
gaaccacatcgcacccggtgatccacgatccgcctcgtccgccggcgggcttagtcaaatcaacactatgtgcttcttccacagtattcgccggctcctagtaactgaagattccatgccgtcaccttgaatgaagtccaagatctctcaatccaaccttctaaggaaaacttcacccaaaacctaacttgtaagccctctcaaaggacgatgaagatattacttcctcacaaaggagagtatgagcttggtgaaaacagaattcatcagaaaaaaagcaacggaattaattttgaaaatctgtggaaaaagagaaaactataacacaaacaaacaaaatccgacataatcggaaagataagccggacaacgccgaaaacttcatctgataaacaaaatttattctcagatctaaactgaaatagatctgaaatgaaactatgaacaaaacaaaaaaagtttttttctctgaaggatagggagaaaaaagagggaaaaaaagagggagaaaacgttttaagaaattttttaaaaattataacccaaaatgttgacataaaaattatccccaaatagatgtgcacatggaaacgtggtccgtaatttaaccataaaatccgaacctttaaagatttagttccaaaatatgcctctttcttacggtaggtccaaaattgtcctccccaaaactcagatggaaaagagccacaaaatcaggattctatgtgtcacgtgtgtgtgtttgtgaattgtggtgtcatattctacggctaacaaccacatccttcacttatattcttgatccaacgtcgttaccttcaagttgcattacccaaattgtctttgtctctttgcatagaatactctttgttttttattccaaaagctcttcaatagtccaaagggatttacaaatgcatttagcctatattcggaaaaagacttataacagctcattgacatggtttaacagattgctcattgttaatttagtgattgatgataaatgatagtattattaaattttgctaagagtttgtcttattacaagaaaataacttaaaactttaaaactgaacttaaagacaaataagaactaggatcgtaatcaatcgtacggtgaagatcaaagacagaggatgttgtcaagtctctctcaatcaaccgaaataagaccaattctcatctttgcccttgccgccaccaccagctgcagtttcatcgcagtagtaaacgccaaggttattgatcgccgcggtgagagcgtttgttgacgtttccatggaaagataaggcatgttgttgaatgacttagcaagacacgatgcgactactagtttgtcgttccccttatcacaagctttgttgttgttcctctgctcctcggctcggtgtgtaagagtctgaaacatgagctcacgctcatgctgcattgctctgaggcatccgcagaggattggccatcacagcacgagtcactgcgaatccgtgagtccatcgtctgcaatacggaaccacacttggtccaccaaacagattgtggactccaccgagagcttcctcataagctccacctaggaacattcccaaatagtatctcccaccgctgcagccattgttgtccatctcgtgcaatggcaagctcgattctccgcctatgaacttgttgatctttccgtcgctgtcacacgtcaaatccgataagatccctctcgcgataggcctttggtcaagtttatggattggaactataggaaacagctgatcaatcccccagaaatcaggaatcgaagtgaaaaccgatagattgacatggtaagtaagaaccggatccgatgcaccaatcgccttaatcacccactcgcataatccatcaacaccagctaactgttcaatgcccaaggaaccttctttgaacccttcaacacatctctgcttcagctgatcaacataaagcatgcagctttcacgatcaccacgcatggcagcaccataaagattctcgtaatcacctcgaacttcctcagagtacccttcaagcataaactgatgatcagtaggggtttcatgttgttgaccagctgagacagcttcaaagatcaacaccgagtgatgagacacaatggctcgaccgctctcgctgcaaatcaccggatgcttcacagacttctgatcacaaacaaacctaaccgaagccacaacagctgcagcatactcctcaagactataagcaacagagagatccgactcccccgatttcgacccgtcgtaatcaatccccaatccaccaccaatatcaatcaccttcatatgagcaccaagtcggacaagctcacagtaaagctgcgcagcctcagccacaccgtctgagagcaaagccgtggacggaatctgcgaaccaatgtgaaaatgcagaagctggagacaatcaagcataccaacttgactcagcttcctcaccacacgaagaatctgaaccgtagtcaatccaaacttccccttctcaccagaagtagaaccaaaatgaccagaatgtttagttctaagcttagctcttaacccaataacaggcctaacattcatcttctgactcaaatcaataaccaaatcaagctcttcttcttgctcaagaacaataacagtattcaattcaagtttcctcccaaacaaagccaatgagatatactcagagtctttaaaaccattacacacaagaaaagcttcaggattacctttacacaaacaactcatagcaagaagaatctcaggcttggaaccagcttctaaaccgaatcgaaaaccggatccgaattccacaatatcttcgataataaaccgatcttgattacatttcacaggatacacaccttggtaatgagaatcatatccttgactctgaatcgcgtaatcaaacgctgattgaagacattcaagacgattcttcagaacatcagggaaacgaacgataagcggaaggtgtaatcctaaaccactcggatctgtaactttcttcacaactttcatcagatcgatgtcttggtgaggtaaagtgtttgagccatgaggacgaacagagatgttcccggaggaattcgctgcgaaatacggagctccccatccgtcgatacggtaaagagaggaggagagcgacggagaccaatggcaggaaccgtcaacaacggcggtggaaacagacgacggtgtaaagatactggaaaaggtatcgatgggagtatcaacaaaagctagagcaggcatcttcttcttcttcaacgaacggttacaaatgaattcaaaatttgtggattcaaattttcaacaaacaaaaaaaatggagaaaatgaatctgtgagtttgttagatttgggggaatttgaaacccgccgaggcgaagagcctcggggctaaccccctcagaaggaagcaggaggtgaatctatcaccaccgtgaaacccgcctttaacgacccgacccgacccgaaactcttcacgattaacgttcagaagaaagcttttttaaaaattttgggtaaaaacggaaaagaaaatgaag

SEQ ID NO: 36256 - DNA, 2572 bp, Arabidopsis thaliana landsberg
  unsure (1)..(2572): unsure at all n locations
aaaggccgaatttgatattaccaacaaacaaaaatttgggtagccactagtttacaaggaatttaagcctattatttttaatatggcctttaaaatattaccatggcaacacggaaattggcctatattctttcatctcaattagtcgttgccttctttggaataaagccaagaatggtggaattaattccctttggtaagaatcctttcacaaagaaggatttaatcgcaagaataaactccttcccaatgatatcccaagtcgattaataaaactccattgtataaccatctggtcctagcgacttatcttttggcattgcaaagagtactcgtttaatctcctcctctgttactgacctagtcatctctgttttctcctcctctgagcatcgataaggcagcaagtcttgaagttcactaatggatatttcctcatagtcatgtgaaatcagctgaagaaattctctaaaaaagtgttctgcttcctcttttatttctactactttttttgtaactgagccatctggtctttgtatttccctaatcgagttgtgcgctttccttaaagtgaccgctctatgaaatgtcttgtttttttgtcacccacatcaagtcaatgcaacttagatttctgttttagaaacttctgttcaagacaagtcaccctttcccacctatcataagcctttgtttcctcctccattgccctaactgaaggattttgtagattcagttgctgctttatgcaaagatcctcatgtgcttcctttgccttcttgaccaaattttccaaactatctttggtcaagtttctaatcaccggttttagtgcctttagttttctaatcaacgtcgatgtggacatatgaattggttccgcgtcccccccccccccagtaattcgccactaaaggtctaaattcctccatcattgtaatagctgataataggattttatggtcaattaatcctaaaacaccaatcatgtcgttgtagtattttaggtgtcaatccaaatgggtgtgatgtagacagatgagatatgatcagaagttgctaagtcaagccaagcagaatttggttggttttctaacagtcctagtgttgatgcagaaaacaataaaaagtcacagaaacgactaatatactagatcgcagggtcgacttcctgaagggaccctgtgatcgagtataataggatgactgagagtgaaaatgcagaaatggaccagtttactctatcacgcagtctcactgttagtagactggtgtgatcgagtataatggttgaaaacagaaaaaatactaaaattcaatagcaagtgaatgaaggaggtaagtaaacagaaaaatcaattggatgagaaattcctaaggatggggtaatcgaatagtgtggtctccctaatcaattcagttggttaacaaagctcaattaagttatccctagacaacaagttcaaaaacagattaattcactcccgtgatagaaatcctcaagcatagctagacactgacctaattcccattagcgatctctaactaagcagccaataagaaccgactgttaaagccaataaccgctctaaacggctaatcccttgggatagagacatattcgaccaggggttccacaactactctatcccatcctcagatatcctaatcacttctcagacaacatgcttaaacacaataacatagaaatgatagaagattgctgataagtgtgtatttttcatgttttaagcatccatttgtcatcactttaccatcatatcatcactgttttataccatttctcatcatttgtcatcactttgcatgtttaggatatttttgcatgcatgttgcatatttgtgttgatttcaggtgatttggagctgttggcgagctaactggaagaaccggacctgatcatgtcaaaccactcgacnnnnnnnnnnnnnnnnnnnnnnnnnnnnnnnnnnnaccactagaccacttggtcgagtagaagacctcagcacttcacgtcaccactcgaccaccaggtcgagtaccgccaagagagacactcgatcacatcactcgaccccctggtcgagtatcatcacctccaccacctgaccatcactcgatcacaccactctaccaagaagtcgagtatcaccatcaccatcactcgactacatactcgattgccagcttcagagtcttctccattccgcactcaaccagacactcgagcacaaggaagaaaagaagactccagctaatcactcgaccactcactcgattacctgggtcgagtactgttcttaatccgtcccaatactgcgtcgttttgagtattagggtttcagaaatatttcgctataagtagcatgtactttacatttttgttaatctaagttttattctgcagacactgtgtaatccggatttctcttaatctattaagtattcagcatttgctttagattttgtttactgttgttcatcctgttatcaccttgctattactatgttgttatcatgttttcattctattcaacgtttatgttctctgcaatgatgtctaagtag

SEQ ID NO: 36257 - DNA, 2061 bp, Arabidopsis thaliana landsberg
aggttgatattgtgaggaataatttgatctcgctttatgaagaataccatacttaatctgcttgttcttcgaactcttcaaccacacttactccacacgagcttctcaatgaattgccacttgaagcagatgtgaatgatgtaagtataataatatatttgaatatctttcactagttctggtttttgtttaactaattgtgtgtctatttgtgtatttacaatatctttttgagcttgaaagtagtctcatatctgcttcaaaaagtaccaagtcaactttggaaatctatttggatgatgaaccaagattagagatgaagactttctctgacatggaaattttaagcttttggaaagagaatcaacatagatatactgatttagcttcaatggcatctgatttgtttagtatcccaatcacaacagtagcatcagagtctgctttcagcgttggaggacgggtgttaaatccttttaggaatcgtcttcttccccaaaatgcgcaagcattaatttgcacccgcaattggcttcgtggatatgcagatcttgaaggtaaaattgtaatttgaagttataaaacttacataaatcattgtcttattttaacttgtatcattaaaatgcaggagaaatcgaagaactttttgctgaagaagataatgatgctacaaagatgacaagtagttcaggagttggagattctaacatatgatgagaagttttttttgctcagtttttttttcgacaaatatcggtaacaatgttttacatttcagcaaaatgacaagaaacaatgttttatatgttgtggtgttatagtgtttccatttgataataaacaatagtattattatcttataattgtttttgttggaaaaacccttctctttaaataaaaaaaaaaacttaagggctacaaaaggccaaaaaggggctcaaccctattttaaacttttttagggattaaaaagggttagggctcacttagggctggactttaaataaatagggccgggttgggccggaaaaccctatttaacatccctacattttaccatccgaaagaaccttatgattatctgcaaaactaaggggagttaaaccaatgctcttacatcttggatggtaaccaaacttcctcaaacctactgccttatccaatagtttggagagaacatccatactaacgacaaacagatacggagagggagattgagaacatctctgtctcaaaccccgcacactgttgaaatatcccaccagttccccattgacttgaaccgaaaaagaggttgtggtgacacaaagcataatccaatgaataaaaaacaatggaaatttcatggcttcgagtaccttacggagaacagaccattgaaccgagtcgaaagctttagagatatctattttaattgcgcagccagtcgataccgattctttgtgataatcttttactaactccgtcgcgagcagcacattctctatgagcagcctatcttgaacaaaagccgattggtttcctacaacaaaatttggtagcactcgcttcaggggattagctattatttttaatatgactttaaatatgacattgcaacacgatattggcctataatctttcatctccttagccgttgtcttctttggtatgagagcaagaatggtggaattaattccctttggtaaaaaacctttcacaaagaaagattggaccgcaagaataaactccttcccaatgatatcccatgtcgatttataaaactctgcagtataaccatctggccctggcgatttatcttttggcattgcaaagagtacccgcttaatctcctcctctgttactgatctagtcatctctgttttttcatcctctgagcatcgataagaaaaaaattcctgaagatcactaatggatatttcctcatagtcatgtggaaccaattgaagaaattctctaaagaatagttctgcttcctctttcatttcttctttcttttgtgtaactgagccatccggtttttgaatttccctaatcgagttgtgcgcttcccttaat

SEQ ID NO: 36258 - DNA, 2149 bp, Arabidopsis thaliana landsberg
atatcccacttgtgggacttttagtaaacgccattaccaagacggcaagacttaatcacttatcgttgaacatcgatctattgctccatggtcggaactttacattaccaaaacaaagagaattcaaataaaattgggaacaatgaggatttgcaactataaagctacgttgtctccatataaaattggtaacacaacattcatacatttttattaatcaacacaagcatttcattagcaatattctacaagcatacttagacaaaaccccaatttatgaaataagatattataagcctttttattgggttgcaatgtttgtagacaaaaccaaacacttcaacgccaagtcgttctactggctttaaagaacctctctctgattgagatcaactccttgacgactatactcgttgccaaccggttcatcggagattcttcacaacacctaaggcccacctcaaaaaccattgtcaagcactcaacaacagggaaaccaactctgagaccaatgtgaagaattgattcgtctacaatgtccaatattctttccggcaatgccgacttagtgtagctgttcagggtaaagtttcctccaaatagctcattggttggtctttttccagtgaacatttctaaaaggagaatcccaaaactatatacatcaccatttatagatggctgtcctcccactccatactctgcaccatatttcatagaaacaatgttaagaagactgtaatgataaaaagaaaggatagatactaattttcttcatataatgctacagatgtgtgatagtatacctggtgcggcatagccgatggttcctctaacaccggctgagcttagttggttgaagaaggactcctcgtcgaatttgaggagaagacgagctagaccaaagtcactaacatgggcggttagatcatcgtctagaaggacgttgcttggcttaagatcgcaatgagctataggttcatgacaatgaacatggagataatccaaaacagaagccacgtctatggcaatgttaagcctttcaagaagggtcaaacttcttgagggcctatgaatctcttccacttcctctgggtgcagccacatatctaaacttccttttggcatgaactcatagatgagagctctgaaatcatttccttgaaaatcaatactcgaacaagctgtcaatagtttcacaaggttacgatgtcgtatacccttgaaggattcacattctgccataaagcttttcgtcgctccatgctttaggaggttcaaaactttaaccgcgacgagtttattctcagggcccaagcatcctttaacacattaccgaaattgcctgaaccaatcaaattggttaagagaagcgacttgttgcactatgaagctcttcataacttaccttccatggaacatccccaaagtagtagaatcagatgggttaccatcactggcattgtttttctttttcctcttcatgaaccaacacagagaagccacaattatgattaacaaaagcgaagctatacctatacaaataccactgacaactttctttctaactgacagaggctttctcttccttggagatgcctgtacaatgcatggctttagttgcatttctcggacgcctccgcaaatatttgtgttaccaaaaacagaaactgctgtagcatttcgaaacactcctgttgttggcacccttccctcaaacttgttcatagaaagattcagatttcgcagcgaaggaagactggccagatatcgaggtatccggccagagagattgttgttggagaagtcaacattctttaggcttaccaaccggcttatatctggaatggctccgtcaaacgaatttccttgcataaagagaaattccatcgaaagacaaccccctatagcttgtggcatctttcctgataatttgttgtacgaagcacctagtccaacaagaagttctaactttccaacttcttctggaaaatggcctgtcaagaaattgtttgacaaatctatgtaagcgagggatggaatttgcagtatttcctgaggtatagtcccattcaacctatttgtatccatccacaggtctagcaagtatcgacaacgtccaagactctgagggattcttccgtggaaa

SEQ ID NO: 36259 - DNA, 1840 bp, Arabidopsis thaliana landsberg
ctttgattgttcaggagagtctaaacatggtagagtctcctcctcgacttgaagaaaataacaacatttccactagagctcctgtggatgaagatgagcagcttgcaaaggctgttgaagagagtttgaaggggaagggtcaaataaagcaatcaaaagatgaggtggaaggagatggaatgctcctagagttgaatcctcctcctaggtaagcttatgcgtttattgctaattttcttgtattcattatctcaactcttaagtatgtccacacctggttaaagaatcttttgacttgtagcttgtgtggtggttgcaactttgcggttgaacatggaggatctgtgaatatcttgggtgttctttggcatcctggatgtttctgttgtcgtgcttgtcacaaaccaattgctatccacgatatcgaaaaccatgtatggaactgtttttttttggtatattaatatactccttgacatgttcgttttgttttttttgtttgatgcaaaacctaaattcttgataactatcttaggtttcaaactcaagaggcaagtttcacaaatcgtgctatgaacggtactgctatgtctgcaaagagaagaaggtataccattttaggattctcagtagtaatttgtcatggtgtcgatgaatgtaactgtaactgtattctttcagatgaaaacgtacaataatcatccgttttgggaggaaagatactgccctgttcatgaagctgatggaactcccaaatgctgcagttgcgaaaggttagaggtgagtttacctttcaaacaacaaaacacggcaacggggaatgatatgagatccagaatcaaccaccatattgaataagagaaggaaaccataatcttcgggtttaagtttcttaggatcttggcaaattttctttgcagcctagggaatcaaactatgtaatgcttgctgatggtcgatggctatgcctcgaatgtatgaattctgccgttatggattctgatgaatgccagcctttgcactttgacatgcgtgatttcttcgaaggcttaaacatgaagattgagaaagaatttccttttcttttggtggaaaaacaagcgctgaataaagctgagaaggaagagaaaattgtgagtacattagttatttgaaacttccatctttctctctctctcactcatatgttttataaaaaatttacacaagcaggactatcagtatgaggtggtaaccagaggtatttgcctatctgaagagcagattgtcgatagtgtaagactttatcttgggtaacacttacttcagactaaaaccagattagattcatgactgtaactctggtctggtccacatatacaggtctcccaaaggccagtcagggggccaaacaacaagctagtaggcatggctacagaatctcaaaaggtaactcgtgagtgcgaggtcactgcaattctcatcctatatggacttcctaggtacttttacatctcttccacctcatctcccaactgagtactctcttggctcaaaatcaatctatgttgaaacacaggttactaacaggatatatcttggctcacgagatgatgcatgcttggcttagactcaatggtacgtattaactatgatttctcatcaccaagagacatggagagagtacctcttttaatttttttgtgattttgatcacaggttataagaatcttaagttagagcttgaagaaggattatgccaagcgttaggtctcagatggttggagtctctgacatttgcatctactgatgctgctgctgctgctgctgctgctgctgtagcttctttctcttctttttc

SEQ ID NO: 36260 - DNA, 1765 bp, Arabidopsis thaliana landsberg
tttctacttattgtcattatgcaagataccacatttttaatgttaaaaattaagattattgaggaaaaatgtccagggatgctcctttttagaaaatggttataaaaataataattacgaaaggatttaatgggattatgaaaaattatagagaacatcacatttatgggtgaaaactatatgtaaacttaataaatccactatttcagtgctactctaattgagaagacagatatcaagatattaaatattattgaatgatgatggggtatttgtgttgtgtagaattggtagtactagtaacttgttgagaagtcaagtagttgtgaaacttggatcacggaagagacaaagaagatttataggtcaaacacttttgtcactttcccctctacggcagatttcttgtgggtctttttaaagcttcatcttcgtcggtgacatgtattcggagcttcttgttttacgatatttatcatccctagtttcttcctacaccttgtgacttgtgtgatgtgcctaattaatgctattcgctgcttattccatcaaataaatgggaatctactatttgtggggttaagcatattcgtatgggctcaagattagttcagtaagattattatatcattcgcatataaacaaaattgatggtacaccattgagtgagctaacgcaatttggttatctaactatcactttcctctttaaacttgtatgacaaaatctaataatatttataaatgaggtcgagattcttctagaatagtcaagcttttttgttagcacatcatagttctcaggttctggtctagcagctttttttgcttacgaaatgtgcaagtaaaacaaacgtaaacgaaggatgacatatgactatataataattaaaaaagacagatcgaagtttggttagcgccagacgaaatcatacattagtctaaaacaataatttattcaatgcaaattcaataacaagctaacatgtgtgagatacacaattcaaaataaaaacataaagttgataaaccagagaaacagaagatctacaataaacaatgaacaaagtaagggaaagagagacatgacaaaacacaaacaaaatacacagaaccaaagtgaaacagaaggcttaaaaagagtcaagagttagattaacctttagtaatcaaaaggccagccactgtaacccatatatgattgttgatgttgctgttgatggtagttatggttctcatcgcttgtatccgagtttcttgtgcctccacggttttgagtggagcttgagcttgaacctgacgaacggaatggccagaaggaagagaaaggattccttctttcattcccgttctcacgactgttactactactactactactactgcttctgtagtttctggtaggggtggttctgttttgactgcttgaaggtccgctagctgatggtagctcttggcgacagaccgggcaagagttgtgctgaaccagccacgggacaatgcagtcagaatgatagatgtggtgacacggcatgctgtttcgcttctgatttcagttcgaattcgtctttgcacacgggacaattcgagtccgatgacctaagatgcctctgcgcgatcttgatagttggcaatgcgtctattgctgatctcggtgcgggtggtgggcctcgcgagtagtgccagctgaaactgctcgaacaattcttcaaggccgggactgaagaagtagtcgccggtgttacacgtgtaatgcaatgccaggg

SEQ ID NO: 36261 - DNA, 1629 bp, Arabidopsis thaliana landsberg
atgttttaaaatgtgtcttttggaagtaaagttttgattttcatgatcgagtaagagttttcattcaaaaaattcaggagactggaggttggcaatgttgtgatggtgactgagtaaaaagcagagggcgtgttggtgtgatcaagaaccgtgaaaaaacaaaagggaagctttgagaccatccacattcaagactcaacaaatttgcgacaaggttagggaatgtgtttaccattgggaaaagaacaaagccatgggtttctcttccaaagggaaaatgtattaagcttaccatcattgaagaagctaagaagaggctttctgctcaacaagccgctaaaaagtgcgaaataatgagtaaattaacagtgatatgggttcgtagctcttgagctttttctaaataggttctaggtttttttttgttagtgtttctgctatgttagcttcgaaacatttgatatttagtgaaccttacaatctttgttcttggttttgtcttgattttatttctctgttctatatgacttagaagtcttgaatgatgtttatgtggtgaagctttgtctactgtcaaataatgtgacttttaatggcggagcttttatgaacatactcttgaggaacttggtggtgcttttgtaaatcaataacctgaatcttattacctcactttcacttcatatgatctatatcttaatacttataatgcagtctcactcttcctaaccccccaaaccatcttcatcaccacacaaatctaacgtgtgccttccctcttttcttatcatattgaactatgctccaacatacactaaggtcatttcagtcttgattcataggcatattccaatagatggtaaagtgaacaccttctagattcatggttgactcaagctcaaactctgaattagatattcatgctctatgtttactagcttccatgatcagtgacttaagtagcaatcttatgcatcatcattcttttgcagatgttgtgtatatcccaaaaacaaatgaaaatttccgtctccactccatcagtgagaccatccaaattcaagactcaacaaatttgcgacaaggttagggaatgtgtttaccattgggaaaggaacaaagccatgggtttctcttccaaagggaaaatgtattaagcttaccatcattgaagaagctaagaagaggctttctgctcaacaagccgcttaaactgtgtatttttcttcttcttcagtttcagaaaactatgtttcctctggttttgcatcttatttttttttgtttatgagttctctgtattcagactttgttagtgttccttttgagattattatgaactctgtttttattgaacctatctactatctgaagaatccaaattctatatgcttcaaataccatttggcccacatgcaagccataactaatggtttacgtcctatgaggttccgtcccttggagtcagagaagtagtatcacggccatgggccttggtgcactcttaagagctctgcaaatgtgccaggccttcaagtgtattagacccaaccaacaaccacacagctcatgctaagagagatgggtatggagagctaatgactggattggttcgaaggatgttgttcc

SEQ ID NO: 36262 - DNA, 2777 bp, Arabidopsis thaliana landsberg
taagtccagatgggacttctcttttcggaatggctgtggtatacgccgcattgtggagccaccattaccggaagggtactacggaaacgcatttgtcaaagccaacgtagcaatgaaggctggagagttgagcaattcaccgttgtctcacgttgttcagctcattaaagaggcaaagaaagcggcactggagaagaggtacgtgttggagcagttaagagagacagagaaaacgttgaagatgaaggtagcgtgtgaaggagggaaaggagcgttcatgttgcttactgattggaggcaacttggattgctagacgaaattgattttgggtatggaggatcagtgaatattataccattggtgcccaagtatctgccggatatttgtattttcttgccgaggaagcaaggtggtgttagagtgctagtcacgctgcccaaatctgtaatggtcaatttcaaggaacacatgaatcccctaaatacatgaaattaataagcaggtgaatgtaattcacagtgtttctttaaaatatgaaaaggacctcatgcgattgtatatttaaagcttttgtttgctgcttgtttaagtttttcacatttggaaaagtaatatcaaaccaataatgtaacgccacgtcagcaacaatattctttctaaagaccccacgccaaaattccaaataggactataggagtaggacaagcttagtggactttttaaaatcactgtttcatctaaaaactgattttagctacaacaaaatataaggccgagaagaatgctttagttgggcctaaatatttcatgctgtgacaatgggcctaactaaataagcccaataaatttatgcgagaacaacactagggttttagtttttcttttgatatataaagtaaagggcgccgttaatcgcagcctcagtggaatcagagcagctgcaaacatggttcgtcttctcaatttctcgattttctcccaattttggtgtagtctgtgtctatgtctcttctgtttagttatatctggtcatggatattcaattatgggcgttttggttagtttcttaggacaatggcgactctagttttctcgtttcatgccgtagaccgtacctgtaaatgtttcagactgcgatgttgtatttttcttgacaattgagcttctgggtagtgtacttttgactaggctctgtcaaatgtgataactttgtattgattgaatcgtctgttgttttgaccttttatatatcaaatgtgattttgcaggcaagaggattgaagaagcatctaaagaggctcaatgcccctaagcattggatgcttgacaaacttggtggtgcctttgtaagtttcacttgtgttggattgaatcttattagagcttagttttcgtttgattcggtgcttataatgctatttctgtccaggcccccaagccgtcttctgggccacacaagtctagggagtgtttacccttggtccttatcatcaggaacaggttgaagtatgctctgacatacagagaagtgatttcgatcttgatgcaaaggcatattcaggttgatgggaaagtgaggactgacaagacttaccctgctggtttcatgggtgagtctgttagtgttgtgatacgttttcagagtctggctatagtccttgtgctgattgatttttatgcttcttgtgatcaatgatctaactaaggataaatatttatttacagatgttgtgtctatccccaaaacaaatgagaacttccgtcttttgtatgacaccaagggacgtttccgtctccactccatcaaggatgaggaggctaaggtttgttctcctaaatctcttacattgccatatactgaatctgtcaaaacaaagtcaagtctttattcattgctctatacttacattagaggtctgctgaatttgcatgttgattaccagtttgtaatatattccaacaagtatcctcttttgttgttgtgcagttcaagctttgcaaagtgagatcgatccaatttggtcagaagggtattccctacttgaacacatatgatggtcgcaccatccgttaccctgacccgctcatcaagcctaacgacaccatcaagctcgaccttgaggagaacaagattgtggagttcattaagtttgatgtgggcaacgtagttatggtcactggaggaagaaacagagggcgtgttggtgtgattaagaaccgtgagaaacacaagggtagctttgaaaccatccacattcaagactcaacaggacatgagtttgcaacaaggttgggaaatgtgtacacaatcggtaagggaacaaagccatgggtgtcccttccaaagggtaaaggtattaagttgaccatcattgaggaagccaggaagagactttctgctcaacaagcttgatagttaatactatgctctgttttccagtttcagaacaaaccatgctttagtttgcagcttttcaatgagtcacttttgttttaaaacttatcttttgggattgttatgagctatattttggaccttttgcgctattaatattaagtttgaactcaaccttgtttcttcagatagttattgaattgcttcgtagtatttaggggccattttgttaatgttagggtcttagggagatcacaacttctgctaaacaacagtaagacaaatgtatcacttaaacatgtggtaacatcctgattgatgtttcaaatttccgatctcgatgtcatatttcggtgtgggagacaaaacaaggtttatggg

SEQ ID NO: 36263 - DNA, 4853 bp, Arabidopsis thaliana landsberg
  unsure (1)..(4853): unsure at all n locations
tgagaatagacctaaaaaaaaggaaaatcgccaaataagaaaaatatacttttgtttccacagagttaagaatgaagttcaaaatgtgtaccatcttgcttgtcataacaatgtgccgggtatcgattccagtaaataggcctcctaagacatgatctccacggcattttatggccatgacaacctacacagtaagaataaaatgttcaagaaataatttaagtatttatatgcagttcactatgagatcataaactgaaaatcacaaaagtcataatgccttagtatgtagcataatatctaagtaactatggaaaggaagctacttcaggaggctttcatatctgacctcttccaatgaagcgtttccagctctttcgccaattccattgatagtcacttccacttgcctcgcgcccgaatgtgcaccctgaattcaaaaaaagattgacatgttagtaataacttctaacagctaacccgatccaaccaaatatgaaaaaaaaaatggcatacagataaagtgttggcggtggagagtccaagatcattctgacaatgtgtagagattataacattttggatcccaggagtattagctttaatatcagcaatcaactgaccaaactcactaggcaaggttataccaacagtgtcaggtatgttaagagtggttgctccagctttgatcacttcaccaagaatctcgtataagtactctctctccgatctggccaccaagtaaacatttcacgttagcagaatcagctactaataaaggaccatcaatacattaaaataccatcgaatccaaaaaaaaaggaacttgagaacattccatgacggcattttacaacaaaactattaccttccggcatcttctggactaaattcaacatcttcacatcccaagcttctggcgaatctaaccatgttcctagcgatctcaataacttcttctttactcttcttcaacttatacttcaaatgaatatcactagtggcaataaacgtatggattcttggccgcttagcgtacttcacagcttcccaagccgtctcaatatccttcttgttacatctcgagagaccacagattacagggacatagccattttcgtcgacggtattgccaacagtctcagctatggttttaacagcttcgaaatcgtcttttgaagcagcgggaaatccagcttcgatgatgtcgactccgagcttggctaattgacgagcgatatcgagcttttccttggaggttagtgtagctccgggagactgttcaccgtctcggagagttgtatcgaagattctgacgtaattgggatcggatatacggttagggatgtaattgggacgacggcgaggagcatgaggtggtagaggtgaagaagcggagagagaacacgagacacggaattttccggcggtggtaagagagatggtacggtggttctgtgatcggagatgaagagatgaaaatggtgaggtggaggaggaggataaggcgggaattgaaggtacaccgaacgatggtgaagagagattagggcttttgagaatcgaagactccattgccgtggaaaatcaaaaacctgagagagatgatagtgtggcggcggcggcgacgggcgacggcacagtgtctctggttactactttgctagtgaatatttttgatttgtttatttatttgaattgttccgaaccgaaccaaaccaaaccaaaaccagaaacttcactttaacagtcaaccaattggaaaatgaaccggtttaagtatggttcttttgactccttagttttcatcgcctccgcctgcaccaacctccaaaaggacgtttttcaaattatataacatcattttattctccgcttctccattttagtcaaaagaatcacagagagtattttttttaggtatcgtgtaatggctttgactacaaaacctcaccatcttcagagatctttcctctctccgtcgcgtgtttccggcgaacgatatttggaatctgcgccatcatgtctgagattccgtcgcagcggtgtccaatgctcggtggtggctaaggagtgcagagtgaaaggagtgaaagcgagacagattattgatagtagagggaatccgacggtggaggttgatctgattaccgatgatctgtatcgttcggctgttcnnnnnnnnnnnnnnnnnnnnnnnnnnnnagcgcttgagcttagagatggagacaagagcgtctatggtggtaaaggtgtattacaggctattaaaaacatcaatgaacttgtggctccaaaactcattggagttgacgttaggtgagaataagaattcgttcctcaatctaaatgaacatataaacgtcgtgatttggagttggtatgcttagttagatagaaatcttcggagttgttttagctttgtttctctgctctggattactactggtcaatttggtggacttggattcgaatcgtaatgcatgactgttgaatttggaattctagttaaggttattaaggttgtttgttgcatgtagttttaattttgcttcatacttgatactactaagtgttgaagtaggtgtcattgttgaattgttccgtttgtggtttctgattctgaaccgttgggaaactataatcggtgatggatagttgaatgtaatatttttaccttattttctttaaggaaccaagctgatgtcgatgctcttatgctggaactggatgggaccccaaacaagtcgaaactcggggctaatgcgatattaggagtgtcattgagcgtttgcagggcaggtgctggagctaaaggagtgcctttgtacaaacacatccaggaaatatcaggaacaaaggagcttgtcatgccagttcctgcattcaatgtgatcaatggaggcagtcatgctgggaatagtttggctatgcaagagtttatgatactacctgtaggagctacctcattctcggaggccttccagatgggaagtgaaggtcagttagtgataactgggtttaacttgctagaacttaagaaactatggcggctcctaatttttcttgagtttgcaatgaaatgtcagaaaaacagaaaagccttgataagcagcttcctgtttcatatttctcttttggttccaaagttcttctattctttggattatcacaaagaattgtttttctgatagtaatgcatttaatgtactttgttgattacagtttatcatacattgaaggggataatcaaaactaagtatggtcaagatgcttgtaatgtcggagatgaaggagggtttgcgccgaatgttcaagataacagagagggactagttctgctcatagatgcaattgaaaaggccggttacactggaaaggtaatcaagttctctttctttttaatgctaatactttctaaagttgcatgtcatctgtgtttccctaaacaacttctggcagcttcggtgtcaatcttacaccactcacataatatataatttttgcagatcaaaataggaatggatgttgctgcatcagaatttttcatgaaagatggtagatacgatttgaacttcaagaaacagccaaacgatggagctcacgtactgtcagccgagagtcttgctaacctctacagagaattcatcaaggatttcccaattgtctctatcgaagatccttttgaccaggatgattggagctcatgggcttcattgcaatcctctgtggatatccaactcgtgggagatgacttgttagtcactaacccgaagaggatagctgaagctattaagaaacagtcttgcaatgctctactcttgaaggtaaaaataaaagtttttatattattttctcttttctaatctcaattctctagaccattttgacaaaacccccgttattggagaagaatttcaatttgtttgtaattcatggtttcacaggttaaccagattgggacagtcactgagtcaattcaagcagcacttgactcaaaagctgcaggctggggtgtgatggttagtcacaggagtggcgagacagaggataacttcatcgcagatctctctgttggtttagcaagcggacaggtacatcaaatcctctaaacctgtctgtattactctctagtgtttgcttatcattctctgttttgtagatcaaaactggtgctccatgccgaagtgaacgattgtcaaaatacaaccaggtagttaactaatatccaacttatgcttaatactatactctatagaccacatatctgaacccttgagtttgatttatttccattgcagcttctccgtatcgaagaggaactcggcaatgtgcgctacgccggtgaagctttccgatcaccatgagaaattcgagaaaggcactcattggcggcttttgcttacagaattaggtgaaaccaaatgaggtcctcctagtatcagctccgttgtagctgtctctgaaaagtatcagattttctacaaaaacaaataaaagaacagctttttcactgagtcttctgttgtaatgtcattgataccgatataaacatggatcgaccaaagcgtttttcagattaatcagatgctcagagatatgtcgatttgattgttccaatgattaagaagagtgtttcattcgtgttacttaatattagaaaacttgttcacgcttgagccaatggtattggcatagttgtcggtcaacgaacaaattagttggcgttattccttcagctaaacggaacaaagatcaaatatacaattaacaaaatactagatacaaaaagaaaaacaaattaacaatttatgtatattatttctttatagataaaatatttacatcttttt

SEQ ID NO: 36264 - DNA, 2074 bp, Arabidopsis thaliana landsberg
  unsure (1)..(2074): unsure at all n locations
acgttagccacgactaccgctgtaatgatccatttgttcctagtcattctccttgacatagccgtcaacaccttcttgctcttgtcaatggcgtcatccacaccatgaagctgtgattcaaaatcagaaaagttagcttctcaatgatctaattcaaacaaatcattggcactgatagataccaaaccgagcaattgtagacggtaccttgttgtgcgcatgaaggagggtttggcgttgctgactcaaatcttggacaattgagatgccaacctcttctgtctccagcattagtcttctactctccctgattctgtcacttgattggtcaagcctctccacggacattgccaatcttcctctttgatcagcagatacctggaacatggacaataatgtaaatcacagcaaagtctttgccatctaaaagtttgtgtgaagatgaatataaaggagggtcccctcaggacaaagaagcctaactgatgcaagtcaattaagacaactaagataatgagaaaacaagagtttctatttaggagttagaagcttactgcatgcagatccgccattccggattccatcaactcttcacgggaagacggcttagcatctgcggaagagactcgtttgaattccttcttcaattggttcagatcagatttatactctcttagtttagaaagacacacagctttagcactcggctgcaaacttcttgcctcaagatccattttccggatctacaaaaaaaccacagaagcatatatattaattttaaaaaagaaagaacagaacggtaacaacattaaagcaagttaaatgcaaataccaagacatcagcttcgtctattccagacttgatctcagcaatcttccccttcttctcctctataaaagcacacaacaatatctaatcaaacctctactctggttctatggcaccacaaaatgtaacaactccatgcatgtctatgtactataactccaagaaagacagtggtaaccatagactgacaaacaaatgaaaaaaaacaccaactcaataaacctctgcagctacataactaggttcttatgatcttatcttcagtcttaatttcttcacaaaactacttgaccaatccaagtaaattacattcccagatactacagaactcgtcagatcgtaaacaagctaaaacgattagtaaacactcatgcacctctactttacaaatacccccaaattcggacaaaattagatgaaatagattgagaaacaagttaataaatctatgcaactacataactatctagacctaactaggttatcgtcttctaatccaagcaatgagaaacagatcctatgtctcaacattcctaaatgttacaaaacttcgtcagatcctaaacaagtcaggacgattagtaaagaacactagtccaccagctacttgtcacagctcaaaagctccaataaccccaaattcgaagattcgaatttctaaaatcaggtaaattcgaagatctcgcgttcaagatccgaaatcgggagcgtctggattttacctccgttggagagaaccgatgcagagtgacattttctagagagattggttgagagctcgcagtattgacgctcgtacccttcaaatacgtcgctcatcttcaattatatgtttcgatcttagaagatttggtggattttttctgatcaatcggatcctttgtttgattggattggatcggatctagaagcaaagcagtttcctctttgcttaaagataatcaagcaactcttcttcttcttcctttgtatttctctgctcggggacaaggaggaacaatcaaacaaagcggtgcgttttatattgacacgtgtcagccgctgcgtgttaagtcccccttgctgctgtcgttgctgntgtgggttggtcgggccgggccgggtcgggccgtttttnnggtttgnggtgtgagtgtcggttctcccgttttcagctctcgagtgtagtgtncgttttgtgcnggtccagaagtttctgagcccggggatagaaaagtccattgatagtagtcgngtgtgttttgc

SEQ ID NO: 36265 - DNA, 2339 bp, Arabidopsis thaliana landsberg
atccgtctacaagcttttagtcaattcgccaagctgattgagagcacccagagcaaagagcagctctaaggactttataagagcttcagaaggcggagggtccataaagtcaaagttcagcagattatgaataccaagactcttcaaagaaagcaccacactagcaagattagtcctttgtatttcaggtacggtattgtcctccaagtcattgtagtaattaaacgccgtgtacaggcggtaacacttccctggactggttcttccagctcgaccagttcgttgagtcgctgaagccttagagataggcgttacaagcaaagattccatccctgttctagggttataggatttcatcttgctaaagcctggatcaacgacatactttataccatcgatggtcaatgatgtttcagcaatattagttgctagcacgacttttcgtgccccttcaggagttggttcaaatatttttgcttggagctcacttggaaggttagcgtaaattgggcatataatgagttcgcggatctttgtacccaaacctcttatcttgtgcttcaagttctcttctacggcttcaatttcctcttgacctgggaggaagaccaaaacatccccaagtggctccttcacatgtatcgtaagcacagtagttattgctgcgtccatgtaatcagcttcaggtgcagtagtaaagcaaatgtcaacaggataccttcttcctgggaacctgaagataggggcttggtcaaaaaaatcagaaaacttctctgcatccatggttgcactggatatcaataacttcagatcaggccgagcccgtgctatatcctgccataagaagagagaatcagaacatatccaaagatctaactctaattgaataatgtaaaaagatagctaggtatctacttgccttcactaatccaaatagtatgtcggtgtgcaaagttctttcatgcgcctcatccacgatgataacactgaaaggttcagctattagtaagtaaagaatatatcacatgccccatgctaagacaaattggctaggaatgttgattacctgtaactgcccagatctggctcaccaagcaactcacgcaaaagcattccatcagtcatatatttcagaattgttttctcagacgtacaatcctcaaatcgaatggaatagccgacctgtgtcaagcaccaccaaagatttagcttcttgcagtgtatgcttaaacaaatgtgtaacaaacaatttccaaaaggaaaaatgttaagacgactaacaaaaagaaaacgtacctcatgcccaagtttaccacccatctcttgagcaacacgagcagccacactcatagccgcaactcttcgaggctgcgtacaaccaacctgccgtatgacaaaataattagggtgcttaaaaataagtttatgctttaccaacatctgccttttttgtttttatactttccaaatcatctggccacaaagattatgcacaaaggcaatcctcgtgaacctctaataagctagcttctaaaatataaagcagaaaactctaataaacgggctatacttgcttgtggcaactttgacatgctaaagctctcgactacagaataaataacacatcatttattgatgacacttaaattcctctattaaatgctttacaagcatatcatttatttgataatgtgcttcaattaaggtcaagtgtacctttccaagctttgtgtaaccagcttcgtgaagatattggggtatctgtgtagtcttgccagaacccgtttcccccacaatgataagaacctggtcagttaaaaatgagggaaaagggtttgaatcatacatgtcacagaagaaatcgttattcaaataaaagaaaaaatatatgcattttcataatgaaaaactttaatccacatcaataagatatgctagcttttctcatacatgttctcttatcaaagtactttttattatttaattctatgtcatagacttagatgctgtcaggatgaaatttggtccttatggattgctagggaaatgtgacgaaatgattttgtaaatgtacaactttccttgaaagtttcagaggaacaatcaataacttaaacaaaaaataagtgacatgaaagtaagaatcccgtcatgatctttcccagcattaaaaagttgatcacatatgtataaattggcagagctttcaatcctcctgattaattcatgaataacataaacacatgtcagacaatttatcaacttttcccagggaacttctaacatgtagacatacaattattcagatgttttaggcaaggaaacatcaaacagagcac

SEQ ID NO: 36266 - DNA, 3277 bp, Arabidopsis thaliana landsberg
ataacaactttcatagcttgaaaccttgaacaataacagataacaaatccacaagtccattttaaaactagaagacaaaatatcaaacgttatccaccggtaaactcatcatagattaccctaatacgtattgagacgaaatcaactgaaattgtatgggcgatcttgtttttttgcttatatttgggatgaacgatcttgtttaatgttactaattgttatctttagcaaaccgaagtgggaacgaaaccccatgctccaagtccaattaaataacatatgtccacagaaatgttttcaaaattcgaataagccacagcaacgtgtcttgttcatatatccactataacccaaagctgcttcaatggtcggatatggacacgtgtcagttaatcagaccatctccaagaaaaaatatcccaaatctttcttccctattcagtcccccaatcaacaatcctcttcacatttctattttctcctccgaggtcgtctctcgaccaaaccacaaaaaccagaacaaaaataactaaaaaacaatcagatctgagatcgaacaaaacaacatgaacacgttaatcccatcggagaaaagatggatcatcaccggcgttttactagccggtttagttggcggtgctttgcttttcacaagcttcatacgagccgctgacgaaacgctcttcctctgttccacagcaagcgccaaaagcagagcggtggctgcggcagctgattacgaagcgactccgattcagcttcaagcgatcgtccactacgcgacatctaacgttgtcccacaacagaatcttgctgagatctcgatctctttcaacatcttgaaaaagctagctccggctaactttctcgtgttcggtctcggtcgtgactcgctcatgtgggcttctttaaatccacgtggcaaaaccttgttcttggaagaagatcttgaatggtttcagaaagtgaccaaagactctcctttcttacgtgcgcatcacgtgcgttacaggacgcagcttcaacaagccgattcgcttctacgttcgtacaaaacggagcctaagtgttttccggcgaaatcttatctccggggaaacgagaagtgtaagctagctctcacgggactgcccgatgagttctacgatacagagtgggatctgctgatggtcgatgctcctaaaggttacttcgcagaagctccgggaagaatggcggcgattttctcggcggctgttatggctaggaaccggaagaaaccgggagttacgcacgtgttcttgcacgatgttaatcggagggtggagaagacttttgccgaggagtttttatgccggaagtatagagtcaacgccgccgggaggttatggcattttgctattcctccggcggctgcgaacgctacgattgactctggtgattataggttttgctaagattgcgacacgatttatcttcttatttcctcttttgcccttttattttacttttttgaggaattttattacagcattgggttcacttattatctgatttagtgccgacagttttggatctgcatctcgtgtttcgctatttttagttacaggctttccaaaatttcatggggcattatatttcacatttttatcatatattacatacttatgatacatagtcatttttatcgtataagaatctgaataaaattgcttgaagagaacgtaaattttttttgaacaaacaggagaacgtagagttttaattacccataactcgttttaaagactttttaatgtttaccagtctaatttcaactctattgagaatagcatgtggtgtgagctggtaagtggtagtaactctgacttttcttcttacgtcacggaaggtaattatattgcatattgaatttccaacgagtattggtgagtatttttgccatatactacctttttagaaaatgaaaaggaaaatagatatgacgacgagaatctcttgataaaatgtgtgttggattttcattaaaacccaaacgaaattttataaaatgtacaagttgcgatgtggagatacaagtggaaacgaaaaccaataagaaatgtcttctataaatctatttaaaatattccataaattttaacttttacgtataacccaaacagtcaccatgtttaagtcgtatgttttttttttctgtaacccatattaggtctttcaatttcatttatttcctgacttttaaacatatatttatcttttttaatagggtttattaggcaaaagaggagatatagtaagaaaatactgaatttatgtaagtggaaatactttggatgtgctactggtgttagatcaatggaaaatatagagtaatagagaaaaacaaatatgaaaaaggaagtttatttgtatatttattggatcaattttttgtttttctttagagaaatatagagtaattttttttttaaataaactatttgtccaatgcagaatttcttaggatcaacttcaagatacacttctgctttagcaggatcctcccacttacagtatagtgtgatgactgatcagtgtctcagtgataataataataaaccttcatttatattaattattatataattctttgaccaaaaaataatactaattccataattgagacggtggatcgttccgccggaccaacgccgggtgggtagctgtcgcgtcgtgacgcagactaattagtgattacaggtatctatctcattctctatctgtttttctctcttttcgttgaattgggcttagccaacaattatacgtatctcccaacttcaacgcttttctctctcaattgaaattggagtctgattctaacagtttccaaaagtcggatttttcaccactgttaaaggctgtctatgaaaacatgaacttgtgtgatgagtttcataatgaaacacacagattccgaaagtcataactcaagtcttgttgttacagaggattatacttttatttttgaatgtgaaaacatatacaaatgaacaagtgtctcaaggagacaatggacctgaaaacagtgacacaacagaacttgtgtcatcacgattaagcctaaagacaggtattttttatgcctcactctttctgctttctcttcttatagatgtaccaagtgctgtgtaattattgttagtattgttgaatcctcctgaatactttctgtttataggacttccacttccaaatccaccattcatgcttcgatttgatattcgcctattgctgctagctggccttgccatgt

SEQ ID NO: 36267 - DNA, 6277 bp, Arabidopsis thaliana landsberg
  unsure (1)..(6277): unsure at all n locations
cacaaaaagctgcaaattttatgccataacctaatttcgatttttgccacttttaattttttatttgaaatttttattttcttcccaccaaacatacttatttgagatttttttgcttccttatataaaaacgagatcttgtgccgccaaacccaaccagaactaatgggttcgtcaatgatgattgaaatagagcaccgagcctaaacacttacatttttatatgtgaatcttcaatgaatattttttgtaacaacacgcattatgatttaaatccggataggaatacaataacgatattaggacaaactactatctcttcatatctttatccacaatggatttcttgtcatattcaagaaatgaaacaaataactacatatgagataataatatctatatgggactttgacgttaacataaaaaaatctaattttcactacaaattcatagtcattttctcagagttccaagataactctcatatattaaagatcatgtccactataatcgtgtatgttaaatggtaaccgattgttctctattgatttagattcatcttagctataatcatttattcatttatcataaacaatatgatcatttaaaattattaagaaatcaataagaaataacaaaataaaatgtaataaaaattattctataaaaaagtcagctagtaaatttataaccaaaaaataaaaaagaaaattaatgggaagagtgtgggggacacgagagtttcacgtgacgtaaataagtcaattggtaattaatagggtgactctctctgacaggaagttaatacaacacggaaactcttttctccaagttctctctaattatagtttttccaaatttttacaattccaacccctttctctctaatctctattccaaacctctgcatcgctttcaaatccaaatacattttgactcttttcaccactctcgtttccacgttcttccttttcaccagaggaagaatgtcgatgacagagccggtgtggaagatcaatccatagccattttaatactctgttttatttcttccattaattgtatctagggttttggtttttggatgattacatctttgtataggattaaatggggaattgctttgaatcttgttcgaagagaaatgataatgaggacgataatcttgactcctcagtgaactcgaaacccttttcacgtaagctcttctcattctttgatattcatatctctctgtttctggaagagtctaactaaattcttactggaattgttgaacataacttgtccttttgcacattttcctggaccctctgaatgttaatgcattgatggatgaatcttttatgtagtctggttattcgattgccctgttcttaactttagtaactttgttgttgatagttctgtttatccatttaattctcattttgatgtaagaatgtgtggctctgtttcttatccaggagctaatagtgatactggaagaagctcgaatctgtcatatccatggagtttaaaacctctcattacaagaaaatgtgaagctatcagtgctctacctccaccgcacaaagaaggagacataatgcattctcaatatttgaagtcctttaccttagatgagctaaagaatgctacaggaaacttctgtccagagagtctaattggagaaggagggttcgggtttgttcacaaaggctgtattaatggtggacctggaatcgaactcgcggttgctgtaaagaagcttaaaaccgaagggcttcagggacataaggagtggctggtaagcttcttttcaaatcattttattatgatttcaccttgagactgtactctattgaaatctctactacttgtatatggttttctccaaagagggaagtgaattatcttggaagattgcatcatccgaatctagtgaaactgattggttactccttggaaaacgaacaccgccttttggtttacgagcatttgcctaatggtagtcttgagaatcatttgtttgaaagtaagtaaagaaactctttcttaaatctaaaactttttgagttttttcttcaatgatctggattctgcttattctagggagttccagtgtgctttcttggtcactgcgtatgagagtcgcgattggtgctgctcgagggctatgttttttgcatgaagctaatgaccaagtcatttacagagacttcaaagcagcaaatatccttctcgattcaggattcaacgccaaactctcagactttggattggccaaagaaggtccaaaagataaccgttcacatgtgacaacagaagtcatgggtacagaaggttacgcagctccagagtatctagcaacaggtttctctttatttatttatttgctcatttgattccatttcaataaagaacataacatgaaaatttctaaaaaacattgcctttttttgttctctgtcaggtcatctaacaacgaaatgtgatgtctacagcttcggtgtagtgttgctagagattctctctgggcgtcgagtcatagacaaatccaaatcacgggaagaagaaaacctagtggattgggcaacaccttacttgcgagacaagcgaaaagtgtttaggataatggacacaaagcttgtgggtcaataccctcagaaagcagcgtttatgatgtctttcttagctttacaatgtatcggagatgttaaggttagaccatcgatgcttgaggtcgtatctcttcttgagaaagttccaattccaagacatagaaagagtagaagcaaaggttttgcttgtactaactctgcttctatgccttcaaaacggtttctcagacatcctaaggactaaaaaaatctttggctttttggatcgttcttttgtggaaatggaatataaaacttttttgttacttcattaataacttctgattaattatgagaaatggaaattaaagatatatggccatgatctacattctacaataatgttttaaccatacgtttcattttgttatcttaatcattcagttagtggttattaaacaatacataatcatgatcattgtgatgtgtatgtatgcgtatatataagaacatgtacattgagtagtactacactatttactcgaaatgattgcatgtcatatatgcatggagagacgaaaagaggagtctaatccaaatctaaacgcccctataaattacccactaattaacattaatcatatcttctcgtaactccaaatttaacacgacaatcaattagccgtcaatactcaataccccacttctcctaatagattcatcatcacttccattctttattctctctccatatcttactaccactactctcttctctgaatgtagtatataaatcttttctcgcatcatcgagtttcacaacacaacttctatctctctcactttctttacaatggctgatcacacaaccaaagaacagaagtcattctcattcctagctcattctccatcctttgatcacaggttaaattcagaagcttttgtttagtttcattttgttagtagtttttgtttacttataatttattttctctgtatttttccaaacgcaatgcagctccttaagtttatcctttattcgactgggaagaagatcttcttgctctccaagaaaactctggctctcaagcatttccttttactacaacttctctgcctttacctgatcttgaacccttgtctgaaggtataacatattattacatagtttttatattcatatagagctatatacatagaggtctcatggtcttgtttgttctgtagatgtactcaattcatacagctctgcgtcatggaacgaaacagagcaaaacagaggagatggcgcttcatcggagaagaagagggaaaatggaacagtgaaagagacaactaagaagaggaaaatcaatgagagacacagagaacatagcgtgagaatcatcagcgatattactacctacacaactagttcagctccaacgacattgtcaaaggaaactgtctctcgctacttctacatgcccataactcaggctgcaatagcacttaacgttggtttaactctactaaaaaggagatgtcgcgaattgggtattcgccgatggcctcatcgtaaactcatgagcttaaacactttgatcagtaacgtcaaggtatgtagaacaaggcactacacttaatattattgttttcagataattgaactcaaatgttttatcatatgaataggagctgcagaagatggaaggcgaagagaatgcagaaaaactgcaggacgcgttggagatgcttgagaaggagaagaggacaattgaggatttgccggatttggagtttaaggacaagacaaagaggctaagacaagcttgtttcaaggctaaccacaagaggaagaagaagagaagtctcaagtccgatcagtctcaagtaccctcgtgttcaagcagcggatcagttcctagtgatgagtcggttgatgaagcaggaatggagagtgatgaagaaatgaagtatctcttgtgtggtttctcaagtgaatttactagtggtttgtgaaatctgtttttagtgagaaattggggattgtaaagccaaatgctttttgactaattcaatgaacagaaaacataaatatgatactgaatacattgaagagtaacaacattagtgtagatagattactaacaaacaaaaaaagagagatagagatgaagaaaggagatagacctcattatttgtttcttaaacactaagcttctcaatctctctccttagagcattagccctaaccaaacttccaatggtgttcacagccaacttgatatcctccaaaggactacccggcgcaacccgcttgtacagatagctatcgaatgtcatcttctgaacatactcatcattacacatctccacaaacgcttctctagccggatttgatctgtaaaacactttctgcaacacatcaagtaccctgtaggtaggcaagtatgtcttatcccatttctccaagtacttcctcaagtccccttcgtcaatcatcttcttacctatagcaacaaatacactcaagactttagtcttcactaaaacttaaacacaagaatcttataaaagcaaaaaaattttgaactcaccattctgtgaaccttcgacaatggcttcagcacacattcttccactcttagcagcaaagtagatcccttcaccagagcatttagtcacataccctgcagcatcacctacaagagccacacgtttcgagagcctacgtggtctcggatgttcaggaatcggatgagcctccacacggatgatcttccctccaagaatcttgtccttagctctgtttctggtcgcgagctggaacttcttgatgtcacctttgtgagtcacagtacctgttccaacagctacatggtcgcacttagggaacacccaaccatagaaatccggcgacacatcatctccaacatacatctcagctaaatcctcatagtaagtcattttctcatcaggaatcctaatcctctcctgaaaatttccaaattacaccactcaactccataataacaccattctcacaaccctaaaacaactagaacaaaactaaaacttgagaaagaagaaagaactttgacctgaaatgcaattgcgtagtcgtaatcaccagcatcaatagatttagcaaccctagagttagctccatcagctccaatgacagcatcaacctccattgacttcttcgtccctgtagctacagttttaccatcgtactcagtgtaatgcaaagtgtacggcgagtcccaattctccggatgatccatcttaaggaagagaccgttaatcacagtggctccactcttctcagctctctctctcagataagcatcaagaacttctcttctcaccatacctatatactcatgctccttaagcgtacgaccaatatcaacagcaatgttagacggcgaaatcatcttcatcttcgtcactctccgatcaataatatccaacggcaagttgaattctccgaccatacagagaggaatcgcacctccacaaggcttgcannnnnnnnnnnnnnnnnnnnnnagaatcgtctcgattcctccttgtgctagagtctctgcagctgctccacctgctggtccaccaccgatgacggcgacacggagtttacggttggagagtttgggagtggctctggctgcggctactcngagagaggtccgtcgttgagggagagaaag

SEQ ID NO: 36268 - DNA, 1864 bp, Arabidopsis thaliana landsberg
  unsure (1)..(1864): unsure at all n locations
tgttagaagatgggcttgtctttaaaaaaacatgatgaagtgatgatgggttagagagagaaagtatttgtgtgagagagaaaaaagacaatgaaagtagttttaatgagtgtttgtctctttctgtctgagtttttgttttttcgctttgtctttgccgttgaatttcgccattgccagctccagagaaaagacagagagtcccatccgcatataaccgattcatcaagtgagtctcttatttaatttttacaatcattcatattctaaccataactgtgtaacattaatataattccttgtcacgtttttattttagggaggagatcaacgtatcaaagctggtaatcgtgatataagccacagagaagcctttagtgctgctgccaagaatgtaagaaccttatttctcacatcccaaaaatttatattaaactgttatccattggttgaatcaaattttaataatcaaaagagtccttgataaccatatttactctagttcaataaaaaattattttttaacgctgaaaatctagttagaagtgatgcgtttaagtatctttgtttcctttctaaagaatttaagccattgatactactaacatcacaacttggtttagattgccggcagaaactagggtttgattttatctatgcgtatagttgctcttgtattagttgtatatatattaaacagtcatatatgtaggtatagctgaaattaggagtaaagaattttgtcgggttataacacaagttgatatgtgtcttgtacgtatgttgtttatgtgtaatgcagtgggcccacttcccccacatacacttcgggctcgtgccagacaatcaacccgtgaagaaaaccaacatgccccaacaggtaaaccctaatctgtcgacataccttacatctttaatgcatatacttttatgtaatatcatatatacaaatataatttcaattgatttggatcatatcttaaacatgtgtgtaggagggagaggataacatggtgatgaaagaagggttctacgctcctgcagctgctaacgttggtgtgactccttattaaagagataaatataatcgactaagtatttgaggaattgaaatccaatttcttagggtttatcatgtccaaaagttgtggtttcttttcctttcttgaacttatttatatatattataaatatgcatgtgtctttttctgttgttgtaatcaaaaatcttgctaactaatggggtttctttaagttaattttcatttgtagtttataattaattaacttatcaaaatgttttcttattattactgaaagccgaatttgaaatttaaataatcagacttttttaatagatttttacaccatcgccatatgtaaaagaaactcaaagaaaattacaaccaccaattaatccaaagctctttttcctccagaatgaatatatcacaaaaatttaaccgaagagaaaacaagaggggaatgatcatattacatttcaaaattcaaactaaactaagaatggaaatatgcacaagcatttgcttcccggaaacatgtaaaacgatgtgattctgttcaaatttctccattcaaaatctgattcttgagattgttgcatatggtttaatcttattgctcccattaatggttttataatagtgatatggtataattaaataagaactggggcatgcatcaaacgacaattgttgtcaaaatagagggaaattaaaagttaagataaatttatttcgcaagatcaaaaattcagtgatagcaataagctaatctaaaagtgtatatcagacttaaatctaactcgtctnttttcttttggtgcaatatatagcggtggata

SEQ ID NO: 36269 - DNA, 3416 bp, Arabidopsis thaliana landsberg
tattgaatcgcttcttttgtaatctggtcatactattaggagtaacgctcggattcggtttttttcttttaacttcaccgtaccaattaaatagtgttagaacagttagactgtgaatttaccgccattacaggggtagtttaggacattcatcaccgtaaaaagatagaagttaattttgttttgacgatatatgcaatgagaatatgacacgtgtaaaaagttccggaagagtcctacgcattgccatgtaagcattccagcgtggcgaacattattacttgggacccacatactgtcttttgtacggaccgttaaaatgggtaaaatcttactttttcctttttttgtaacactgtttttactactatttcgtacgagtttggcgccatgtggtgccacgtggtgaaacatcctggctacttctgtttgaccctttcttggaccttttttttttcttctaataaccaaaaaaaagataaactatttctaacaaatttagtagaaaccatttatttcagtaaataaacaatgttgataattttattatttcctgataaaattcaattgtttttcaaattatactcaattttcataaataaataaagaacaatactatggaaaataaaagataaagataaagttttgttcttataaactggataaattggattggctccattatcctcgaattgaatctaaacaaaataaactaaaagttgaagtatccatcctgagatgtataaaattaagagaaccaagaggtgaagaaagaaagatggagacatgttcttattgaagatgatataagatagaaagtaacacacaagaattaattcctactttagtttatgtctcttttactctatttttttccttcttctttacatatttttggtgctttgttatattttctttcctacacaataaaaagtgaaaacattatgcctttgtcctctaaaagcttttaagtttccaccatcttaatttgtgttacaaagtccaattaaaaaaaaagtagactttgtaaagtaaaagagtggccatgatgcacaacttaaatacgtgtttggtttctttcaaatttcaatattgatctccattcgaatttgttatatattatacgagacgaccaacattaaggaggtttatttcaacacattaacgagacattaagtaataggtgcctgttacatttgatcatatgtactattaaaaatatatgatgtctttgtcttaccattaaaaaaaaaatgaaatcttgaattgtggtttcgtctttgattgaagagcaagtgacattgcaccttgactttgttgtatggtatccttttcttttctctttgaataactttggttctcactttctttctttttcttctcttcttatttgattcaacttaaagttggtgttggtgttattcatgtgatatcaacatttcaaaagaaaagaagaaactactacaaccattgtaagaatcttaaagggtgccttacctagaaacttcatctttcctcaaaggaaccactataatttaatttgttgtaaagaaaaggtttcatgcattttgaactatatattgatttatctttcggttcatatacataattattcgtgtatcaaagtttttgataatagtgactttaattatgcttttgttccaacatcatatcacacacctagatcttacaacaattcaaaagaggcttcactggatgtgtaaagcgtcccattaaagacatgtgtttcattaattgttggggcttactagtgcatacatatcacatgtactatggtccatacatgagaagctcgtgacctaacggatacatctttggatctaacatcttaatcggaaggtaaaaaaaataactaactaatatcgaaagtaattaagagttgtgatctaaaaacatgtacattgatgaactcttctttcaaaatccgagaccgtaaaattactcagtccatacattcattatgactttggaacatttcgtgacaacttttacattggatgtattcatgtaatatcgttttcaaacttgaagaagttcccatcgagttactcaaatcataaatgggatctcaattatcggatataaatgacaataattaggtgtgatttatattggaaactatctagggaagataggtagatgcataagaataagataaaaaggagttaggtttgagaggtcccgattgaattaaagatgtgttgggccatcactctttcttgctcttcaaaaaataccttacttagccgtatcatcgaaacttaactttcattataacaaaaacttccaagattttatttattttatatactttaaaaatcgttgccccattaggagacaagagaagaggttctgcaaaagactttaacttggtgtcatgtgtggttgtgcttatggacagtctgtggtcccttcactatttttataatttgaaaaaaaaaaagaaaaaaaaaagaaccaatgtgtagattgcatgatacccactactgctttcacaatctcatcttttgctaaaatgaataatgatcccacctccacttttaattcgttcagacaaaatacgaaatatatctatttttattataattataaatgtatatatgaatacgaggagagttatatgtactgacttgttaccatcagatcatgaaccacatttactccaagcaaacagacaaaagacaaaggtggtggtggtggtggtggttgttgttgttgttgtcgttgtcagatcactgattcactttcaccaccaaatcaagaattggttaatcagtttgaatcaaaagtatagattagacagcaggttattgtgttgttcttaaaagtaacttacacatatccatcactacatgagccctacttcaagtccctacctttgactagaccgatcagtcacattcgtacgatctaagcagagtaaatgcgagcatgagtctcatatggtcacttcacactttctttatcaggtcttgcgaggtggcggtagttgctactgctgctactgttgctgctgctccttttcattcctctcaaaggcctacgcgtagcaaaatcccacaaggtgattcttttcgctctttaatcagatttgaaagcaaaacattgataggaaattttctagtttggtggaatgatcatccacgttattgtatcttgcgtttgatctcaaacttatgaactagtagatccaagataacaatgacaacacgattttaaaatgcgtttctatattaggcactgataaaagttgtgatatcagactggaaaacaccaattgcaaaaagatatctagtcaaaagacaaggcctaatgtgaaagtttcactgaatgcttttaagtttcaacacagaacatagcagatgaggggttaactcatgttcctacactttact

SEQ ID NO: 36270 - DNA, 6821 bp, Arabidopsis thaliana landsberg
tgaaaaacaacataccatcttgtgttttacgaacaggttcaaacagaacatcatttatctgcatgtagccaaaaagattctcaagacaaaggcttatctatctatagcaacatagggggaaattaaggacaataagaaataactcaggccaagttacgtacacaaacagacacatctgaaccagaaaacccttctgtcttttggcctaaatattcaaaatcaggttcagttaaattatgaggtgtatctcccaagtggacctgcatttacaaaacagatctcattagtaaactggttttgtctcccttgaatgatttttacttgagaaacttgaagcaaatgaattatactttgaacatgtgctgccgagccttggcctctgggagaggaatatagatacgcttgtcaaaacgtcgccggatagcctgaaattaacatggtgttaacaaaacaatatttaactggcaaagaaaatagagaaccaagccgtgttatgactttcacctgatcaagagcatagggtgtattggttgctgcaagtacaagtactttctcatcattgtgtccaacaccctaaaagataaagagatgagtcagagacggaaatttcagctacaactaaaaaacatggagtttagttcggataagctatgcacctgcatctgcactagaagctctgttttgatacgtcttgaagcttcactctcgtttccttctccacgtgtaccacacaaagaatctatctcatcaacaaaaataatcgagggagcactttcacgggccatctcgaaaaggtttgatactagcttctcactttcacccatccacttcgagacaaggtctgatgaagacacgctgaaggttgggaagtaaaaaggaaacaacttttcttaagctataacatgtttccaagtataaacactgtaaaaacaaactgacatagaaaaacaaccaacataaagtacatagccatacctaattaaaaacccaagtacctcgtgcaaacaacattgaaattagaaattctggcacccttaaaccaaaggatcagcattcttgcctaattaaatcgatccgccttggttctctaatatgctatttagattctaccaggcctttaaaatcgggttgcagctgcttatgtataacatgtacagatagcagagactcatacatctattctagcatagagcagaatttgcatataaactataaaggaacatcaaacctttccttaatatttctatccgaacttgtagtacaccgttagaattcaaacacaaacaaaaccaaagaccaccctacttaaactaatcccaaactacttcaatacgcttatcatccatagcaactattcaaatccataagtatttgactatggtctcaagctataatgaaagagttaagacactacaccatcctcttcctatatactttcagaaattcaaacacttttaaacatacgttacctaaaaaaggtagagtcagcttcagtggcaacagccttagccaaatacgattttcctgttccaggaggcccatacaacagaaaagctctccaaggccgtctctttcctaagaagtaacaaaacaacagataaagctcacaactttacaaagagaacggtttcaaaacttcaatgaatagctccagattacacaaatttaccagtgaagaactgtggaaacttgacaggcaaaatcacagcttcctgcagagcttgtttagcactttcaagcccagcaacatctgaccacttgatattaggtttctctctaacaatcgcagagtttaacccagctcgaagctttgattgttcaggatcttctccatctttaccaccaccttctccatctttaggcttagttttgggcctcgttgcgacggctgcatcaccgttagatcctggacccgatccaccttcatcgagaacagcacggatctcctcagcacgacggagatactcggtgaatttctgggtaatagcttctctgatcttagggttcttctcatacttgagatgagttttgaagtactcaagcgcgttcatgtatagagggaaagctttattgtaattcccagcattgtcttcatgaaccgcttgcttcacgtactcgatcgcttgttccttgaaattgctgtacataatttagggttttacaagagaaattgaaattctctcgatttaaaattgtgattccgaattgattgaatcggtgatgatcaagggttaaaggagccttgaaattgtgataggaagattccgaattggagacgaagatcggaggaaggagatggagaagagagaagaaggaatggattatgcaaagcgatgaagaaaaaagctagatttgacgacgaagacgaaaaggtcttgaaaacagcggagcgtaggttggtagaagaatgaaacggtgaggcgtttttggaagttgtgaagaattggctcaatgttttgatgaatgataaggaaaacgcttgccgttttttaatatatgcttattttttccaataattttgtattaaatggtttgaaaaagaaaacaaattgtattaaaaagcagaagaaaaacaaaaaaatccacgtagagagatacatcaaaatcccaccattcaaatatattaagtacaaggtccttctaataggaggcaaatttgaaatttttttcaaatagtgacaatataaagcatgaccatgataagttttcttgttatcaaccttaagaaaacaaactagaaatattatttcaaaaacaaaccttaacatcaacacaaattagtaaatctactttgaatgcaattgtggcaaaaaatagtgaccaaaattaaacttgcaacaaagaacatttaagttgcagaaaggacattccttttattcattcaaaacatttggagtcacttgtgcacattgcaaacgcaaagaccggagtttcagcagcgaatcgtaattgtcaaccaaagcgaacaggttctattgatacccaactagcaagattattgattatgtctcaatgataaaacgaacgaatgaatttttcactagttgacaatgcattaaagaaaaaaggaaattttcaagttcaaagaatatgttcattagtgtggaagcgattaggcaatacaaaaatagtaatatattattgtcttaaacacaagataatcaatagttattggcaagaaacacatatcttcaagtaagaaatacattatccatcataaacttataataagaggagatcattgcaagatctattgagattttcaaagtactatttgttacctatgcgtctagtcatctccaacgaaacaccaaaacactattttaggtgataattaaccaagtttttctaaaccatagtaaaaaaaaaaaaaaaaaaaatcccccacatgataaataccatccgaaccactaaaaaccggtatttgacccaaaaaaaacactaaaccggtagacggaacgcaagagcaatagggcctacgtggcatagtttagggcactcttcagtctaaagacacactaaacccaaagtcaacgcttttctcttcttcctcgactgctctgctctgctctattctctggattgagaatttggactgagaacgacgacaaatggggaaacgagagaaaaaacctaatcgacgtcgccacaaaggtgaatattcgaatgatgctgaagatttctacgatcaacacccgccggctgttgcctccgtcgacgaagaagatgaagaaaactctgacgaagaagaagaagaaaatgatggaaacgaatcatcggatttgccttcaaagtttctcctttaccaacaatccgttcaggtaactgcaattctgtgcttggccttctaagtttcattgagtggttcttactggttttatgaaatcagttaaaagtacttaaattttcttagggagagagttctctgtatctcttgtataaagaagcactaagatttaacaaattgtattgtttgtgtttcactgttcttgttctatcatcaagcactaagctttaacatttgttgttcttgtcttttcattgctttttgtttgttgcagtcaccaaaaggagacataagttacttgcagaagttctttttaatgtatgttggtggaagacaacctttccatttccaagaagatttctgcggcactgctcttttaaggttgttgtgtgtttcactaaatggtacaaaataatgtagcttttggttttcttgcttgaataagtttttacattgattgttggaatagtgcggagtggctgaagactgacactagacggactgctatagggcttgattttgatcttgaggcgttagaatggtgtatggataacaacattagtaaacttggttctgacgtgtattcaagaatgtcgcttttccatgggaatgttttaactcctcttgaggctaagcaagtgaaatctaaatcccatgagctgatacaaaatatcagcttggatgatggtgatgataatgaagatttggctgatccgagtgttgtcgaatctttagagaaagatggacctgattcgttgccaaagagggatattgtgtgtgcttttaattttagttgttgttgtctccacaaacgctcggagttggtttcttacttcaagaatgcacgtgacgctttgtctaagaaaggtggtatcttcgtgatggatttatatggaggtgcttctgctgagggacagttgaagcttcaacggaaattccctaatttcacggtaatagttcattcttgtacttcattcggtaaaaaagggtgtcagagccataaatatcgaacttactagagataaccgtactaacgattgtccatattcatttggcagtatacatgggagcaggctgagtttgatattttaagccgcaagacaaggatcagtctgcactatcaccttcagaagcagaacagaaagattcgccatgctttttcatatagctggagactgtaagtgtcctgtagtctacttccacatccattctttcttcaaagtgggacagtcattacccacaatctcccacaagccttaagaaaatattacagttacaaaaaaacgaagcatatttggtacttaggggtttgcttagcattttagataacttgataagtgtaggcttttggtaattttggttggctgggtgaggtagagattctgtagtgcagccactatggatcaaaacttacacaaacatgtgctcgaatgttactgatatctaaattcatatgttagtgacttatccttgtgttggctggtaagtagcagtgaaatgatattgaatgttatattcgggcaagacaatattcctgctttccttattgtctgtagatttattgtacttgcactcttgaatcattaagttcctgagaagtaactcctggatctgctgttcatatatgtgtaggtggtcattgccggagataaaggattgtatggaggaagctgggtttagctcagtccatttctggctcagagaaatgccggacgcttctgaaatgcgtagaacagatgggtttggtgctggacgtgatatcaagtacgaacaagtcaagagctttcaacagtgtgattcttggaatgcttacattgttgcggtcagcctctagttatgctttctatcttttgatcaaaagacactagccctttaactcagatcctttgtcgattttacatctagtatttatttctgacacgcactggtttaggggggggatttcaatttttgtttattttttttggcggctcatgatttcaattatcaagtacaaaattgttaaaatgaatagtgtaggtgcttctggaatcttcaacgctagcccaaaagccaaataacaccattttccacaaattgtccaatttccattttacggccaacaaaaaaaaagagtaaaataacaatttaattttgtatcgattgcgtcgtcgttagttttcccatttcctcataattcttcatctctttcctttctcatctctcgattcctttctttctttccatataccattgatctctctcttcttataaaaatacagattctcaccatcaccgattcgaacagatctataaatcgtttctttcaccaggtaatgacttgttgttttcgccgatccattacttttttttttttctgttctatagttttgatgagattcaaacaacagatctattgatttttgattccatcgaccggttaattttgtagaattttttcgccggagttttttttgatccattctgttatggcggaagaacacagacttcaagaaccacgattatgtgctaacaattgtggcttcttcggaagcaccgctacacaaaatctctgttccaaatgttttcgagatctccaacatcaagaacaaaactcttccaccgccaaacatgctcttacccaatccttagccgccgttggtgctgctgcgtcttcctccgtgtcgccaccgcctccgcctccagctgattcgaaagaaatcgttgaagcgaaatcagagaaacgagcggcggctgaaccggaggaggcggatggtccgccgcaagatccgaagcggtgtttgacttgtcggcggcgcgtgggaatcacggggtttcggtgtaggtgtggtttcgttttctgcgggacgcataggtacgcggagcaacatgaatgttcgtttgatttcaagcggatggggaaggataagatcgctaaagcgaatccgattgtgaaagctgataagcttgagaagatttgaaaatgttgattgttgtttgttgttgttgctttggttttgtgcgtttgaatgaaacacacataagaagaaagagc

SEQ ID NO: 36271 - DNA, 1193 bp, Arabidopsis thaliana landsberg
agtgattcaggcttactcccgagaaggttttgtaagatcatctagtgatggtatatttcgggactcacaacgcctcttgtgagaaatttgtatatcttgggcaagtgatgatgaactgcttcgacgcttcaattcattttccttctgatgtggaggtgagccaacaacagactgcactccactgcaaaaaacagacaagcacaatttacaaaatctaaatttcagaacaaaagtcagacataataaaagaatgtaagcatgtaactaactcctcgatgataatggaaagaataaaaatgtggcacaatgaaagcacattacctacaatacaaggacaagaaactagtggcaaagtctcgtagttctgaattatctttctggttagcacagagtaaaccatctgtagcatgagtttcagctgcaacaccttctttatgcaaatcttgagatccgttctggcccaaacactccttaaaagttgcaaaacttacaggtttaggcaggcaagggtgtatattttgaccaacagacgaagcagaaacctccaaatccaattttcttgtaaacgcttcctgccttgcctgcaacccactattggtagtactcttgtcatccagagaggctttcaagtaactgtccaaagtgcctttgtctccaggagatctttcccctgtcaccttcacatttttctcattcctcccagactttaaatttggtgactggtgtttcctcttcttcgatacataaaactgatagtacagtgacaagcaacataagaaaaatgattcagtacaaacacacttaagcttcaatgtcacaaaactccgacttttgacccacttctcattcatcctaactaatttcaaaatttgactgaagaaaaagctttaaaaacattacttcttaatctaattcatggaaaatccttaacaaagtgtaagactttgttcatgaaaagacttcactgacttagtagaaaattcaaatgataggattccccaaaatgtgattcaattcaagttactgggagtgcccaaaacaatccaatgaatcgaagactcaacaaagtacaaggttcatccatttgaatcgatataggtcagatttcaaaaagcacaagtttttgaagtgttgagaacttgaagttgttgcagcaacacgaatttcacacagagaaagaggagacagagatg

SEQ ID NO: 36272 - DNA, 981 bp, Arabidopsis thaliana landsberg
gagctaacccaatatattcaacacacacaaacattagtaacacatactagaagtatatatatattttctcaccaagaatctctattttaggtgtaaagaagagaaaaacaagaaaattagcatcacaaacttaaataaaagtgaaaaaagaaaagggaggatctttctttaggtagttgtaatttgtatagagccagctaaaaaaagagctttcaaaaacaatggagaaagaaacagtaaataaagaaaaagagcaaagaaagaagctttcatgggtcccaaaataaaaaaaacaatcaccaaaagatatcaaaatactgaattaaaaattcaaataatcatatgttatgatgcgtggattgaatttaattttattattaaaaatgacatattggaattggaacagcaagtaacagcaaagattaggcacttgattgatatataagcttttaaaaagtcaaatggcattttagtcactttttttggttttgagggacagattatcaaaccagagtcagagagattatcgctcagaatttgctctgatatgttgttgctgtgcatttgatgtgaaaaggagtatctattttctcttaagtttggtgagacgaagaacatgaagcttctctgtgtttctcagattatcttatgagcttttttttgggatttgagtctctttgcttggtttgtctgttcaagatgggacaaaggttttgacttttttgatatctcttaccgaattgttcaagctttgattttttttacttgatctgggatttgatttgatttgtttctatttcctccttctccctaatcagtggtgatttttggtttctgggttctgattcttttgatccgaggtttccaaattagggacctttttccccaatttgattagggtttcagataaaaagctaactttgggaaaaattagggtttaatgcatatctcactttggaagcccatttatcactgtgctgc

SEQ ID NO: 36273 - DNA, 2037 bp, Arabidopsis thaliana landsberg
catttttatccaactttggaaccaccttcataactcctgcagcagttgcgacaagatttccgtgggtaatcataactccctgagtgaatgcacacaatgtaaggtacaccaatcaagaattcaggtgaacaaaacacataaagaaaagagaagacacagtgcaacacatacctttggtagaccagtactaccactggtaaacattataacagcaactccattcttcgaaggtaagatcggttgaacagcgttcttctgcccaagtttctcaacttcagagatcgacgaaacagttatatcacccatactattgacatcactagaagcaacatctactccatcttcttcaatgtaaataatgttcttcacagttttcaagcttgattgtatcgcagacaacttcttaagttgttttgagtcacatattaaggttgacactcgagtctgtcaacaatacacaagcaagattcagagatccaacaaccaaatttattaataaaaaacatacacattcaaaacttcccctaccaacctcattgagtgagtaaatcaaagcctcttctcctaaagaagcataaatagtaacaacggttatgctctgcctgaaacatccctggaaaatttacaacaccaaccatttcatcagacaaattcaagccaaaccaacaaaacaatagttgataaacaaacctgaaacgcgataaaccactcagcacgagtatccgaaaagatagcaacacgatcatcaacattatgtcctacattaactaaccccgacgcaaagttacaaacacgttcaaaaacctctccataactttgccatttatactctcctaaatgaagcttctcaaacttcctcccatcactagcagtaataaattccttatctataaactctctagttcctagtaaccgatctttcgaatacttcttacaagactgctcaaacaaagcaggcatagtagcagctccttcccaaggtacatcaaccaattcaggagctcgagcatgacgcattgtgtaaccttcctcgccacctactttgatgggaacacctctctttttcccctttttggttccattcaacaccacagagagtaacacaggcacaagtaaagccacgattccacctcctatgattccatagactccaaagtcactgcctttagatggtgaatccattggattcactccagaatcttccataagcgcgaaagctacacaaaggaaaggaacaataacactaatcacagtgatccgatgatcgatcaagcaaattcaaaatcggtagatcacaacagaatccaaagaagctaaggcatcgagaaaaaagaaacgttttttggaattgggttacctacgaatagattgagaaatcagtgaaaggaagcttcttgatgatttcttcgaatcgggttccagagaaaaacgtaaagtttaaaccttttcgatgctttgaagttgtgaacaatccgaagcttgtggactctgtcctttttcgggaagcctttggttaaggaatgtttcgtcggtacggtaatggacacgtgggagatggctaatggagggacacgtggatgcttctccgtttggctttttcttgccacgtttacctgaaattccggagacgctacttcgttgaagttctaaagattctccaattgaatattgtgaaaagtaaaaacgctgatttttcaattcagaagccaccagaaacgtcttttttcaaaacgctatatttcactcagtttaaaaaagcggttccaattttgcgattttaaatattaaaacgttacacccataaccgagtccgagttatcaatcaaaccctttataagcattttgatgaaatgtgtgagtcaaacacatatgaatacacaaagcagttccaaaacaaagtaagaatattcatatctccatttccaagatttctttattacaagacggcttatgttcttttctctactggcctaatgctgcctctgttcacataggagagaatagccgataaagttcttaacgaccaaactccaatgt

SEQ ID NO: 36274 - DNA, 3295 bp, Arabidopsis thaliana landsberg
acgagcttcatcatcttgacgaaaattcaattcctgaacaaaaatgaaaggcatttatcatcagtaatctctgttaagtaacccttctctaaaactgtcgaagaggaaaaagaaaagttgatgcttcacctcctcctcaaatttatcaatatttttgaataaagctgctattaaggcatcaaagtttgggtcgtctcttaaagaacgtcggcttgcacaatgttttctgcaagtaggacactcattgttcctgaaaatgcatttgccagttaatataatacagaacaagctttacattagactccctaaagaatgctgaacatgcaaatggaatgcataccccaatctcattgacttatcaatgcactctcggcaaaaccggtggagacattccatcacagtccttgttttccttataatccctaggaaatgaaaaccagtgctggcatcagtcgaatttagtaaagatagagtgaatgactatgtaaaaacagggtaatgagaaaagttggcaagcctgaacagtctacaatgactaccagctttatgttggttgatgaaagtagctgaagcctgatttttcttattaggtagttaaacattcacaataatggtgactgagaggcaactgaagctgattgactttgtaatataaatgtggagaagagtacctaaacatatcgagcattgcacgtccttacagatatccgctagatcaacaaccatatatctgcaagggaagtcaagactttatcaaataacaaagatcaccaactactggtgttgcctactataagaagtctgtctcagtcaaaaacttatgttaagctaaaaagagactaatcaacacagatcaatcctcggcatttaaacacaacagtatcaataacatgcaagcaagaaccaaacaatgcatcggatcaatgaaaacaaaacactgaggacatcagagaccacatgttccgcttaaaacctatcaaacacaacagtgaaaccaatcatcagaaaatgtcgaaagggaaaagaattgttactctgattctgataactctcctgctgaagaagattgacttctttccttagaatctgaaactgttaataccaattaaagactttcatgttgtacatactaacgcattgattgattcatgtatctcacatcacatacgtatataaatatatccacgactataaacaagagcaaaaaacgaaactttcaccttcttcttctcctaacgcttcctcatcctctgcttctacttggtcacgtttcacgtcgtcttcctcatctccactttcgtccttctcatccattttgtctggatcttcttctttctccacagcttcaggattgaatctttcagcttctgagttccgacccagttggtcatcttcttcctcggcggcggagaagctcttaaggaaggcatttgtgattgtttgatacagtgatctctgcttctaggaagagagaggaaaaagaataaagcgtttgacctttatctctccatgtacgtatctctctagtgggctaataagaatttcctcgcatctttgatgatacggatcggtgccgatggaaagagagaaaggagaacaaaggaggacgaagaagaaagagagaaacttctttaccttttagcatacttatattatactataatatttctttttatgttaattatattaagatccttgggaaaaaaaagtaaaaattatactaagatcccttatactaaaatcttattatacatgttgtgaattcttaagctaaacctcttattttctcacaaatccttaatcatatttttgtttttttggttcatactgacgcgtctaaaaagtttggactttcaccataatttttctaattttacgagataaaagatacaatatacgtttttgaagagacgtatattatccgattaccaaacaaaatcaaaattagaggatgtaattcacttccaaaagtgtaccacgcgtataattgacccgtctctacttctgcttggatatcacatacttagtttagattttttttttcgtaaaaggcaaaatatcaaaacttatttaggagaatttgaccacaaaatatttcatatgtatttctaaactaatataatttcttcttattttattgttactatattttttcttttttttgtaagttagaaacctattaaaaacactatttgggtgataagttattgaaatttagtgataacttttttcattatggtagattgtattagttaaagtaactttgatgatagatcttagttcaaattttttttttgtttctcatagtgtttgtagtaaatgatgtgttattgacttattgttaaacatatattggatatataaataatatatcatttaatatgtattgtcaatagctagctcaaaactacgaaatattggaattgaatacaaatgatattgaattgaagtaacacaacattgtcggccttcttctcgtgtgttagcctacttgccaacccaattccattatctccacactttgcattacatgtgacacatgtgtgaagtgtaaataatatatcaactatcaggcatcataattctttaaataaatcaagattggtaaaaaatattacaataatttaaacttttaacatttgttactaaaaatatcaacgataacacaatttacaaacgttaataaatttgttacagacaaggcaatttttattttcgaaaacataataaaatacattgggccatattaaatcggcccattaagttcactataacttagaacttagaagcctttattgcttccctctcaatttccattttttttttggttctttttttctttctgcaatcggtcgtcgtcgttgtgcttaaacccttaccggaatggagccgccggcgaaaggaacggtgacgccgttaggattttcagaggaggatgttcgaaaagcagcaagttacatggaggagaaaatcggagagaagcgagtagagatgaatcgtcttcaacagtacgtcgacgaaaacgataatctcatcaatctcgtcaagaagcttcccgatcagcttcatcacaacgttatggtgaatttttaatcctttgacttcctctccttatgattcaattttgctcccgtttaatgtagttggtgcttttgtgtaaacaggttccattcggtaaaatggcttttttcccaggtcgattgattcacaccaacgagtgtttggtaagtttcatgatgattatatgttctctcttctcgatttcaatggcaggatacatgtaatttattctaga

SEQ ID NO: 36275 - DNA, 5285 bp, Arabidopsis thaliana landsberg
gtttttaaggggagacccgacgtaggccacgtccctcaccctgtaaactaccaatctctctctttcagggggtctctcctcttccgtaagaggcgtctatgaggtacggttgggctactctctccttccagctccggctttcgtctccgcttagctccctcctctgctttggacctctcacggcatccggttctgagtgactgaacctgccttcacttctggagcgtgttaccctcctttactacgccgctgcagtttgttaccaccgtcgacttggtgtttcttctttcacttctctccgttgagactctcctacctgccttctagtttgtttggtttttcttagtccttcttgcccagattcgtttcccactctgctcatgtctaacaagtacacaagaaacgagaaagctaaatgggtcgccggctccttaagggtttccaggagatctccggtgagaataccaagcagggatacgtctggcttggtcgctgaaaataagctcactcttatgggtcgagttacaaaccctaaaattcaaaaagctaaggcagtagttgaatacttgccacagttctggaagcttgaaaacagagtcactggtagagaattgggctctgaccttttccagttccgttttgaaaccgaagaggacctctaagacgttttaacaaagtctccttaccatttcaagaattggatgcttatcctacaaagatggactccagtcatctctgcgtctttcccctctattattcccttttgggtcagaatccacaagctcccagctcttctttgggatgaccagacagttcgaaccatagggagggaactaggtcctgttattggacaagattctgcacatgctagagttagggtagaaattaatggtctcctacccttggaaatgtcagttcccatccgacttccctctggggaagtaaccctggtggaacttgaatatgagaaactggagaaacattgtttccactgcctctctctagcgcatgaaaagaagaactgccctaaactacaagactcagctcctgacaggatcccagcaaaggctctgggaattagtcaacacctcactcttcaaaagattgatgttgataaacgcagacaagatcaccgcaaggaagctaaaggtgatttcaaggagagtaagccttcgagtatcttggcttcagaaaggagaactagcagaaatcctctacctcctcccccccgtcgcttgcctgactcaaggttcgaacactctgcgcctcacaacgacctcagaagacaacattggagacctgcggattactccaggcaccagtatcaagggcgtcaccatgatgatagacatgattcacgggctggctatacccgaaatggcagagacaatagagaaaggctgtccttttcttctcgtctgagcctgcgagatagctccattagagacaggtctagccacagtgactctgctgagagaccatcaagaagacccggttcgagaagagaagctcaaagtgtggagggtttcagaagaaacaattctcgctcccccactgttcaaagatcagctgagttacttactccaccaccaaaccctccgagagaacccatgggttcacctccaatccctcccttgatgattagaaactgccaagaggctgagattgagcctgctgctataacaataagtagagagagaagaccagccctcgaaaggttgtctctccctggcacaaatgatgcttaccaccctagtgtggggaaatctgtagattctacagttctacaggatgtggaggttcaatatttagaggatgttgaacctaattatctcttaaccactccctcagttttgaggtttaatgatgatcaggctggccccagtaatcctatgtcgaatctagggggttcacagcaaacagagagggttcacacgtcgctacggttaggtccttctcccaaagaccctacagtaaagcaaccaaaagcaaaagcaaaggcttcgaaagctaaggctacaagagttgcggctaagcctaaggaaaatactgcccccaagagaagggttcctcgtactgcggctatcacaagaggtgcaaaaagtcccctgcaaggaaccaaactaaggaagcttaacatgatccgctctacaaacccccctaagaaaaagctttgtgtggaacaacctgcggcgactgttgatgatgttgatgttgttgtagcttccccaatttgtaatgaggtggcggattttcaatccccaccaaatcctcttccttagtggtgttgagttggaactgtaatggattgggaaacacctctacagttcgtcgtcttactgagatacctcatgctatctctccggacattatgtttctcatggaaacaaaaaactcggatgatttcatcgccaacaagtttctgtggatgggctactcaaataagttcactgtccctcccactgggatgggaggagaattagccttgctttggaaagaggatctgaatatcacaatcctaagctcctctaaaaatttcattgatgtggaactctcttatagaggggtccggtctttcatcacctttgtttatggttctcctcagagagaaaacagagctgctttctggacccatctctcgactttaggtgcggatagagaactcccgtgtcttttaacgggtgatttcaacgaaatcctagagaacgcgaaaaaggttggtggacccccacgctgggaaggatctttccttaatttccgtagcttcgtctctcaacatggattgtgggatcaaaagcactctgggtgccctctgtcttggcgaggaatgcaccacacacacttcgttcaatcacggttggatcgagccctttctaactacgcctggtctgaagcttaccctgcaggaaggtgtcgttaccttcgtttcgagggctcggatcacaggcatgtcgccatttatttcaatgtgttgaaacacaagtctagaagtcctttcaggtttgacagacgcctcattgagaaacctgaaatcgcagagctcatcaaagacgcttggaacctatgtgaagatgcctctatcattgctaagctcaacttgtgcaggcgacgaatcattgattgcgctaaggaacaacagaggaacagctgtgaaaaaattaaagcgacgcatgaagagttggaacgggaactgtctgaccctaacccaaaccaacctgtgatcactcttctttatgctaccctggatttagcttacaaggaggaagagagtgtctggcgacaacgaagtcgcatccaatggcttcaaggaggagatcgcaattcctcttatttccatgccgtcacaagaggaagaagaaagatgaacgccttcactgtcatcgaagatgagtcggggacagctttcttcgaagaggagcacatggcgaaggtcatctctgaatattttcagaacatttttacctctaaccttagtgaggatttctctttagtggaggatgttctgcaactaaaactcacatctgagatgaatgagttcctaatagcgattccagacgataaggagatcaaggcagctgctttctcaatcagtgctcacaaggcccctgggcccgacggtttctccgctagcttctaccacgcttactggcgcatcattggagctgatctctcaagagatatccggtgattttttgaatctaattctcttcatattcgacagaacgagacgcatatccgcctgatccccaaaggtgttagcccaaggagagttggtgactatagaccgatagctctttgtactacccactacaagattatcgccaagattctcaccaagagactccagcccctgcttcctctacttatatctaagcatcagtccgccttcgttcctcaccgagctatctcggataatgttctcatcacccacgaaacacttcattttcttcgtacttcggaagctaagaagttttgttccatggcggttaaaacggatatgagcaaggcctatgataggatagagtggggttttttaaaagccttcctaacgcggtttggctttcatgaaaattggatagcttggattatgacttgtgtgaaaacggtgtcttactctttccttctcaacggttcacctcaaggaaaagttattccttcaagaggacttcgtcaaggtgaccccctttctccttatctcttcatattatgcactgaagtcctctccgatctttgtactaaggcgcaagtcaacggaagtctaccgggcattcgggtagctagagcgagcccccttgttaatcatctcctcttcgccgatgatactatgttcttttgcaaatcatctcctacttgttgctctgctctcttatcaatctttgctagctatgagaaggtttcgggccaaatgatcaacctctctaagtcgtccatcaccttctcttcaaagacgccacccgagtgtaaattaagagtgaaagagacgttgcatatttccaatgagggcggcattggtaaataccttggtctccccgagcactttggtcggaaaaaagagatatctttgcgtctattgtcgacaaaattcgtcaacgggctcatagttggtccacacgttttctctccaacgccgggaaacaagttcttctaaaagctgtcctctcttcgatgccctcctacgcaatgtcttgtttcaaactcccaagctctctttgtaagcaaatccaatcaatcttcactcgtttttggtgggatgataatccctctaagaagaaaatgtgttgggtggcttgggataagttaactctaccaaagcatgcgggcggcttgggatttagagatgtggaacttttgaatgatgctcttctcgccaaggtgggctggcgcctcattcaagatccaactactctcctagctagagtcttattgggcaagtattgccattcttcctcttttatggaggcctcctgtgctccggctgtggcttctcatgggtggaggagcatccttttgggaagagatatcttaaagaaaggcttagggtggtctgttggtaatggcgcagacatccgtctttggcaggatccttggctctctctctcacatccaaagtgtccctttggaccccccaccctcgctgcttcatctctcttggtcagggatctcctcgaccctgttacaaatgagtggaatgttgatgcagtccgacaacacctacctcagtatgaggatgacatacggctattaattaccagctcacccacttagggattctctggtttggttac

SEQ ID NO: 36276 - DNA, 4423 bp, Arabidopsis thaliana landsberg
catcaatttctataacatcaatactctttcctaatcaatctttttgccaaacattaagtttgagctagagatgttcttaatctatgtgtttgtacaatgcagaatgtgggtccacattttgagacatggaatgctggagttttgggtccagtttcattgaatggtctcaatgggggacgaaaagatctatcatggcagaaatggacttataaggtacagtcacaaagaccacaacaagctttcatcaatatataattgttactgattattcgattttgtacttcaatttttcaggttggtcttaaaggagagtctctgagtcttcattcacttagtgggagctcatcggttgagtgggcagaaggtgcatttgttgcacagaaacaaccacttacttggtacaaggtaagcttctccatattccaaaaccaaaatgcagtttatcttggtaaaacgatatgctccatgtttaacatgtctccatggcttgctttcagacgactttctctgctccagctggagattcgccattggctgtagacatgggaagcatgggaaaaggtcaaatatggataaatgggcagagcttgggacgtcactggcctgcatataaagcagttggttcttgcagcgagtgttcttatactggaacattcagagaggacaagtgcttaagaaactgtggagaggcttctcaaagatggtaaaaaggctgtccatcgttatatctctaaagctgtgattaatgaagctttttagtatctaacttgtgttatgcttgtttttaggtaccatgtcccaaggtcgtggctaaaaccaagtggcaatctattggttgtctttgaggagtggggaggagacccgaacggaatctcgttggtcagaagagaagtggacagtgtatgtgcagatatctatgaatggcaatcaacgctggtgaactaccaattgcatgcttctggaaaagttaataaaccattgcatcccaaagtgcatttgcaatgcgggcccggacaaaagatcaccaccgtgaagtttgctagtttcgggacacctgaagggacttgtggtagttaccgtcaaggaagctgtcatgcccatcactcctatgacgctttcaacaaagtaagttagagaaaagcatgtatctttctctctttgttttgatttcgagctctaaaagctgattctttctctttcagctatgtgttgggcagaactggtgttctgtaactgtagcaccggagatgtttggtggagatccgtgtccaaatgtgatgaagaaactcgcggtggaagccgtttgtgcttaaatgaaagcagacgcaggatcaatcaaaagactgtaaaggtggttacttacgcattcttacaggtttctgatggtattagtttgttttatgaagacaacagatgaagttggcatttttctagctccttattttatacacggtggtaggttgtacaaagggacgcaacacgccgttcaacaatttgcagagttgtgatttatatgtaaataagcttgggaagggtttgttattgtaacccaagaaagaagatgaagaagaagaagcacattgagactggagaatctaagtccatgtgtagatatcttttggtaggagcaaaactgggattagtttattctctgagttttgctttgaacgtgtttgttgttgctgttgttgtagtcgatactattagatgagacattctctgcaattatctcattgctaaatttatgtaatggtttttctttctttctatggaatgaagcatatcagtcttgaagtaaaccaatgtgtgaatcacccctccaaatattgagcttttgaaatttattcattctaccattttcgtgttttacgttttgtggatttaccactttcacaaagtaacagaaagtagaaactgccattgctgatccttttccactgttttttggtttgaccatttttttgattcatcaagaaaccttggtgctgtttttttttttgttttttttcagactaataatgtaatatcaatgtacatattaaatagattataagcaattaaagtataccgtatactaattataacttttgtttgttcttgtttcacagctgttattatcacttgtcgttactcagttatatctttataataaggaaccttacatagattttgaaatttcttggctttcctatcaactataatacttttgatgcaagttgcgagacgaactttaaaaaatcggatttttggtcattcttaataccataaagttgcaagttggtaattgtttagccactctgacactaaacatatcactcctttttggatgggttttctattttggcgaaatcaatccgtgtctcaccaattgttaggtttggaaaaaaattctattggctaaaagcctaaaaggctaaaactcttgaaaatttcatcgcttagtgattttttttatgctacttgtagtacaagttgcagagacgaacgtataaatatggttttaggttaattagttaaagttggtcgccgaccaaacaagaataagttatgttggtcatttgtttatatgggagctgcttgttaattaatttaacttttggttttctctaacattgattagcagtaaataaatggatgaagaagaagatgcaggtagatagatgacaacaaaattagtaaagaaatggatgatggaaaccctcgatgttctattttattcattgttaattaagacagcctagctgctttggtctaattgttagataaccttgtactatatcttaactaataactagtaaactagttaatatttgtcatctttaataattaggttaacccacttgctataggtcatggctatgcgattcatatattttgatccaagtcgaagaagccaacaatataaaaagcagaatttgtagtcacttgataatttaaatcgcaagttggttattggttattaatatagttttttttaatcaacatctattattccacttcacaagatggtatcatgacgaaagcattattaaacaaaaaaaaaatggatgaagaagaagagcataaatatttagagatggagatagatcatgaacttttaatcccacattttaaaaatggaggaaccaactgtgaaagaagaagacataattcacaaccaaaccagtactaaagaaatgtatgatgcagaaaaaccaagatgccttctgtctcatccagctgactctcctcataacctgtccgttggatgcgatcccaaacttccgcttggctgctttacgtgcggcggaaaaacaactgtgcggcggcaagattatctccacttccactgcaccacctgcgacgtaaagttccacgaaggttgtcaaacgcgtccgagaaggataacacatccttatcacctccaacaccctctcactctcttctatcgaaaccctgaaaccggaattatatccaacatcatcccctactctagcccttacgaatccgacacatctgatccagaatccaactcatctggtgaagggaagtctgaacttgttgatattattccgtccaaatccgatatcattttcgacaagtgcacttggtgtggaaaagatttcaaaggtgatgtttggttctaccgttgtttgatatgtggcttttgtttggatctctcttgtgccttaactcttccacctcttactattgcaaatccgaaaagccatcaccactcactcctcttcttacctcggcctttattagttccatgtgatgcttgtgggttggtcaacgcgttggaaccaagatatgcttgtttccaatgtaattacatgatccatcagaattgcatagatctacctcgagtcataaagatcacgcgtcaccatcacagtctttcttttactcctttcgggccacctctgatttctttatgccgggtttgctacaaagaggttgatatcaagtatggacaatattcttgccagcacagaagattgttcttatgtagctcattctaaatgtgcaacacataaaaatgtttggtatgggacggaactcgagtgggaaacagaagagtccgatgaaaatgaagatattgcgccattcaaggtggtcggtgaagatttgataaagcatttttgtcataaacatcacctacggctcaagaagcacgatggttttcgagaagcagagaagcaatgtagagcgtgtgtatttccaatcgtctctcatcaattctatcattgcaagatatgcgattactctctccacgaggtatgtgctggtcttcctcgaaaacttgatcatgcattgcacaaacaccgtcttgtcctagacccatctccgctacatgactacagaaacatgcattgttcaactagttcgcgagcgttcacgggtttcagatacaaatgctcagaaaagagttgaaagaccg

SEQ ID NO: 36277 - DNA, 2615 bp, Arabidopsis thaliana landsberg
ctctctttgagtagaatctgcggctaagacctaccggttggaccgctcgagcgatgttgctgttgtatgctggttgtgtatcgtatattataaacttcgtccccagaaaattagacctgccaaagaggagataatcacgcgttaagccggaaacgttagcacattcgctttctaaatgtcttataactaggcaaagtctttcctattacctgattttgccaatgtaggtattgcttgatctcgaaatggtgtcggcgtgcatagagatcacgtactcggtgtatgtagttcttcttatgcgttttgcagaaagaagaaactttccattctcaaccaacaaagctgcaaatattcatgctttcagatttgctttggagaacagagaaaaacttggaacaaaaacagagaaaatgaagttttaccaggactgagacaaagatataaatgataagtcaagttagatttatcccttttgataaagcattgcattgttgcatctcttggtccaggctataaacaccgaagaagaaattacttgaaataaccaatcataagactaaccaaaacatatgtgatgatgacattagtaaagaattgaaatctaacctgtttcaacgaaacaggaaatgtgattttgcctgagagctccggactttgaacaatctctttacacatatctctccatgacctgcaaacagaagcacaagcaacaacatgtctacgagcaggccacacactttcactctcttcaagtcttttgatcacatcacgtaataactctggaggtagattcgcccacggtgtttcttgaatcgttactacaagttgttcctcatgagaatcttgaaccgaaccacgggatttaccaccttctttgttcaagctgcttaacttaaagtcgaaactacgcctcgatagacttcctatactatctctcacatcacgaactatgctacggaacgacatttgtttttctctctctaaaggttctgcaagacacaaaagtagagttttgattcaaattctgaatgatacttaataacaaagcaatgacagggaagagaagagaagagaagagaagagaagaaaagaagattcttcttatcaatggaccaaaagcagtaaccaccacaggcttttttaaacttaagaaaacattcttttgattcacatttagtaaaaaagagaacaagacaacttcaaaattgaaggacagaattcaaatgaagaatcttctaaagaagtgaaaaaaaagaaaagggaaagaaacagtctctgcccccaagaacaaagtctgtttattggtcccaaaataaataaaccctctaatcattcttggattcaattgagaaaagataaagtctttactacttcaagaagagaagaaaaaaaaaaggaaactttcaagatttacatatatcaagtagaaacaaagactccagattctggatcatatagtagatcacaaattagggcttttcttatctaaatctttagttaattaatttggttagatctagattaaaaattgagcaaatctacatgaaacacacacaaaagattgataatgaattcgaataacaaaaagagagacactccacacatcaaatgcttacacaaaacccagaaaatgtaaagagaaccacaaaaatcaaatcttgaaactttccagacaaaacataaaaaaaattgggtcagaacttacagagttgtgtttttgtttttccttttcttctccgttcaaatcctttaagggtttctttttgtctcgatctttgtttctctctgtagaagttatctgtctcgtacagcacgcggaaaccaactacgttgtcctccgctccacgaacacgaacacatcttctattttttcactatttttataattcaatcaaatatttaatgaaacgaaactgttttattactcttcacagtatatattaataatattctctgtttgtgcaagaaatttaattatataataacattatgtttttaaaacataaaaattaatgtaaaataaatgcctccactaagcagaaaaagatttttaaatattcagcaagttgttttaagtcgttgacctcctctcatttcttggaaatatcctgaaaaaacaattttgtagagattatctcttggtaagatttatgtttctttttatcccaaaaaaaaaaagagatttgtttcttaacttgtaagtcattcatgttgttgatagcatctaaatatgtacatgttttttaccaaaacaaaaaaaaaaagtccatgatgagtataacaaaaaatgaatgtgaatacagaaaatggttttaagggttgttaaatttggtagggtttacctaccgttctttgatgagattattcaactttggtttctcttaaaacaatctttaaatgtagattaataaaataattgatggctatctgcccaaagatgaaatcaaatttgtaaacttttcttaaaccaacgtaactatttaaactctttattactaatatcgaaagtcacacagatgtgtttggctgccagccacaataagttcattagtgcaaatctatgcggaaacgacaagtctcaaactcataaagcttttctatccttttgtagcaaa

SEQ ID NO: 36278 - DNA, 2705 bp, Arabidopsis thaliana landsberg
  unsure (1)..(2705): unsure at all n locations
tcgtatatgccaaatatatttttctggatgtaagaaccacgagtaacatgttgatgatgtgtttatttggtaaaaggagaggagaaaactaaattttgggactgtgttgagctctttgggcaattgataatattgcaaaatctcaaaagaggctgtttttttttttatcaagtaaaaatacacacattgtgtctattatggttttactctttgatcaaatcctgcatgtgttgtgcataacttcttcccggtggaatgaatattacatcttcccaacctgaattcttctcgctcatctacattgattcaattcagatttttattagactaccaggttttcatactttaaggtttctttaaacaaagaagaagcgtgagtacctccattttcctcaacacatcttccagactcccaacctgcaaaacaaaaagattagttccatggtgaagataagaaaactcttaacaaaaccaatgctgtgaaattactttatatattgatctctgatatgcaactntgataacgataaaccttggaattcattttaactcagatatatgaaggcatgtacaatctgaattccgctctttctaaagttttctaagacttttccctttccctcgctgttcctttgaaaacatggtgttatatgtttgcagaacatgtaatcacaaaaaatgctagaaattacatatgatgccaacacagctactagctactcccacttgttagtaaaccatgtctttagatcaaggtgtttgtttctatcttacgtggcctatcgaagattcaaatacatagaaggtaggtatgaatcattaccataatttgttgatctcctcttgatgctctcgtatatttagaaagttccctctctatatcttcctgaaagtggtcacgcagaacaggaaagtaagagttatcttcctctgttttggcttatgagagatctattagtattctttaacgtgggagaagaaactaaccaaccttactgaaatatacagggcagtaacgtctatttttttttctcacaacaagaagcttaaactgttgaggccaataacatgagattgatatcatgagaaaacaaagcaaaaccaccaaaacataaggaatccatattggtataatagaaaaacacagaaaatgagtatatcaatttacctgaaaaaccggaactccatcaaacccattcttatttcctgaggatttgagctgagacgcaagaaaatatagcttatggataagattgaaatgccaaataaatgctatagacacatataattaaaagtctgtttagcatgagccaacctctaacgcattctttatttggattggatctggcaagaagcgaaaggaaatcccttcaacttttagcaagtacacctgtaaacaacatcatcttaacttctgggaatgtagctaccacgattacgcaaataacatcaaaaagttccctaaacgtagttataacttataagttccaagccattagagggattataatcatgccatcattgcattctttcttgtgacgatgttgtcaacattgctacgtgcacaaaaacacaatctcccgttcattcaaactgccaacaggtgttcctattaccgtataatataaacaactaaaatgaggccagacatgaacaagtctacttagaatttgagctcctgaaatttgtttgtttcatttgatttaaccaatggcttcttctacattgatctaatgcagtgatcataaggaaagggaactacctggtccagagtaatgggaacaaccttcgcattggttttcaattctcttctccgaagtcgcgcctaaaggagtatattagagaattatgagctcagaaacttcacattttttttaaaaagttcggaggagaaaaatacaacaaaaagcgaaacctgagcaagaaaagcttcagcatcctcttgtcgaaaacagagcaaaccgatagacttgcctccggtaggatccgagataagaacgaattcgttattggtgttactgactgtaaacaccgacgtcccagcgagagctttagcgacaagagatggactcaacgtcgtcgtcggggttccagacttggattgtgagacggaggcgaaaggcggcggagtaggaagagagaaacgtcgagtagctagggtttcggcgaatcgtttcgtgtcttcgattcgggcggagaggtcggagctgaagcgggtacactggtggtgaatgaaagaagagaaagagaggaaaggattgggtttcactgatgactccatttttggatttgcagagagaagaaagaagtagaagaagaagaagcaatttttgatactatgaagagagtgaagaaaaaggcttcagagcaattcgtttgggcttttttatttgggctttattggacttgattggttttagtttacgtttaatatggcccttgatcaaaagtttggtgacaaagcatttattaactttctaaactcaacttccacaccattctaaacacatgacatgacttaccaaaaagcttttgtcactcaaaattcatgtcgatgacatttttttcctccaaatttctcctccttataaaatacttactagatcaagcaaacaacacactaaagaaaacaaaattgttaaaactctcgttaactgaaaaatatgaggaacattactactacaacccgaaaaatgttactactt

SEQ ID NO: 36279 - DNA, 1023 bp, Arabidopsis thaliana landsberg
tatgaataattaagggattggaatagcgagacacgttccttgagatgataacacgagcatatatgagtcataactggcgtttgcgtcacgtgatatacgctaactgatgtgtgtgtgtaatatatgctctcagagctaacaagtaggaagaagaagaatgtctgagagtttcaaagtgtgcttctgttgcagcagaagctttaaggagaaaacgaggcagacaccagtgagcatcaagagactattcgaagcttactcaagaaacggcaagatgtctttcgatgagcttctaagatttgtgagtgaagtacaaggagaacggcacgcaaggttggactacgtgcaagatatcttccacagcgttaaacaccacaacgtttatcatcaccatggacttgttcatctcaacgccttctatcgctacctcttcagcgataccaactctccttttcccatgtctggccaggtatctaagttaggaaactttttatggatttctttcacaaatggttttgttattgtgtatattatatgttcttggttgggttaaggtgcatcatgacatgaaggcgccgttatcgcattactttgtgtacacgggacataactcttacttgactgggaaccaagtgaacagcagaagcagcgtagaaccgatcgtgcaggctctcagaaaaggcgtaaaagtgatcgagctcgacttatggcctaatccttcagggaacgctgctgaagttcgtcatggcaggttggtcccactaacgaagtcttataatcaacaaacagactccaaaaaatgtcacacactatatgtgttttggttctctcatcaggacgcttacttcgcatgaagatttgcagaaatgtctaaccgccattaaggataacgcgtttcatgtgtctgactatccagtcatcatcactctcgaagatcatttgccacccaagcttcaagcgcaagttgctaaggtaagttggatttgcataaacagagaatatatttcgttctttgaaatacagtga

SEQ ID NO: 36280 - DNA, 1718 bp, Arabidopsis thaliana landsberg
ttttgcaggcagatgaagaggcagattcaaaaactgttgggagatatgacaaggtcagagtcattgttttttttttaactttacaaaaccaagaagcctagcctgtgtttgcatattcaattgtttcaattcatttttgactactttgcagttctatgagagctacgttcaaattgaagaagaggaagactatgattcatctgatcatttcggacacgagttttggtaagaatatgaacaatacaacactaccatacccattgttcttggctcttgttttctcacctttatgttcattgaaacagggaagacgatactatgttggactactgagaatcctgatttagtggagaaggttttggcttttggtggtgtacatgttttagagaatttgttgggggatttatgtaaatatagaaacagactagagaggctgctgatcttatttccttcctctgtgactattagaggtgttctcgtcctttttttggcgacaccttttttttcaaaaaaaaatgatggtgaaaactgaatctaagtagtaatttttaactcttcagtaactatcttcctatatctattctctagagtgaaaacatttatattgtcttcgacattatgtggagtaattgttccttcacaaattttgtgttttgaagtaaaagttactagcttctgatcccaagcctgtatatactactatgggtgctgttcattaattaagttatagaaacagaattaccattatgggctttttgagcattgggcccatgctttggctgtaatgggtttcaaaccacgcgccaaaagtgcgtgtctactcttagttcttacacgataataaatctttattattattattataaatataaagtttggatatttattgaaccgagtggtttctttcgttgactcgcccacagaggaagaaaatcagagctttctaagatcgtcacgcaccatggaagctgaaagtacccaagatatcatcatcgtcggagctggaatctccggccttgccactgcacttgggctccacaggtgtgtgtgtttgtgtcaagtatttgttatagtccatgtaagttaattaaagtggtattttcaggcttgggatcagaagcatagtgctggaatcttctgagcagctgagagcaacaggatttgcactttcattatattttaatgcttggaaggccatggaagctctcggtatttctcagcatattcgcagtctcggtgatcgctttcaagggtaaccaacaatttaacactattactattaatagcaactatgaacttactatatatagttgaccttgatgcagatgggtggtcagacccatttctgcaggagatcctcctaaagaaatgttatttccagaatctgagtatgtatcttatcattcattctctcgactattaaacaaagaagaagaagaaacctttatatataaccttgttgaaatggttttgtcagagaatatgaggttcgatgcgtacagaggaagctcttgttagacgctctagcgggcgaattgcctcaagggaccatacggttctcatctaagcttgttcacatcgaattgtccggacactacaagatggttcatctctccgacgggactatacttaaaaccaaggtactaactaaccagtcctgactcctctgtaaaaatatgctggtcttgtaaccgaatttgagggtcttttaaaggttt

SEQ ID NO: 36281 - DNA, 3605 bp, Arabidopsis thaliana landsberg
  unsure (1)..(3605): unsure at all n locations
cagatcttgaggggtttgacttatcagatccattagtatcagaaatcacatcagagattcagagttcttgaggtcgagtgtcataaattagaatcaagatcaattccaatcaagccattcaatgagatctgatgtgccgaattaaaattgcacctttcctttggagataaaagtgccggagctggtacgaacatcactgacttgactctcgccattatcgttatcagcaaccgcagatctctgcagattctctttcgcctttccccaaaaaaaaaaaaccaaaattagatactgaaactagcacatttaagccaaaaagtttccaaatttgagctcaaacccaaagagcaaaattcgcactcacaagagagattagatgatcacattccaagtccgtcaaaaaaccttcatacacaaatgccctgaagaaacagtcaatacacacagttggaggttcaaagtttccaaatttgcttcatttctcactaaatagacaagagaaagagtaaaatcaaacctgggcttcgacgaaacctgtttgactttagaaggattgatgatagaacttggagaactaatcagacaagtggaagactgaagcaagacgagcaatatagcgacgaacaacaacaatccgagccgagacatcgacattatagcaatcgtagtaatttcttggatccagatgatcgagatcgaaaactagaggataattttatttattttttctcggaaaataaagagggaaaaaaaatgtcaacggtcatgaaaagttgatgttctacctaaaacaaggaggctcaagggagatggtgacaacatgcgcacgttcttcttggttgaacaattattcttgttccttgaccaaagcccataataagcctattgttacttaaaaggcccaacataaaattcggaaataaaaacgacgtcgttggttttaaacgtaaaataatcctcgccggacggaagaggcgtcaccagaacagaaaattcaatttgctccggtttcgactttagccggcgacgtaattaaacgaaggttgaaggagaattagaagagaggcagcgataatcaagtcaaggaattttctcagagaatggcgtttaggcctttcgggaaggacttaggtccgatgagctctaagccagcgccgtttacaccgttcggtgcttcttcaaccactaggtgtgctcttcattctctatagatgtatctatgcttcaatcggacttttcttcgagttttgagatttttaagattcatttcacgctatggatctattatactcagagatttttttgaactgtcaaatttacatatatgctatcgttgtattaaagtgtttaggatcatgagaatgagagaagtatcttgaattttctatgatattgtgttctatatcacttaggcagtcgggttttgcttcttcatcttccttaggagaagctgcgagttgctttactttgctttttggtcttagattgtacctttcttttttattcttacacactgcgaatgttggatttgcttgtagtgattcatcaattcaaccaccggcgtctcaaaaccattcagcctttgcaggacaatcttttggacctggtggaattcgaaggttagattaaccttagctctacagctttgatttctttctatgcgagtatgttaggttgtttctgagcctccataggacgagcctattgtgctacttgttgtagttttctttcgtaaattcgctcagttttctttcgtaactttggcttgtagtggtccttcaattcagcgagcaccacctctgtcggcttctcaaaaccctcagctctctatagggaaaccttaccgaccaggtggggttcaaaggttagacattcttaatcgtatggcttgcttttattccttttctctttcagttctatgtgtctaatgatgatgttaggttggttacttattcaattattaatttttcagtctactctcgggttttcttcttctttagattctagcctaagttattatggtttttgcttgcagtgttcctccaattaatagaataccatctccgtcggcttttcaaaatccatcaccctcctcaggacaaccttaccaacctggtggaattcaaaggtcagataacttactattatggctctcttttgtttttttcactccttatacctgtaaaggatcttcgggaacccaaaacagtgaagatgggataaaccaaattttctgttttctttggctttgattctttttgtaaaacttctgcttgaatcttctatatgttgcactaatttttacgccgagaaagttataagaacactttgatgctatgtttttcaggatcccagaacctttcaatggaatagcatggggtccagaagcttcacgtacaagcccctctgtgagaccttaccaatttcctggagttcagaggtaaaagtgtacgtgacatattttgactaagaagagtgtcattactcatatgcggctgtgttaatcacacatctcaaatgctttcagtttctgcaattgaaattatagcagtaggaagaaagtagagtgtggcggagtgctataagtttctctgcctaatacataagggcttactatggcagcggctttgaagctctaaagagatcattatcgctggatttggcttatagcctttaataagcaagctgctggatttttcttaacgacttagctgaatttacctgcttcatttttcctcacaggcctaatttaaatcctcaatatgggcacgatggatcaaggaatttcttgaaagatcatggtgaacatagtctagccacgtcttcacctgctacatgtcacattcttttcagaatgggaactgattctgttgagattggttgttcacaaaattctaaaagaaaaaggtcgtttatgccgtttcctttaaagggagggcatttatgccagcgggatctttcttgaaattaacattctggtctgtgttggatccctatcttatccttagccttttagacatctgtccttgtgggagtttacaccttccttgttctgcatcatgtatcttactctttcagattttatcattttgttgtgtggcctaggtggtatgaatgagatgtcatagacatggccatggtgtttactgatatcctggtttttttgatgtaactaatatcggtctataaaattctcaatttttgttgcagtcggtcagatattcttcctgaccagaatatggggttttctcgnnnnnnnnnnnnnnnnnnnnnnggttttgagaatggaaacttggtagatggttttcagccactttctagccgaacttggatgtgagctttttatcctcttgtcagtgtcataatgttttcgtttctcattctcttttcgctgttggttttgattggttttaaaaaggtcataaaatatttcattttgtggtgtctttactctttgtggataatgatttgaaccatacctgtgtctttgctccttgatctttatactaatttattgttctatcctctcactaacttttgaaacttatttcctggaaccttttctcatgtttgtgtaggcgctctccgtcttctgcggagaataa

SEQ ID NO: 36282 - DNA, 2179 bp, Arabidopsis thaliana landsberg
tattccactgtggattggctcgcaacctcggggatttggttgaaagttgtgacacttttctgagtttgcagacccgtagagcgcgcaagatcaatccattgctgcgtttttatgaaaaaagttggaatgaagttaagcggtatatcaagaattaaccaaaaataataataaggaaaaaggagacaaagaattcaagaagagatcatagtacaggcctaattctgacctgagttccaaagtaggagttagctactcgaacaacaaatgaaatcatgtttacaagtagaggttgagaagaaagctcgtcagaaatgcgatgctctattaacccagcaattatctgcaattgaaagtaatatgattttaaaggcataaattcaaagcatactgttcttcatcaaaaggccttccttggctaagatgcaaaagcataatatattgctgtggtcattaagcaactttaactacttttcattaatatccctcattcattgagtcaacatgtaaagcaccgcgcatcaccatacctgataacggatattcgaagatgttcccagataacctccatacacaagggccgtcttcagcataggagacctctttgcttgctcaccaacacccaactctggtttaatgaattttcgtattgcatacaaagcatttgaagatcccacagctgcaaaactggaaacaactccaacaccagcaagcttcaagccaccgataataactgaagcaatcctaagattcagagtccactcttgtccacctagacttttttgaaatgcattgtcaggtatggaccctaggaggcctcttaaggcatctatgctgtttggcccaattgtctcatcagcatatgagataaaagacaaggttggtgcagggagccaaactgtgaaaaaatcaacaactgatgctcttacgctatcagtgatcacatagtcgagttcttcaaagaaattttctttccgcttctcatattgagctacaagtgttgttgttattgatatagcttcttcaatagctaatctattcaagaatttgggatctgccaacaacctttctcggaatccctgtaacacaaaagatcatcataagtatggtttacttactagttgaagctatcattaactctggctagagaagataaatacaggaaaagttaatgtacagtggaaggatatgaaggctataacacattatttagtgaaaagcatattcgaagaaaaagattcactagaggaatatcttccggaatggatatacctggaaccgttgtgtaagctctgaaataagaggatattgctccaaatcaaagaaattctgcagaatctcaggtgacaccagaccaaggtctaatcctttttgaatgtcctggaacaatggaaaaaaatctatcagcatactaagacataaaagcaaagtgagcaaaagaaagtaaaactcaactccacagtcaactctaaacagcaaaaaaaatagggcagaataaactgagtgctgaataaagtacaactgtactaatactaataatggagatcaggtttagagttcatttttactgtaagcataagaacgccagatacagtaagtaacaatcaaacagagagtcagtctcataaacgaaatcatagaaaacatacttggggaagggcatctcgtctcctaccagccgcattcattacccgagcgatttctgctcggtcaaagcagtttctgctgcagggtctggccgcagaataccacaagaaatcagcaactggagattcaccctctttccgcaaaaactgtctttcaggatcaagtaacacaacaagttgacttttcttcggaatcttcctagagatccttgccggcaatcctgttccccttgacccatactcaacatggtttgcccctgtcaccactaccagcataccagttccacctccatctgcaactgcttgtacaataacttgagacattgtatggtcttcaacaactctagcttgtgccgacaaataagaactcggtccaaatggaacaatctgtgtgagtggattcatattgagtgaagaactacgtgagaaggaagtaaaccctgagataaaccctgaacccgcaggaggagtgtataatttacgctcagactctgatagaccacggataccctcagcttggacagttcttaaaacct

SEQ ID NO: 36283 - DNA, 3870 bp, Arabidopsis thaliana landsberg
agtagtgggttaattaactgctgtttttttcttatgtcattggtgttatatcattttgtatcacagatataatatgtagaatgtagaagctcattatgatgaaccttggttcacttctgctgtgttgtttgtgttttggctgcagaaattctgctaaacgtcgtgaaggagcattactcgcatttgaatgcctctgcgagaagcttggaaaattatttgaaccgtaagagaattttttaatgatgggtatgccaaaagctaatgcaacttggtaataatcttatttctatcttttggtttaggtatgtgataaagatgttacccttacttctggtgtcgttctctgaccaagtcggagcagttcgcgaagcagcagaatgtgctgctcgagctatgatgtctcaattatccgcatatggtgtgaaacttgtccttccttctctactcaaggtgataatttatagaattctaaagattttcaagattaatgataactaaggttttgtgcattgccatgtgccctgctcatgatcatctttttgattcggttaattatgcaatattgctatcttctttctaattttaatatgttttgcgcttgactaggatagattgaaagtttactaatgcttcaataatagtattttgattataactcctttttcccttctacttttaccctatttgagtgctgctccttagaaataaggttcaactactaaacttggtatacctagttgcatttgttcattggtcttacatgacaggtacttttttgttgatttcattctttctgatagggacttgaagataaagcatggagaacaaagcaaagcagtgtacagctcctcggtgctatggcattttgtgctcctcagcaactgtcccaatgtcttcctagggttgtgccaaaacttacagaggtgtgtatgtatgtagaattcagttgcttcttaagtataaacctgggaatgattttccctcccttgattatttgtattatctgatttcattagttaaaactatacaggttttgacggatacacatccaaaagtccagtcagccgggcagttagcacttcagcaggttagactgatagaacagaagaaacttcatattttgtggacattattgactagagttccgtctcaccattatatttaggttggaagtgtcataaagaacccagagatatcctctcttgtccccacccttctattggccttaacagatcccaatgagtacacacgacatgctcttgacacccttcttcaagtaaggcttccgtatttaattgtcttcgattatacttatcttcttttctgttttttttctaaatctttcttctcttattacagacaacattcgttaattctgttgatgccccctcgcttgcactgttggtaccaatagtacatagaggattgagagaaagaagttctgaaacaaaaaagaaagcttctcaaattgtcggtaatatgtgttctttggtgacagagccaaaggatatgattccttacataggattgctccttcctgaggttaaaaaggtaatctgctgttcgtgccaaaataatgagttgtctcttgcacaagatgtttattaactgaacactggagttgtcaggttcttgtggatccaattcccgaagtacgttctgttgcagcaagggctgttgggtcacttattagaggaatgggagaggataatttcccagatcttgttccgtggctgtttgaaactctaaaatctgatacaagcaatgttgaaagatatggagccgctcagggattaagtgaggtatgtagaaaaagatgtgtttttttgtggcattgtttcatttagtcaaaacgcctggttgatgttgtggaaatacactatattatctggtggctttaacactatgagcttaatcttgttatcttcacagtttccaatacatcattgcatgagtattagggtttactgttcaattataagctgattaagtctcttaatttacatttaagttaaataaacgtagctgtatttgtactcgcttgattcggtaccttcttttaatgtttcaatcaagtacatttgaaactgatatggtgtatggcaaatggaaatacggcaacttacaaatcattaatctcagagtctgcttaacaaatgtttccccaaattgtagctgcatctgttagaacgttttctcctttcgtttcaggttatagcagctcttgggacagattactttgagaatatacttcctgacctcattcgtcattgttctcatcaaaaagcatcggtccgagatggataccttacgcttttcaagccgaaactcagtgctcacatagatgtgcctatgatcacagtgtactaaaatagcctaaaacctcacggtggttactcgcagaagaaggatgtgatccagttggcgaactcctactggaaacaagagagcgaggcccagcagctcttcgtgttggtccaattcgtaaagcgccaaaacttcccaaaaccgatctgttactaccaggattgacagcggaagaagattttggtggtggagctggtacgggtggtgaatcagagttactgccaccgctaactggagaatcacaatctataccttcactttgaacatgaacattttctgcaactaccaacccttcatcatcttctctatccgcaggttcatcactgtccacagctacatctttagcatcagaacactctgctttttcaactacagtaacctcttcttgtttctcatccgtaatttcttcatctatagtaacaggaggaaccggaatattattgtttatctgtgtttctgatcccgaggaagaactagacgaggaagaaggacggctagagttggaagaactgcctgatgaacctctttgaaccaaaatccgagtcatgctgcttcttaagtctttgctgtcctaatcaaagatgaaagattagagaatatcccaaggtttgtccctagttcttgctttaggacctacgataacaatcccttgagagagggattccttccaaccgttctccacctcgcagcaaaactttctctgcattcccctaccaatcatcaagattcccaagttttcttggaatttagatccgaaaaattccccaaaaacaaccacctttacaatctctacttaaccatacagaaccaatatcgaaacacacatgaaaactgacaaaagttgcagtagtttagctcaaattctcctctattcccgatataggaggaagctataaacatgaccaaacaacacaaaaaccaatcaaattgacaacacaacaaaaaacaacacgacaacattctctgcattccgctggcaaccatcaagaatcccaagtttttaaacaatcaaacaacaccttctgattttcttagcaaattacatccgaaacattccccaaagacaccacctttaccatctctctacttgaccgttgtgaatcaatatcgaaaacttaaacagagttgcagtaatttagctcaaattcccttcttttcttcgaacccatatcggaaaaaactacaagattgaccaatcaaattgacaacacaatacaaaaacacaacaacgttctctgcattccgctagcaatcatcaagattcccaagttcttagacaatctaacaacagtttcgagtttgttgcaaaatagatccaaaaacattctccaaagacaacacctttactatctttacttaaccttctgatacaaaaacacaacaacgttctctgcattccggtagcaatcatcaagatttccaaggtcttagacaatctaaaaacactttctagtttgttgcaaattagaacccaaaacattctccaaagacaaacacctttac

SEQ ID NO: 36284 - DNA, 4503 bp, Arabidopsis thaliana landsberg
acccgcagaaccggttttttttttttctcgcacttcttttcccgcccttatgaataatgtctctcaagagaatccctgtccagttctctaaaaacattttccttcctttgcttttggtgccatcttcaagcttcagaactgtttgctcaatgttctgcattttgttttgcagctgctctatcttctcagacccgcttcttgacttctccacgaccacctttctgtatatatctctggcatctccagtctcttcaatttcctttgaaagaatctcgtttgtgttttccagctgcgagacagcttcttccatttctttcaactgtctcttcactataaccaaatcagcgttgctgaatcttctttgtttctcattcatctccagctttcttttcagatctgttaggctaatccggagacttgacagtctccttgaatcagaaaaaagtctctccagaatctttgccttgtcttcgatgtttctagataactctagtttgtcaacaactccaaccgctttatcagattctatagagggattccggctttgacgacggagattggagttcaatgacctctgcggtttgttactgttgatgagaaagtttacactggtctctgattcagcagattcatcccaaaactcaaacatgtcattggaaccatgactagttccctggcttctgccataggtcagggagtctgtgacttgatcacgaggattgtctttcattaataattcatttttcacctctgtcatctcaggcctcaatcttggctgtctagattcaccagtgacctggtcatcaggttgtatattttcaatcttcctgcggtctctgcgtttttgggaggtgcttcgtgttatttgccttgatagcctgcctttttctttaacaaatgcttgttcgatggtcttaatacttggattaatttccttcagaatcacaattccattgcatgggctggtggtactgccgctttcttccagattgtttccctgaaaaaaatggaaatgtttagaattatttaagatcggtacagcgagaaagatgagttgacatttgaaatagaagaacgagtgcaaaagtttaccactctttgttgataggctgttgcaggaaatttcgttaaagcatgtgtacttttctcaagggcttttacatcccctgccaaagatgctatcacaggatcataagctgacaactgactcttcagctcagtcacttgagactccaaaaatccaactgtttctttcatctgtttaatcttagtcgttttcgtaacaacttcatcattgaggttttcacaaactcctgagagttcgttaactttgttctcaagaatgagttcacggatagctgagacctgaagatcaaagtagaaagatgttgctgcagaatcccaaagtccaatctcattgcttttctcttgcagctccaaactcaggtactcctctcgaacctgttgtcgttgaatttctttgtttaaaaactgtacctctgactccaaattctcattcaaagcgttaagttttctaatctcttcctcctgtcttccagcaacatctgacagttcagaaatctgccactctaaatttgccctcatccgtcttgagtcttcatagtctttcctcagctcctcaacttctttgtgcagctcttcgttttcattgtttgtggccttgagcatatgctctgcctctaggatctccatttccctatgttccaagatttcgtctacattagaaacctgatgttccaagagtccagttaagaagttgtcttcttcaaggccttcctgtaaattttccagcatcttgttaagaccttgactttctttctctttaccttctaacttcttctccagtgtctcaaccttgcgcttcagtcccgtactaatttctcgtaaactgcttacagtttcaacaaaatcttcgacctcctcagccatttcagacccaaaggacctgtaaacaacacacgtgttactcaaagcaacagcctcctgaagaattgcatcattttcttcctcaactacatgcattccatctttaaattctgaaaatttcagaagcaaagttttgttatcattgagtgtataggaataatcttgttgcaaaaccatgtatgagtcatgcaaactctcaaacttcaaattctcaattttcagttcagctctcagcttttgctcttgttgctctcttttgatcagttttgatttcaacaaccggttcgcttccagtagatcttgcttgtccttttcaagcattccacactgatgtattttagtctttagatctttttcgagtatgttcttctccgattcgagcaccaaaccatctgactggaattgtccaagtagagataaaagcaccgagttctcaactacaagtcgatgcatctcatattcagcactggagagtgaaccttttaggctatcaatctctcccaaagcacgtgaaactgaaatttggtcttttgtaatcttctgttcagtcttgcaatctgcttcaacttgaagtgcctttatcacctgatagattgcacctctcaagctatcaatctcatccaaaaatatttctgcttccatctgctgctcgagattctcactttccagctcagcaatgagtttctcggaaaattctgatgcttcaacatgcttctgacactcaatcaggagagaaaaattcttctgctctagatcttctataagcttttgcaagatgaagatctcgacttgtttgtttacaactctgtcaagctcatcctcgtactctcttttcctggaacgacactcttctcgaagaaagctcacattcttctgaagatctgctaatctgctttcagtcgatcgtttgtaattagcactctcctgcttctcagcggcaagtgagacctgtaactcttctacttgatggcttttgagcttattatctctctgtaaatcagtataccttacttccagttctgtatacttcttctccaagactcctagcttctcctcaaccttacacaactgagagacaagagattctctttccttcataagctcagacttatcatttttgagaaactggaagaaatcatcaaagcactttgacttatccctcaaactttcaagctcaatgtttgcacaagacagggatttctctaatacagagttcttttccaagagtgtctgcatattcgcagtcatgatttgcaactgggaaaccaagttagctctctcggcagcaagctcagatttctctcctcgtaaagactcacatctttctatcagatccttcgctttctccctggaaccgtctagtttggtgtttgattccagaagcaatttctccaaatcagcattcctctttagaatgctgtccatttcacatagcttccctgtaacagcattattttcgtctctctgattggtgcataactcgactagcttcgagttctcgtcttgtagtttcttcacggagtaggaaagagattcgggatcgaaacctgtgaggcttacttggtcaattagtttttggtatctcctattcatgctgtcaatattacccttcacacagtggatctctacttgaagggcactgctctggttcatctgtttcgcaacttcttcctcgagcttttctttcattttcttcaagcaagagatctcatttttctgaatctccaaggagatagaagtgtcatttatttcgcttaagtttcggttttcttctttagagctgatgtcaccttccaacttactatttcgcatctccagttctctcaacatttgaatccggctatgaagttctgaggtgagaaccttctgctcctcttgggattgagaatgcaaactctccaaatttcgaaggctagctccaagttctgaaaaccgcaattgttcttcttgcattacagcttgaagcttttcaatctcgttttgcttctgggaaagttcttgatccttggctgacattttgtgcgctagattttctgcttctaccttcattgtttgattgaagctctccaaaagagcgcattgttcctccacagtctttatttttgcagcgccagcaagaacttcactgctcagtcttttggcattatcttgagcatgagaaacttctctctctaactttgatattgtctccaaacactgctgatatcgaacattcaagtcctcattgacttcgttcaacttcagaagttcttgtttcaaagctttgatttcagtttctgcttgttcagattggtccctgaatactctaacactctcctccgcatctctaattgtcttctctaaggaagatatcaactcaaggcttttattgtatcgtagcaagccagcctccttctcagactgcaatctagaaagctctttcttgagactcatggcttctctttctgcttcagacactcggttagtgagccccttcgcatattcttgcccatgagaaatcaatgcttccaaatccgctattctctcaatggcttgactatactagaggagcccagt

SEQ ID NO: 36285 - DNA, 6688 bp, Arabidopsis thaliana landsberg
tatcttttaaatgatgtaaagcttaaaatcaaacggcatgtatctttaagcttagaaaacttacaggaagccgctccgaatgcaccatagaaaccgagtcaagtgtaatgttcccgactgatatcaagtatctctcaacggctgccatggaacggaatttattccctgttcctggctcaatatatgactgcaaacaacagtactaacggcattgaacgtttggactatatgacacaaaccaaatataaccaaactacctaagtatcagatatgtaccctgtctatatgactggaacttcttcgcggtttctcctcaacgatccatccatcaggtaacctgaaatctttggaatggccacggcgattctgtaaaaccctaagctgctgctctatagagttccgggattctcttaagtatctctcaacggaaacaagagaacggaagcgctttcctgtttttcgctcaacataatactgcaaagaacaatactaacggtttagccagagattcaatcctaaaaccaccaattcaacgtatccttttcacattctgctcttctcacatcccacatttaaccgacctcagttgttagttatgtgactcagtaacttatgcatagggtctaaaatagctatagcaagtctctacattagtaccttatcaatataatgagagtttttcctcggaacctcctcaacggaccatcctctaggcaatcggaaacctttggaggcatattcaactccgcggtgatcctgcaaaagcataaacacactgattttaagtatttgatccaagaagaaccatatgcttctgtaatttcaaatcagaacaaaggacctgtttggttcttgatccttcataaacccttgtcttgtcctggaaaaaggatcctgctcgagtcaagcgtctgtcattaacttctccagccaagtgtctgtgaatagcttctagtgatgaaaactgtcaaccagtccctggctcgataaagtactgcccacatagcaaagcaaaaacaagtacagatcacacttttcagaagagacccgcaagatctatcttcaactcgagcatatacccaaagaacgactcatagacctctcaagcaacaaccaagagctctgtggcaacacaatcactaatctgatccaagcattacactttggtcatacatatccagtgcacaaaagacataaatcagctctaagtgttcaaattctgagaaaaagctcaaattttgtttcacatctgcttgatgtagctcatatttaccgtatcaacaacaccgttgttgctagatcgcggccgattcacgacggtccaaccaggcataatcttgccgcaaaacgaggtgggatctgcgatctgcaactgggtttcgcggcggtggttagccgaaggagaggaagaggatctcgtctgcatcgcttcgttgccgggtctaacccaaaagcccgagacgagagtgtggtttttagtttggtcgtccaagccacacacacttcttatttctctgtcactgctttcacgtaacgacacgcaaaaagcaccatatgtccacttggcaaatttttaccttaatacaaattctgtaattagaagatgattaatgaaaaataaagttaataatcacatgcaaatcaaatatgctaatcacaaagataataaaaataatcaatgtttttggtttactagctatacattttattttaggtaatgaattatatgatgccgatagttatttgttaacatcaaaataaaattaaactgttttaagaaagaatgtgttttaattcaattttttttattttttttttgaacattaaaatattatccaaacatataaaatgattcatagaagaaaagtgagaaagatgaagtagaatgaagaatgaggctagcttgaaagttggacgacgatgggactcctaacgtaatgatgtgaatcagtccacgtcagctctccaaaaacgtagcctgaaggcgtcactggcaagggacgaagagtcatctgaaatatcttcacttcaccagttttgttgaacgtgagctgttttggctccacggagacgcgaactccaagtggctctcggaaacgagcgttgtaggtagcaggtggtccaacgtttttgagttttcgggtgacggtgatagagcccgtgaggtttgggacagtgattgaagggtagttgaagtcgagaagattggctccttggcgacacgtgtactgtgggtcctcggcaaagagttgaaccacggtgttgttgtagccaacggcgcagaggaagtccaagtagtctcctgtggtgagatcatagacaagaccaggatgggcggctttattgggttggacatggcctgaaccgtagctgaagggatttgctttcttgaaggattcatcaaccatgggcttacgtctgttgtctctggttcttgaagttgtcatgatggctgagcgaatagctgcaggactccaatgagggtgaagtgttttcaaaagaccaacgacaccggagatgtgaggacaggacatggaagttcctgattcggtgttgaaaggagttcttcgattgtcagagtctaagtctgtagggcccgtggcttccgtgaaggcggctatgatgttgacaccgggtgcagtgatgtcgggcttgaggatccctggtgtgatggtgtttggtcctctggaagagaaagaggccatgaaaggagcaggctttgtgttcagcgtagcggtaggtgctttgatgtaacctttgggatcttttgtggaacttaggtaagaaaacaaagtttcaccatctttgtagtcaatttgtgaagcaggaagaacatgagcgtctgagatgatttcgtttccactcgccttgtcgttgcatagaaccattcccgcagctccagcagcagccgcttgcattcccttgtccacacgtgcgttgtctcctctcagacacaccaagatcttccctttcaccttcttcgggtctaggctacctttcttgcatagcaatctatgtaaccatcactagttaattagtacttacttaattatacacattccaaaaaatagatatcaagcgtttacttacgcatctgtcacatttccattggctacattagcatctgcagcactgatgaggctatacatcttttcttcaggcaaaggctttgagaggcttgttccctgcttttcaaaattaattacttgtagcacaagcaagaaaggaaccaaaagtgaaagaaaaaaaaaagaagacgaggtcaaagtatcaaaccttgaagctttggccgtttttgagctcaacaaaagcttgaaactcccgatccatggagctagcaccgactgtaataacccatggtgcaacgtttgagacagtgccagacttaggacctgaatttccagcagagcacacaaccgtcaccccgtttttgacggcgtggaaggatccaatggctataccatcgctcatgtaatctccagcatctcctcccactgaagccgagagaacatccacgccgtcttcgatggcagcctcaatcgctgccaaaatatcagcatcaaagcactccgcgccatccacagggggccagcacaccttgtaagccgcgactctagctttaggagaaccgccactggctgttccattcccgataccaaacacattggctccgggaacaaagttaccagccgcggtggaaagagtgtggctaccgtgaccatcgtggtcacgacaggtttcataggaggcgttagaaggaaggcctgtgtaagctaagtaacctttgttgaagtatctagcaccgatgagcttcctggttacatgtaacgaatcaataatcacattctctggatatttctatatttgcagaaagaagtcaactaaattaagatgagaacctgttgcaaggaacatccttgtggcatctacctttccacctagctggaacagctccatacccttcatcgctgaagcttttgactcaggccacacaccttcatcaacatacatattttatatcattcataactatgaaagcaattatgatgaccaaagcatacccttgtttgggatttacctgtgtctaagttagcgatgattgtatcctctccgtatcctgctttattccaaagagaggacttgtgaacaacaccatttttcgcaaggagcatgaaattccatgaatgagtggtatgaagttttcttcctttgttggggaatacagagactacatcaggatgctctgcatacaattattttaaaaaatttgttaggttaaactaaaaggattgagaagcatcaaaagcagaatatgaggtttgatgatctcactggcgatttctgcagcttcattttcgtcaagaattgcggcgaagccattgatatgtctcttgtatgagtaaaagatggcttcttttgcattctcatggctgcaatagagaaggcagttagtttcttggtgtgtgtataagaaaactcggactaaaccggccggtcggactagtaaaccggcagtccaatagtaagtaaccggggcattgcactaaactcaatttgggtgaaactaataatactttttaaacctagattttagtccctcgcttaaacccgggaaaaaaacaatgtcccgcaaaatttccacgaacagcctcgtacgtaccaaatgaaatcctaaattttttgtttcggtttgaaattcaacattaaaaatgattattctaatttttctttttacttacctctaattgagtttggttcaagttgtgttttactaaacacagattacttttttgttcaaatacatttaacaaagatttttttacaaaaaacatcaatgtcatattagagatccagcgatttgaaatatttccgcaaaaaattcaatgttattaacctaatatgtcatattagatgatccagcaattcaaaatacttccgcaaaatattcaatgtcattaacctaatatgtcatattagatattgatccggtgattagaaatacttcccggtttgctatttgatcaaatctttaaaacattggtttggcataaataggagtaatggtaccttccaacgaaagaggcgagaaaagtgcgatgtgagtgagcaacacccaacgagatgggcagaagagatttgaggaagatgggcgtgagatcccaagtacactatgtaggactgtaacacagtaggaaacaaattaatgcatatcgatcttacgagcaatgtatatagaaagtgagttacataaaaaaaaaaagagagaggacctttttaagagcaaaagcaggagagaaaaagagagtgacgaggagaagaagagatgataaactttggaggctcattttgtttgagtattgagtactcgaatatcttctcgtcatactcatatacaaaatactagttctccataaatctctctctctcgctatatttgctaaatagatcgaatcacgctcagtctcagtctcaacttaattacttttaaagtttgttgagtgatttcagccagaactctatctcttccttcaactgttatctaattcgaaaataaaggtaagaggatcttcataatcttctttccatatttatctccctattatttggaattaaactaaaattttgactttgtgggtgatttgtttgactgtagctgtagaattttgtttatattaattggttgtagttgtaagtttttgaatatagatattttattctattaaatatggtttgtaaagttagtaactgacagattgtgccaaatgtaaactttcatgatcagatgtttattatctctttatgtggtattgcaaacttacacttatgttttattttaaaatgtttaaagcatgtaatcataagtgaaaactaaattttttattgaaaaatatcttataggatttaaattttcaattacttaattagaagttagtatattcttaactcacttaaaattagtttgcatgaagtaaactaatgtgtaatttatctacatttttaaccctacgaacgaaggtgtgttgaaccttttaggctcgtaaagaatataatttgatgatttaatcttagtataaacaacataaaacgtaactaacttagctatctttctacattttaacccctatgaacaagaggtgggttgaacctattaggctattacatgtgacccgctaaatagccaaatgtgggtaaccacctcaaatcactacaaggctcatgtcaaactctcattaccattaatatccgggaatcaagtttatcagaaaatgagattgtcttgcattcaaactaagaaaagaaaaagaaaaaaaagcaagaagcattggagatgagtaacgcaatgaatgagtaatagctgaatgtctacataattggactcgtacatatgaactcaatataacaaagcagatggacccgattcgagaccagaaatggatttgaaatcatatattcacaagcgtaccaaaatacacttacgattaaaacttgaattttttttggcaacaaacgaatgatatatttggtagtattaattattgtattcaacgaattacatttgattggccgtatactctggaagtgtgtaagtataatactttgtgtggcttacatagcataacagaaatatgatggagagagtcaaacagaaaaacagatgacgcaggtcatatgtttatgcattcatacg

SEQ ID NO: 36286 - DNA, 1765 bp, Arabidopsis thaliana landsberg
  unsure (1)..(1765): unsure at all n locations
ttccattatcatctaaacacaaatttcaaccaaaatttcagaaactaaattgagagagattgagagattttaggggtgtacttcacctgaggataaggtgggagagaaaacgacggaagttctgatgaatgcgtatctgaagctgagccatggtggagatcgaaggccatgtcaagcgtagagagtgtgtgaggtgatgaaggaaggaatctgtgtgaggggggattttaaaaagcaatttgggaaagtggttttctcattattctcatattaacttgtagtgttgatctgacggttggggttttcaaacttacgggttgatccaacggctctgagtttatagcagctttctcgagcaggattactgacgtggacatatgggaatgacttctgctgactattacccttaaattacctaattctcctccaatcttccttttttattcaacaaatggccattggttcagtctagctggattactagaacagaaaacgacatactacgtagcgtttttgctaatcatatttcaaattattttgttaatgtaacacaatgagttatgtatttctttcatttttttttccaccaatgaaaattcatttatataatcaatcccgaggagtctnnnnnnnnnnnnnnnnnnagatttgcaagactagaagatgatgtgattttattactactcacaaacaatagaatcatatgagacaaataaagcattttgagaaatatacgaagatgggatcacaagaagcccgtgctgccgaaggggttgttgctgttatgttgctcatgagcacctgcgtttaccgggaactccccaaaacccgtggtgttttgcggttctgaaaccgggactactggaaattcccccaaaccggtggtctttgacggttctgataccgggattactggtaatgccccaaacccagtggtgttttgtggtgctgaaaccgacactactggaaattccccaaaaccggtggtgtttgatggttctgaagccggggttactggtaatgccccaaacccagtgatgttttgtggttctgaaaccggcaccactggaaattccccaaacgcggtggtgtttggcggttctgtaaccgggactactggaatctccccaaagccggtggtgtttgacggctctgaacccggtactggaaatgccccaaaactggtggtgctttgtggttctgaaaccggaactattggaaactccccaaaatcaccaaaaggatttgcagggctgggtgcaacctgtagctgtggctgctgctcttgttgatgataggttggctcatagagaccgaatgggttgtttacggctgaaggcggtgaaacactgtctgaaaatgcaaacaggtcttggacctcaaacggattggaagctgggacgccataggcaggctgttgggctgctctcaaggctccatcgtcatatagactgttcagggtgagcgtgtctaatccacccgccttgcatttgttgcagaaaaaaatgttaatgattcagaagccacaaaatcaattccccagaggtgacatacgttaacaggacaatggtacgtaattgatgcatcccattatcactaatacaagaatacatcttaccagctgtctctctgtggctgcagatatatcattgctaggtgttgtgaccaacgcaagctcccatcctgacggatccaaatctcttgcttgcccaaaactaaacggcgaagaatcaactggaaacagaaacataaccagaattgcgac

SEQ ID NO: 36287 - DNA, 7124 bp, Arabidopsis thaliana landsberg
  unsure (1)..(7124): unsure at all n locations
gggtaaaaacttagatttcacagctgcacaacaacgcgcgtcacatctgggcagactttatactgcccattgggctagaagaagcttagttttcagatacttataggcccacaaaatgtccaacagcataaataagccttcgatggcatgctgatcataaatttatcaattttaattcttattcattggctgctatctcctctgattttgttgtgctcgatgtcattgtaactgaagatgcggtgtagaagcagtttttcgtattatctggataaatgtaaatttgtatgcatttgctttttcattgttttcctaatggagtaatcatgttgattctggattatgtcttcaagtgaaagtaggttctctagcatgaaggttttaagagagaactaggagctcaacaagttgcgttgtttttgcttctcttgatgaacaataaaagggacaagctcgagctcgaagcagcgaatcagaaacgagaaacttacatagagcccttccctccagcattaaaaaggatgagcacttgagtttttggactgtacattgctcaactgtgtatcaaactgttaaatcccacaattttgcaaattaaatgcctattttttggaggtatttctcattggttatactttggtcctttttcactagtacaatacaaagagaaagaatgatactatattactgtaacatgaaacaattctgtggtttgcgagtgtctcgccttaatatacaatttaccatttcactgagaagaaaagaggacctatggggatggtgcagaagatggtgttgtggctcgaagaagttgttgcagaaaccgagctgcaagacgttggcctacaccgcctgcaacacgtcctccaagtcttcgtgcctctggttgttgtaacacctgattttaaaaatataagagtttagctcatcaatcaattttatgttatgtaccagtctcagtgcacaagatcaatgaagtcacctgtagtattggttgcaaaatagcaggatcaaagctttctgaagattgaagaaggccccagattctggagacctgatcccgaagctcaagcgtactttgaagttccgcggtactcattgtaagagggccattcccatttccattgaagacaagagatctcagaaactcaggaagggaattgtatgtatcaacaacagtgcccagcgcaattgcttcactgactcgtacagcttctttaattactaacaatcgaagttcttcgccatttggatccagcaaaagcttcaaaactggttgtagagcatcctttgctgagaagtctctatctttacttccctgttgtagaaggttctcgagtctattccacctaaattttccgtctttgaatagtagctcgataagggcatctcttagatacgggtttggatcagtgagaagccttttggcaaaatatgggtatgaagcagctagtactttgaaattaggatctgcgtagagtgccaaaccttcaagcacagtaagcgacctcaaaatcaaagcatagtagggcgggacattaaatggatactggtagaagacagcacctagaccatcaaccaaagttttgaaattgagctcgctcacggtataattaagtgcatcgtcaaagaagtctctgagagctggtatgataggagtaacatccacatcaggggacaagaacttcagagcatagtaatctcgtgccatggcttcataatctcggttcactaaatggacaacatggcctatgatagcaaatctagcttcctctggtgtctcactcatcatgccaaagtctagaaaggcaagttttccatcaggtgttgccaagagattaccaggatgagggtcagcatggaaaaagccatactccaagagttgccttaggctacactggattcctgtattcacgagatccagaaccttcaatccctgactctcaatggcaagttgctcattcagtttagttccctcaacccattccattgttagcaccttgcggctcgtgtaatcccagaatatatcaggcacaagaacatctgctttatctgcatacaattttttaaaccttctggcattttgggcctcctggacatagtttagctcctgataaactctgcaggcgaactcatcgataagggtaaggacatcggtagtgatgaagtctacatacttgttaatgagtttcccaactcctctaataaggtaaaaatcaaggccaatggcttcttcgatcccagggcgttgaactttgacagcaacaacctgacctgaatacctcagctgagctttgtaaacctggccaagactagctgctgcgattggctcaggagatacagacgagaaaatggtctctagcgacaaatccaactctctctcaatgcaagcaaatgcctctgcatcagggaaggttggcaaagcatcctacttagacactcaagcacataatatagagaaagttagagatgttctctttacctattttcaaacagaagattcttaattacatatacgtaaagcagagagaggaaagaggagaacctgaagctctgcaagttcttcaaggtaatcgggtggacagaggtcgggtcgggtggacaaaccttgacccaatttaacaaaagtaggtccgagacgagtgaagatccgccggagctcgattgctctcttcttcatgttcttctctaagttgccctgcttctggtcaatccccaatttcaaagcgaaaccacccaaagctcccaatatctccaaacttctccgcaaagcctaagtcccaaattgagctgcatctctcagtaacttacaaaacttgaaactccaaaaagtgaccaagtagctaaccttgaaaggctgagagccatgtttcctggcgatgagctccggagagtaaatagaagcatcaatagcacgacccaaagctcgtgcctcggcttgaagatcatccgcgagatcagctcgtcggtactgcacaactgacgccggtctcgacgatggggaaggacttgccgccgctccgtcttccttaggcctagcttgtaccagggccgcacgcgccaatctcctccgatttaccgagaaaaactttgattttccgacatttattttggaattgcgtaacgaaagaccatcaccgactagagttaaacccagagactgaccaaccaccagactcatcgtgtaacaacaagagcccccaaaactcggcgaaaatcagagagacaaggaggaagaaagaattcagattgtgattgcccagccagtaacagccatgaaagaagatgaagaagaagaaagagagagcgagagagagagagatatttgttgtaaacgaaagattagaagcgtttttggttacttacttccggcgaataaacaaggtccacacttttggcgtgccgtgacgttctctattttttttttaattcaaaccaaacacgactacaagacaaaaaaggcattatagcattttccctaagagtttaaaactaacaaaattcgtggttcagtataaaccagccatggccttcttcaagtttttttctttctttgtgtgaatgtaattagtttcaacctaacaatatccattcaggtttacaccaacaacacagtaccatattatagagaaacctagcttagaacaaatcctttgtcactacctcctcccatacatccagtttgttttatgtacatatatatgccgctgaaaaaacactattagatttctcgtctcggaaacttagccgcggttatttagatttcctcttctagtaaatgggattcgttcttctgcaataaccccaattgtaaatttcatggttttgggtgcggaataacaacaaaaataatagtgaaacaagagatcagagaattatgttgttaccatggtgttgctccatgttaccctcatcatcataatctccgttgttacttgtgaagaacggtgttaggtaattcctatctagttctgtgaatgatgccgcactgcatacaaacaaaacaataaacaaatgggattcttgtgtttattaaaagagacttgaatgcatctgtttgaatgccgacaaaatgttgagaggcatgagttaatgcgtcatttacctcttatggaactctcttagttttgtcctgaatccacttcctggcggtgtatcttcatcatcataactagtcatataacgactgttcaccacctcaaatccctgacaaaaacatatcaatcatttcgttttccacaccaagaaaccgagattcacgttataataggagggatcatctaggacatgaagtctacgtaaatggccatttatattcagttgacttacatcacctaaggatgtatcgtggctatcacctacaacctctagggcttctagcattgtaccagtcgatcctccaatcagcaacacctgcaatcatttccagtagcgtcaaggatcacattgcaagcaatatagtttggctcagctatcaacaacataaacctttgatcggaacactcagtttaaagcaaattctagttcctaaagaaggatggattaccgtcagaacaacaatggctgtagttgcagtgaatatagtnnnnnnnnnnnnnnnnnnnnnatcgtgaacagattgcagagcaagagcaaatgccatagcacctcgaagtcctatgcaaaatccacatatctttgtatttattactgatgaatagaaacaataactactcaagggaacacagagcagtatcttaccactgtaccaaagtgctttttgatgtgtcattggtattttcctatgagcaggtcgtgccagattgaccaaatatccacaaccaaacacattagctgccctgagtaagacaaatatgccaaagagtaaacactatcagacagcataaaacaaaattctattcggaaatgaatatatgtacttatacaggtcatgaaagtgaaacaaaaagcataccttgcaattacgataaataactgaggttcgtcaccaaggatgaaaagaaagttaaggaacaacatataaactaaggaaataattcaactccaatccagtaaaacttgagtaagaggatacaatagaaaaaaatatgaatcccaagtgtgaccaactatgcttttccatggcaatatcaaaacccatgtagatgaacctgcaaatttgatcatttgaaattagaaggtcacgtcattgacgcatattacagaaaccaactattaatatgcatgagaaaataagaatcaaatacatacacaaatgtctctgccagtgaagatatcagatggaaaaatgcagacacaaatcgctgagaatttgcagacaagtttgagtaggtataatgtttcatgacctggaaggcacaggcagtttccattatactactttactttcggctgaaaatcattgcacatagaactcatgtaattgaatgacaactcacaatccctgtaaatagaatcgatacgatgccagatagactgagaccttcagcaagcatgtaactggcacaaagaaaaaaagttaacaaactgcacaatttctatgagagtgaaatatattgacacatagctagtatagaagagaagagttttattacgagaaatatggaaaaagtacgaagagacagcactccaagttctgtagactgaaagaaggagagagtacatcagaataaaatatttcattgctgaccattagaacccgaaataaagaaattcaaacacagactacagtcactcacttgtcaacatccagtcctgcatacttgaataggtgctttacattaaggctaacaactcgtctatgtgtatggaatgaagtgaaatgtttcagaagaatctaaaagcacaaaaaggatatgagagcagaggtgaatccaactccaacgcctgcagatgcacattttttttttaataatgcacagagcacaaatctaagaatacataatgacataagaaaatcttgcgaagcttgaaaagtcaaatttagttaaacttgttcataagaatcataacgtcgaattttatcagcagcattctcaaactcaaatactaccatgccatttcaagttgaaagagccaaactatgcatgaaatattaggaacaaataaaaagtaaggcagatgattaaagcaaacctgcagacattgaaccgacaaacgtttcgagaaacctgactatcaccataaagaaattctgtccagaggaatgacttctcaccaaggacattgtcctgcatcccagtttatagccttgttaaaataccttaccatctgactatcgtgtttcaaaccctattttgaattactaacagacctgtacagagatatcgccatctgccaaaagcaacataggaaagagaaagacctgataagtaatgtgacaatttcatcctaatatatacatataaggaaccagaattcacttagcaaaaactacttacagcatcatttaaaactgattctccaaacaccagggcatacaaatttacatctgaaccaagttcctgtaaaaaaacacagtagtaagaagcggttgaaaactactactattcaaaaatagtggatatccccgtaaagcagtgaaagaaagtacctgaaatatcgacaatacagtgacaggatcagtggctgagataagagagccaaacatgagacactcgacgaatggaagtctgtacatgagaaacatcacaccgccaaggtaccttcagaagaaaaaagaaattatgaataatggaaaggcaaccttttccgtcaacaaacattagccattcacagtaaagagatacttacacaagcaatccagtaaccatggaagctacaaaagttccaagcactgaaaaagtgacaatggctccaaagtttgagaagaaaggtttctgcataaaacccaacaacaacgtaagcatcatcaagaacttaaaagcgaggatgcgatctttgatggtaaaacaagaaaagcaataaagacatgagggtctctgcacttacaggttgtaaactgaagcctgactgggtgcaaacaagtacgtcaaggaaaacaacatattttgttgcctagttgagattcattgaaaagattatgttacacagaagcgtaagactatctgaaggcagaaacaaac

SEQ ID NO: 36288 - DNA, 2085 bp, Arabidopsis thaliana landsberg
  unsure (1)..(2085): unsure at all n locations
tatttttttttataaaagcaaaaaattataatttagggggaataaacaaaaaaaagggtattgaatatattgattgacaattgacaaaagttagtgtttgtggtggcttttggtagaggatgagaacatgtgacgtatgtttcaatgtaatggacagctctgctatactcttatacttcgcctactttttctaaagttgttttgtttttatctcttcacttaaaagtactcagacacaagtggttggttcttgttttttcaagttaactaagctaagtcaaagctaaacatcattcatcatccatatagattaaaccatcttttttaccatggagctgatgctgttgccagaaactcaagcttcacatcatcgagctgttggacaatctttgctgcacatgacttactttgagctatctctttgtccatctcttcatttagcctttgcagctcgagaatcttgcgtttgttctcagcttttacgctctctttctctgcggtcactttctcggcatctttgagttcctctgttttctttgattgtctatctctgagagacaacagcttattgatccgtgactgaggtgcttttacattgaacccgtgtttctctaactcggcaaaagttattactgaggcttataaaaaagcttatggaattgtcgtgttgcagagatttgacttcctcaagtaaacaaggaaaggtgagcatcatcccaaccgcagacatttcgcggcaatcttctctagtctcaaccaacgggttgaaatgaggactttgtgggactgtctccactgattcaagtgtcttccaaattgacaacttcttttcaaatggcaaagtcattgttgtgtcctcaacactagcatcagaacaaaggctttcttctcttttcctttttcgattaatatcttcactattttcctgcataaaaagttcaaaggttcactatcattcaaacaataaaaaaagaggattaagatgattagccaccacctaacaaactaccaagaaagtgcgaataataacgttaaagtgaagaattaactttacattctctcgtgttgaatcgttcactgaagcattctgattcctcggaagtgtctttctttgagtttcagcctctatttgtttcaacggtggtgtagttatgcccgnnnnnnnnnnnnnnnnnnnnnnnnnnncatttgctggaaaacagtgacattataagatcaattgtcatacagaaattgaaaatggattaagagaatctgttagattttggagagtgttacaaacttaccattcctcacagaatcactggtctcatctcctgatccctgagttaacgacgattcccttgtctgcaacatctaacagagatcaaaaaccacaacaggaagataataacacaaagactcccagtgcaaaccatcattcaacatctaagaaatgcagtcaaaggagcaaacatttgctgaagttctaaagctgaaacggcagtctcatattttcaaaatgcttgcaaacagttcacacaaattagtcattatcgacaataatctagtgttgactgaaaccagtgcaaagaaaacgttaaataccttccaaacaccatcttcccacacctgcaaaggcctaagatctgactgtttgaatgatatttgcttctttgtagcctctaacagcactatataacatttctgagagagatttcccatcactcgtccttgacttaccatcactcgtccttgacttaacatcactcgttcttgaattttcatcactcgtccttgacgccatcccataccatcatgaaacacctctacgtattcctttaattgatactcttcaaccgaaatagaaggcggtgtaggcctaagactacacaaatcaacggttttgttgagtcttgcagcctcattacccttgcagctgaaggacttatcataaaccctgacaatatacttatactcatcatcttccttaaactctttaataaccactgcaggaacccaaacgacttccccgttattcatcttagaactcacttccaccgaagttccagaactaaacataggcgctttagctaaccgccacaa

SEQ ID NO: 36289 - DNA, 1071 bp, Arabidopsis thaliana landsberg
tggtaccttttgttacaatactcggagttctgtcatcaactgcatccaacgaagcgcctttcgtgttcaaagcatcatcatcctcaggcaaatccgtgtatttaatgttagacaaatccaaagttctttggttaaatgaaactctaggagatggactaggagctccgaaaaaagattgattattgctcttaggtttatcggatttcagcttcattatctgcccacaacaagaacaacgttgctgcctctgaaacctgtcattgctattgttagttctgttctcaacctgatagaagttttcatctttcttcgaacccgcaaccggaaacgccaattgaagctcacgttcatcgtcgataagaagctcaagatccttatgcaagattccaataagagacttgtaagtatcaacatctgtttctttctcggtagcgaaagagagaagacatccttcacacatacgtttgatctcagagagtttcttgtgcacatgacagtaagcgagagatgagacattcttcttgtgagcatcgcatatcgagtcgttgtaatagaaatcagggtttctgctgacaagaacatggtcgagtctagtgcagagaagacaggggattttgaggtcaaagaatttagcgatttggttagagaagaaagcgaggaagccatcgatgaagaggataatgatgaggatccattcaagaagagcgtagattaagaactgtgggaatgttccaagttcttcttctatgaaattcttgaaggaacggttagacattattgtgattgcaaaaagcgatcacgaagataagaagcaaacttcagataaattaacaggaagaagaaaattatcttaaaagggttacatgaagattgaaatggtaacaggaaaaggaacccaaaaaaaacagaggttattagctttattatctagtcctctatatttggattgggaaaagaattaatttgaccaataatacctgaaataacggctaatcgcagacaagtaaaattgacaaaattagattctttttctttaaaatttactctggcttttggatttgcatgtactat

SEQ ID NO: 36290 - DNA, 2620 bp, Arabidopsis thaliana landsberg
tattgctaattagcccatttttgtatatttaatgcagacacaaattatttaatgcaaagggaattgtattaaatgcataagcaaatgatcttttggccacaaaatctccaataatgtatatatagattaggttttaacttttactttgtttacaaaatgagctatttggcccaaacataacttgatgtatttttatcaattataagcccaaaaagatgtttttgacttgtttcatctttgatttacggtagagacattgtcgatctcaaccaccgacgcttcaaaagctgaattgtccgtttcctccacgtttccaaacacatcattttaggaatcgcgattctgagacgatttcgagcaattccgagcgtttccgtttccacttctatgcagcttaaactattataggctgcaagcagataaaataaataaattaaacaagctttatgaaaagaggaaggttggaaccctagttccaccacttcaattaagagagttaccaattccaatgatgaaactttgaccaaaaatattatttatgttgtttgcggctacaagtatggccttggtccgcttgtaccaagtatggcttggtccgctaccaaaattactacaacatattaacacgtatgttcaaacatagtcttgtgtaaaacgattgtcgagtttctcattctaatttatatagaagattaaagattcaacatacaatgcaatgtcgtggctcaattacttgtcatattaaactaaactgtcatttttgagaaattacacgttcgatattcacataatttgatgtcttcataaaccattatatcaaaataggaaaaaaaagggactatcttatgtaatgtactcgagaatgcaaaaacgagaatttactgattcgtctggcacgaggcccaaaaggaggcggacacaagacgccgagtatttccatcccaaaacgagcccgttttggcccaattcttccactctaaatctatcattaaacaaactcaaaaggagttttgcttgacaacggttggcaaagctcacttccaagggtttgaacccattagtctctaaccactgtggccacgaagcaaagctctcgacttctgcatcatcagcggtgatacgcgtcaaccaattagcaacccaaggaccgataaaaacacgctcaacaaagccacgggccgggttggaaattgaaaggcctgcctctagagagtcgaatatggccgagaactgatgtagcaagtccataaaacaatatagaaaaccttggttccccatcagaccaacttcttcgtgaacaagtgtaacaagtttcgggtttagagttttagcttccgacaaaaaggaaatgacggaattgggtgtttggtgactaaaccgaggaagatgcaacatacaattgattaccactgcttctcctcttacaagtttcaaagatgatgtgctgaatgcattggtgtcaagtttacagtggtgatatgaaaatggctggccgatagaatcggcgaacgcagttagacgccgcccagtctcttggactgcagccacggattttttaccgttggttgctcgtgacaaagccgtgatcctaagatgttgggctgacgggcctgtatttctagacaccaaggcttgcatcaatgaagcccactgagcgccttcattgatatcgtaatccactatatggattcgacgctcatacttcacagcttcaagaatagcctgtgtggcagtgaggtaaccaaagttgacatatggagacatgttttgcagcagttcgaacgacgagatcacatccgcctgatcatagacatcatcacgatgttgttggggacgtagaacattatctcgttcgagctactttgaaagtccgttggtgaagtgagcagctaacctctccatgttagttcggtcaccaggagaaaccaaatctttaagccttgcaagtataacccgagttagctctctagacttgttcgcaccagttgacgcctccgcagcagccaccagtaagtgaaccaacctcaagccctttgattcatcagtcttaggctcttctacgctaaccccatcagccacagacaaacccgttgacgcagagttacaaagtccgttctggtcatgaagcattggaacagcttccgattcaggttccatcatggctccttcatcacccataatggattcaatgacatcacggaagtcacagtcccaatcaatgtcaagatcattcaaactataaccatttgaagaggtgcttgcagccgtggcaagcgggtcagtgtgggtagagaagaagaggtccaagaagtcctcgtaaggataattcatggtcatgcaggtaaaaatgaagaaacgggcaatgcagaattatatagatagtgtagtaggacccaagagagtacgagttccatatttataagtaaatctttgaagtcaaatgttgaaagaaaaaaaaaaatatcttcgaagtcaaatctaaaagtatatggtcccctttcagggaggtcgaacaacctgtggtccttgaaagaagcagcaggaccactgtgatcaggaaaataaacaaaaacaagtgagaattgtccaacaatattaatccatgtttatatgtatcaat

SEQ ID NO: 36291 - DNA, 6670 bp, Arabidopsis thaliana landsberg
tcctccagtttcagctctaggatggtcagaagaatatatttgctcttctgattctaaagaggtatatttgatatcagaaagtatccttttgtagtctagtcttgtctcgactttataatctcatctcaaccacttttcttcttctgccaaagataaatgcaaggttggcagctgctgaggaggccatgggtctctcaatgtggacaacggcaacagtttgtcgtattctctctcttgaaactgtacggtctcttcttagcatctttccttttcttttgatggttcagtgtcggttttagatcaacctatataaaatccatctcttatttgtgccttgagttagtattttcacagataacaaatatctgaagttgtaaagtattttctttcttccagattatgtcactgcttgctggagtattattagagaagcaaattgttataatctgcccaaatctggttagttaaatatgtcctctgatcgttatttatcttcaattacttgaggagattcaaatggaaatggtcacttgaactgaccggcaactattgcagggtgttttgtcagcaatagtactgtctcttgtaccaatgattcggccatttcagtggcagagtttattgcttccggtaagcatgacatcattagaaaaacaattgacttaccaaaattgtagtttccttggcgtaacttctctctgttgtcttcaggttctgcctggaaggatgtttgatttcctcgaggcaccggttcccttccttgtaagtatatattccgtatgaagtatctcgtgccatgtctttaatagctagataattagttattctgaggaggtgaatgttcattagtctataataaaccatgaaaatctcgattttagttgatgtttgcatcggcaatcgtgaacaatgcatttttcttgttgctcacacggtctgcgtttgcaccacctggcaggtcggtatacacagtaaacctattgattggaaggtcaagacgtctaatcttattctagttaacatcctcaacaatcaggttcggtggccttatcatgaaagtcttgtatttcttttctttttttgttaggtatccaaaaccgataaaattgacaattctcaaggcatgtaacgttaattatgtttcttcaggtaaaaatatgtaacatgccagcattgcctcagtgtagagaacttatggctcagttggctccaatccatgcaacattggctcatcagagctcgaacgctagaagacacccggtttataaatgcaatgaagtgcaagtaagtagtttaccaatgcattgcacctcaaattctaccaaaatgaaattgcttaacccgatcatatgactgactgtttctcaggcagaagccgcgactacgttcttgagagtaatgagagattacatggagtctctttgctcagatttacactctcacaccataacaagtgttcaatccaatagcgacagggtacttacttatatagctactctcctcgaagctgaacaagaactactttatttctatctctcaccaactatctaaatctttctttatcaggtttctctacttctaaaggacagttttatcgattcatttcctggtagagatcgacccttcattaaggtacaaaatcctaatcccaatcgtggcatcagtttttgatattctcactggaatccagaggcttacaagttccatcctttgttattctgcgttttgcagttatttgtagacacacaactgtttagtgttttatcagactcgcgactatcgagctttgagaacgggagtctctgaagctcattttgtcatcaacttatatacaatacgaaactgaagaaacaaaccaaagtcaaatcatatgaaaagaaggaaaagaaaagcaaaagagggtaacttttactaccctatatacgcagagagagagaggtgatggaatacaaatgttttaactcagattttactgcagtggaaaagtaagaaaacaagaaaacagagacatgcttatcgtgtctggatctttctgatccatttttaccattaacaaacttgtttgaaaacttatttcctgctcttgtaaattattaaccaccgctcaatagaagcttttgtttgttatagtttgtacagaacacttgaaaaccctttttacttaattcaagtgctttgatttcaatagacatgctgcatagtatctaatttgcattttcttacgaagcatatattatgacaaaaattgctgttccacaattgttacgtaaactgcaattctgtaaacttaacgatgacaatggcggaatgtaaaaatgcaattcggggatgaatgtgttctttcagtatattctaaagtgccacgatatgataacattatacagaatacaaggaaacggtcgttgaatttgaaaaactctaattattttttagtgtcaccttcttcttcttcgtcatcagatttagcgaagatggtcttaggctgggtctgagagtaagcaggtgcaataaactttggatctttaacagcaacctctgcgtatttcaatattgcttctcttggatcttcttccatccacgtctcttttatcatcccaccttgctgcaaacacacacaacaacaaccagaagaagattttaatactgtatcactaataccacgaatccaaaaaccaaagaagttaccgaggatctgtaccttgagaagatattgtgttaataagccactaccagtagtcccaactcttccaccatgaccaggacctgtcatgggtatctcaggcttgtgggatttcattggatccttcaatgctttctctctttctcgtttacggcttggtgcgtctctgaacaatggtaatgcatgaggattgtgtattactggttctggttggtaatcatctacagatttcttccttggtgcacgtgcaacacagacgcatgcgcctctctcgctctgacttgggtcgtaaagaatgtgagtccctccttggcttttgtctccggatgttgcaaatatctacagcaacagaacccgcttagtgtgaagttgagaaccagattttagaaaaagggaacactgctattgttgttgttgatattttacctgattcaacctcgggtgccaagcgcattgcaccacgctggaagttggagagattccgactttttgaacaatctctagtttggtgcgatcgtagaaacatagcaagcctcctgttgtgctgtctttctcgacggatgttccagtcaggatgatttgttcgtctggactaaaggcaacgttggtttgaggataataattaggtagaccctcgaaaacttttagagcttctttcatctgccgcaagtcccagacctgatccaagattcaagaaatagctcagtttctatagctgagcaaactggtcgaaaacaggttattatctaaggtttaccttcagagaaccatcaaaactccttgacaacagaattctgccatcgctagagaactttacagaggttatatcatcagtgtgggccttcccaacgtatatatctggtcggcttccccatcccggcttgagactccaaatcttgatcgaaaaacaagaaaaggtataagaccattaatctagccaaattactgtacatcgtatattctaagcatgttagactagataaaacacaaactttccctgacagagtgtaatcaggaaatcaaagcaagcctctacaatcattacctgtatagatccatctcctacaccaccggcgatacgctttccgtcacggtcccaagcacaggttgtaactggaaccctccctggtctagcaagcttaggcttaataacctgctccaataaacagttaaatgataccacttgcatgctgaaatcaaaccacgattttcattggagaaaaactaaaatgggaatgtagacaggggaaatgtacctgcgtttggcttaggaagttattaacatcccatatacgcaaagacccgtcttccgacgaagtcagaacggtttccttagtcctcggatgccattctccacaggtcaacccacaaatatgtcccttagtgttcttcagatcacgaatatacatatctcctttcataaactcaccaagagtaagaccatctcgatcaaaaatctgaaattcaaaagaaagaaacgagtgttagcaattcatagatgataaagaatcgtagaagagagtcagtaacgttagtgttgttcacgaacgttctaccttagcttgtgcagagccagtaacgcatagaaattgaccagaagtgggactccagctcacgctgcgaacttggtgtccctcagatggttctatctgtctaaaagactgtagtctcgaattcatcccttggaaatcgtacattctcacagtgtagtcatagcttcctgaaagaactctagctccagcactatcaacagcgagagatgaaacaatctgattccaggaaacaaaaacctttgttcaatttcgaattcaaaatctccattgaaactacttcaaacaagagtttagtatatacctttgtatgtcccttaagctgaatctcgttgctcaatggaatctggtaacgattctcctcgttgtcattatcatcatcgtcatctgaatcttcatctgaatctcgagcagcaggaggcggcggcggaggaccgatcatatccccctcatcatcagaatcattaatgttcccgagtcccttaggcggtggcggtggtcccatcataacttcttcatcctcctcctcctcttcctcttgcgtccgtttagatgacggtggcggtggcggacccattgctacatcaccggagctgttagggttacgattcggaccgcgaacacttcggagccaggtttgagatgaggaagatagagacgggaatccagatttatcggaatcaggtttcttcgtggtgatatccgacgaaactccggcgtcgttggctacatcggtgcggcgagttgcgctgtgaatggcttcagttgacgccgaaaccttcgatgtcttaccgaacgaaacaggaaaatgagctcgtagaccttccaattcgtcctccattgctttctcttccttctcagaattttgatttgggatacaaactatataacgtccggtgacctcgccgccatgaaaattcccgttgctgttaccggcgacaaaagattgtggcggttgagtccataagacagaacaattttgggcctaaacatataagccctaactgccttagtaaataaagttttcttcttctaaaacctaaattttaaattgggcttcaacataaaggtccatttatgtccctttgcttgagttatttttcatttttttcacctacgagagtatttatttcggtgcaaattgtgatttctctcgggtgaaataagagacaaagtgtcatgattttgagaatatactgaacaactgtcaactaaggggaatgctaacattttaatacagttcgactttcaataaaggggaatgctgtgttatatttatagcgatacactttgttgtcgcccccagatgtcgaaatgcaaatcttaagggtcataggtttataaagacagatatttgcagagttagtgtgagtggtatgtgtttggaccgatctaattttgtccctcgcgcataaagcaataaatatacctaatagctggtcgataaatgtatcaaagttgaagcttctctcttaggtcatatgctctaaccaattgatacatgcttgagatgactttacccataaggccataatacatggcattgtttgggcatttgtagaatctagctcaaatatttggtgaaaacagctaataagtagctaggtttaagtgcttaacaaaaaaaaatattgtttagaaaatattcaatatgattttaatcattttatacattttaaaaaacaattatttactattttcatttacgctgttagtatttttaattgtttttcaaccgccaataaatttattttcaacagcaacgttaatttactataacaaaaaaaaaaaaaaaaaaaatacaaacctataattaaatatccacgcacaaaaaataaaacttgtgttgatgtcagaagccatcccttatctggatatgttatgcatagatcttaatgaaaatgagatggtagaaaataatgatttggccgaaattataattaggtcaagctcaaaaagttgtgatagggtgctatcacaatcatatcatttgtctgccaatctaaccaatctaggagctggtggtgtcacatgttcctcgtacttatgttttagttttgctgttacaagtgtattctggtatgtactatgtggagtttgtggcgatttccttacataatatcaattttcaaaacagatttttaggcacgtaaacaacaagtacaaagatccctaaatttcaggtaatagaagatattggtaaagttgatattataatttatgttttctcatattttttgctttaggtttatcattattaacaaactaaaacaaacaatcatattgtgcgtcaagtgagatatcagctaagtagaatctagctcaaatatccggtgaaaacagctaagtagctaggttcctcacatcccatcaatttttaaaacagattgttaggcaaatagacaaaaagtcaaagatccttaatttcactaatagaaga

SEQ ID NO: 36292 - DNA, 2480 bp, Arabidopsis thaliana landsberg
gaatgtgcagcaagtgttgcttattggaaagcacagcaaaggatgccactgcaggaaatcaggatgtctcaagaagtactgtgagtgttaccaggcgaatattctatgttcggagaattgtagatgtcaagactgcaagaactttgaaggaagcgaagaaagaaaagctcttcttcatggatctcaggtctcggatacctacatacaacagatgaccaatgcggctgttaaccgtgccatcgacatgtctgcttatctgtaccctcctgaatcaagaaagagaaagagcaaggacatttcagattctgtagtttcatcatacggtgtccaataccagagggtaaatagtacaattctgtgttgatctcatggtctttagcttcagtttttgcattgaaagcataattctttgtgtttttctatttccaattaggcaaaccacgttagaagaaatggtgaaaattctctattttcactccctaacaacaaggccgtgtccggatctaccacaagtgcttacaggttggaaatatcaaactcatcttctctatgatattgcctatttgaaactaccgtgatacctgactaatggcttctataggtcttcttggtcaaatacattccaaccacatcatgtcagagagctatgttcacttttggtctcaaactcggttgatgtagcaaataaattgtcaggtacatatcatgccgttagatgtacaagatgataggttaacgttcctcatataataaggtctttgataagagaatgtttgttatggtgaaacagacaaagggaggaagaacgtcaaaggcccttcttcacttgatggagcccaaagagttgctaatgagatcaatgactcaccagattgtgtccttgatgctaatagaatggacgagaagcctatatctcccgcaacacgtgcattgatgtgtgacgaagaacatgagatcgggtcatagaaacagacatcggcccgagtgatagcaagccaagagaaagaagacacagacacaagctcggggatttacttagagcaagaaagacaaatattgtcagtcttcagggactatatcattcagctctcaaaccgtgcgaggataaatggtaaccttgatatcgtattcttgttcagatatttacaagtagaggattgtgctaatttaagacattattttaagcaggtaaaaatatcaaaagcaacacaaatccaagttgaaagaaaccagaagatgaagaacaaagccatcgagactcaaattagggacattgcttagggaatttttttgattttttttttaggatcatactcatttttaacatatgatccatgtcacattttaaaaaaataattaggaagattagacataattaaaatttaaaaatggtttgaagtttatgagtgaaaattgtcactactatatcgcaaaacagagaatcgaagataatgggctttgcatcgttgtttagttgataatgggctttggaataataaaggtccaatcaaattacatgacccgacccgacccgtccgagaaaaatattctgtcttcttcatcaatcaacggtttaagacttaacactgcaaacaaaactcaaaaccctaggcacacactctctctctctctctctatcctcaaagcttcttcttcctcgatatcgattgagagaaacttcgttctaagattcgaaatcatggcggcggttgttgatattgatgtcctaacagctcagttagggattaattggtcagatgttaatctcgattcaatccaacttcctcctggaaacgactttgggatcgaaaggtgagattttttccattacatctctgcttctattagaatcttcgtttcaaatctgagaaatcgcttagtattttgaactgattgcgttgatttgtttctgtggtgattgggtagtgatgatgaaagtgtttaccaagatgaccagtcagaattcgacactggattcggtaacattatcgttgtcgatcacctccctgttgttcccaaggagaagtttgagaaactagaaggtgttgttaagaaaatttacaaccagttaggtgtgattaaggaaaatggactgttgatgcccgttgatcccgatactaagatgacattgggctactgttttattgagttcaacactcctcaggttgtttatctactcgcagcttaaagcttaatctctctgttgtagttagttttgcttaagcaattgtgtaggcacagaactagattgttttcaatggtaagtgtattttctaagagtttgtctcaatgtctgtgctgtttttaggaagcacaaaacgctaagaaaaagtctcatggctacaagttggacaagtctcacatatttgctgttaatatgttcgatgatttcgataggttgatgaatgtgaagaaggagtgggaacctcctcaagaaaggccctatgtccctggggtaagtttagttttcttcatatact

SEQ ID NO: 36293 - DNA, 1618 bp, Arabidopsis thaliana landsberg
aagaaaaaaacaggttaacaacaaattcttacttgattgcgaacactagaccgaatgatttcttataaaagattgcaaattccaacagaaggataatacaaatgttgaatatgatacaagattcactattcaatctttccagtagacaacaagaacaccaaatctgaatcatactgagagaaaaatcagacatgaccttaagatagcagcatcattacttgagactaattctactaatctttcatgtgattacaaaccttcccacgagaactaatccaatctctaatcatcacttcacaattcaattccaagtaactacagaacaattaaatccagaagacacagaaatcaacaacctaagagatcacaccaattcagatcgaatccaatcaaaaggtaatacacaaaattcgacttcaatcttcaaaaattcgaaaccagaaaaagtatttacttactgatcgaaaaaacaaataaatcaacatgtaaagagagaaagagttcctaacccgctatcaccgaggatgatgaccttgaggagggtacgtctacgggacggcatcgaatcggatctaaaagagagagattgaagaaatatctgcgatctctggtggtaaattttgttgaagaagacggtgtggtgggtgttttctctgtgccctgaagagtcttctagctgttcctgatctgtcttctaatttcttttgtgactattattttgtcttcttactaaaagtgaatcattcctctaataattaaactatactttaccaaaattatatatacattggttttgttcagcaagcagctctcgtagctcagttggttagagcacccgtttagtaagcgggaggtcttgagttcaactctcaacgagagcatgcttatttttatttttattttggtaaaaccaagtaatcaaattctagactgtaatttttctttttcttgttttacaaatttagttgaaggtacataatttgcatggctgtattaatacccaaatatagaccctacaaaaagaagacaataccaatacagaaacaacagcaacaacaaagatttgaaagcatctcttttaaaaataggatttgaacacacacaaagaggtttttgtgttttctctctgttcatctctctctctatctccttctcgtaaaaaacaaaaaaaggagagagctttacaaataaaatcatatacaaaaagaaaacaccgaaagagagattatggcggaggggcaatccccggagaattcaccgccgtcccctacaccaccatctccgtcatcatccgacaatcaacaacaatcctctcctccgccttctgattcctcctctccttcaccaccagctcctcctccgcccgatgattcctcaaatggttcacctcaaccgccttcttcagactcacaatcaccaccatctccgcaaggaaacaataacaatgatggcaacaatggtaataacaacaatgacaacaacaacaacaacaatggtaataacaacaacgacaacaacaatgggaataacaaagacaacaacaacaatggcaataacaacaatggtaataacaacaatggaaatgacaacaatggcaataacaacaatgggaataaca

SEQ ID NO: 36294 - DNA, 1893 bp, Arabidopsis thaliana landsberg
cacaacaacaaaaaggccaaagttcagcctgtacatgaggaaacagaagaaaactgtagaaagcaaaaatgttgtataatctggacttgaccaagaatctctgttctatagtaagaaagattcgatctcaattctaagtggaaaaggttagaacgacttacgtacaaaggaggaaagtaaagagagtggtcttgacggtgaaagcgagcgaagggaacacgagacacgagacaagagaagagctataaagttgaattaaatgattactttattgagatttttagacacaagtaacgaatgaaattgcaacaagtattataagggacgcggtgattggaacgagggagctccggcacctgtgcgtaccgacgaactctctgctgcgacatgtcggcaaaagtctctacgtggcttttactttatggccaaaacttgactacctcttgaccaacatattatagtacaacaaaaatttatggaaaatattagtataatgaatgataagcaaaacaaaatctattgtttttggttgtaatatttgtaaatgatttttagatagttcgataatttgctagttataattagaaaaatttcgaatagagttataaagagtagacctttttgtatatagtaataaaaataattggctataaactatgttgacttcataacattactacgtcttcttaaaaaaaaaaaacatgactacatcttgatcaagaaaattaaagcaaccgacagttccatgcacattgactttactagatctcgagaccatttattcctcagttgtatagatttgtttatcttttttgaatttaatgttcgaaaaaaaagaagagaaattgctttcattgagagttgaactcaagacctcctgcatactaaacgggtgctctaaccaactgagctatgaaagcttcttgcaacatattattccaaataaattatatcgtaaactaagagttaaaatcttgaaaacaaaggataacgatcttcgtctccctctgctaaacccattttcttctgttgaggaatggcttcttcagtctctcttcagttcctgaccaacacctttatctccaaacctcaggttcttaatcttatctctctgtatcacctaatgtttctatgtcatgtgtgtgtgtgtgtgtctgtctttgtctgaattttctgagtactcctcatgttttttccggtcggacaaagggtttctgcaacggaattgtgtcagcaccaagacccagaagcaatttcttaagagacagacaaaatggtgtacgacccatcaaagttgcgtctattgagacacaacctttccctctgtttcaatctcctgcttccgaagaatcttcctcgtccgaggttaggattttcagttttgagtgttttagggtttatagagttctaaaaggcagtacctttgacaattctttgcattgcccctatctgggagattgatttagagtacaaatgagctctaaagctagtacctttagacaattctgttcattgcccccatatgtgatattgatttagggtacatatgagttcttaaggcagtaactttagacaattctgtgcattgcctccatctgtgagattgatataggggacttcttaaggcagaaactttagacaatcttgtgcattgccctcatctgtgagattgatgtagggtacaaatgagttctaacggcagtaactttagacaattctgtgcatttccctcatatgtgagattgatttagggtttttgtcttttgtttcttcactagctggagacagcagatccggatttctaccaaattggctatgttcgaagtgtgagagcttatggagttgagtttaaagaaggtccacatggttttggtgtctatgcttctaaggata

SEQ ID NO: 36295 - DNA, 542 bp, Arabidopsis thaliana landsberg
gaccctgggggggggtttggagtcgagtatgacttgatgacatgtgtatttttgagtataagaacctaaaccgcaacctgggcttaaaagcctaagtagtgtttcctcgttagaagatgcaaagccaaagactcatacggacttcgactacaccatcaaagcttcgagaagcaagaagaagcttggatagtgttttggagtcgaatatgacttgatgtcatgtgtttgattgagtataagaacctaaaccgcaacaggatcttaaagagcctaagtgatgcagcgcatcttagacgtttgtgggcttctcgtatacttctcatgggctcacgtatccgagaaccctctaggataatcttttagttttcttctttgtttttgttactaggataataacgaatctgcgattcgattagctttcatgatttgcttttatcttttaaaccctataagtagtttcctttgatcaacgttgtaatcaccttttgattaataaaattttgattacacctaaagagctttctaagccctgaggagaggga

SEQ ID NO: 36296 - DNA, 3686 bp, Arabidopsis thaliana landsberg
ggctatataataattatatacaaaaaagcgtaataaatcgaagtgtattgtacatggattgtcaggcatcttcatgatgctcatatatgtggcatcatgatgatgctcatatatgtggcatcatcatgatgctcttatgcgggagaaatgtttttagcaacagcaaatcgtattgctgcggagttgagagggatcttatgggtactacagtctatgtgatctacacttctataatattgagatttggtccgactatggtgctgctatggaagccattagtgacccattaaattggccgcggtatttatcttattttgataggatttattggtttctcccgaattttgataagatcgtatttaaggtttcatcgcacgagatatagccacaagcgtaatgagagaaggtcgatgcagatcttatttagctcgtggaagtccgatgtggttacactcgcattgaagaagacaagcggcgttgattttattgttctttattaagttaagatcttctataagtgtatgaggaaaacaagtttagacgggaaaaacaaaaaatcgaagtgtattgagtaaacttcaatgaaacctgtaaagaaaaatttaaattaaattgaagattaaataagactttaattttgattgcaaatctttttatcgaattctagatttagtggtaaacatagtaaaaccttattacaccaactactgtagtcattttgtttgagataattcatttggaattctctttaaaagtttagtgatcggaggcttctcgattttctctctcttctctcacttgaatttttcagagaaagaaaaagcgattcatggcaagactccgtccaacatcgttcggcttctttaacgaccatggttggttcgtttccagcatcaattggcttctttagtggtggtggcttttttttgtatccggacgtggtccggctttgccgtcttatctcgccgtctggtttctacttttctctttagtggaatccggttttagtttccagttctttgataccggttttacctttctgcttttcaataatcattgtgatcttagtaccaatttttttttgggttttccttatcatcctcctttctcaagcttttttgcatccttatttagatgaaagtcaatctttgtttcatttctaatctttgccttttgggtcttaatcaactattagagtttgtttcaacctaaatcgattctctcaatcctttgatttggaatctcaattaggcatatctggtaagatttaataatcaagagaaatcatggttttttatttctcttttgtcataaatcgttgttgttctcgagaaatttagatcaaatataaactctggatattgtggagcagagagtcaaatttacaagcgtgatgagattgtcgtggaggaaacggtgggttatcggaattgatggtggtgctgggagataacgatgaaacaatcatcggcgtaagagaaaagtcgcatctacgtgtcgtatgttgctttgacttgttttattagcgttgtactctttactacattagttgtaccctttatgggtttgtgaaaaactttgatgactgggctttatgggctttagtgatgtttgtaaaccaataatttgaataaaaaggaaacttatgaaaagaaaaaaaaaaagtttagtgatccaacggatccacaattaatttccgtaaatggaatatattttgcgacaaaggaaagggctaaaacaattgttattgggccttttttttttgggttaatcagactagccttcgcaaattcgcgctttacgcgtttcgcgtctgaagacactaccggagtttttgttcggcgattgtagttagtggtggtggatccgggcatttcatttgataaccgcggtggatctaattgatctggatctgaccattgcttgctttttctggaaatttttagtgtgtagctctggagagtttctcgtgagtcgaatcgtctatgcggatgcagttgtgctcagatttttgagttgtctaattgatcttgaagaactgtgagagagagagagagatcgaaatgttgcgggcgagagcatttcggcagaccaatggtaagattgtgaagatacaggtacatcctacgcatccatggcttgttacggctgatgattcagatcacgtctccgtctggaattgggagcatcgtcaggtctgtatcgagattctgatttgattttggttccggttctgatttcgaatcgtggatctgtcaacgtttatgtctattttgttaggtaatttatgaattgaaagccggcggagttgacgagcgccgtttagttggtgccaagttagagaagctcgccgaaggagaatccggtgagccattgttctattctggtgaaatgagtatgagtttctgatgctttatgttcttactgacattcgtattttcctcagactataaagctaagcctactgaagccattcgaggaggaaggtagtagatagatctttctcgctgctaattcagttgctcctttcgataatgagaaaaatgacttatctgctcaatgtttgcacctactagcgttaagcaggtgaagttttatgacgatgatgtgcgttactggcaactgtggcgcaaccgctccgcagctgctgaatctccatcagctgtcaatcatctgacatctgctttcacttcccctgctccatcgactaaaggccgtcattttctggtcatttgttgtgagaataaagctattttcttggatttggtgacaatgcgtggtcgtgatgtgccaaagcaagagcttgataacaagtcacttctctggtaagttcattgctttttctctaattttaggatatgggtttgcttgacacctggaccccggggaagatgctccattactttaggcttcctatctttaaatcacttgaatcctggaaagacctccgttagttactacgctggaaatatttgagtcaaatgtagactaggcataagtgtaatggatatgtgtgttctaagtgtaatggataccaggcttccttgatgtttaatgttcagtcaatggccaaactccctttctacatttctaatttctactcctccttaatgttgctagaattcttcctttctttgcagcatggagtttctttcgagatcatctggtggtgatggccctttagttgcatttggttcaactgatggtgtcattcgggttttatcaatgataacatggaaggtttgtttgttccaaaattatatttttttttttggtttctctgctgggtttagagtgagggattttgatactgatctgtgttaatttccttgaatgtttacttccttgcagcttgcacgtcgatatacaggtggccataaaggatccatttattgcttgatgaatttcatggcatcatctggcgaagtaactacatattccctatatatgccctctttattgctctgaatttattgcgagttatttacttaatatgttaatagttaataccatctgatagatgaaagtgtcatgtcacttagaataacatactcaagatcacctactaagatcgactgtatatattatatgaaaacgaggtcttgagcatatcgtcttggaagtttgctacatatatcttcttctttttagcgacgtaaaaatctcacattctacttagtgggagt

SEQ ID NO: 36297 - DNA, 2482 bp, Arabidopsis thaliana landsberg
aaaaccaggagattaaaccctaaacccaaacctagtcagatctaccactttatcatagacaacctcaagataaacccagatcggaatttgaatcgacgaaatattccaccgacatcaaaaaaaggatcggagaatgaatcttaataaggaaaaagacacttacttaatcttagaagccatagtcacagcctctgtctcgttgctgcggatcagtgagaagtaaattacgttagaggaggcgacaaaggaaaaattgagacttgatatacattattaaattatggaacctggaaactcaaatttgctcgaactctaactgggttcccatttttagcgtagagatcaagatcaagagagagagagagacaatgattcggattaaggaaacgactgatgaacctaacgtagaagaaaatgatactcctagttggtgaggttttgtctcacgagtggccacactccccaaaaagtgtcaaaatgcaaactataatttaaattaaatgaattaaaaaaaatccgattgggtttcctacgtgataaacgcaaacaataacacgactaaataatcgcttgaattatcatcataaaactaaaacgtgagattagggagattaaaagactactcttccccatagctaatgcggaataatatctgtataccgttactataaatattcgatatgtacgaaacttttttgtttgtttttttctagtaacaaaaagaagagtatatatatgcaacttatggaaatttctgaaatatgtaaaagatagttataaaagcagaaccagtttattcacaactataatgatactatttgattgattgataactaacttttgttatacatcgcattcgcaatatcttgttgaatacaatatctctacgactctaccattaggcaaactttttatcgggcccagtggcccatatttattaaggtccatttattaaccgcaagaaggactgggagtctcaaagttgacctggctccttccataaaagcagtttagtaaataaatggactgtaatcagattgatatttgaaaaaaaatgcttctgaaaacaaaaattcacttggaaaactttaaaaattagtcgcgggaaaatgagagagatttttggcgggatctctatataattttccattagttattaattatttattttatgagagtaacttgagatttgagaataagaaaagttgaaatttgtaaaagatatgagaaattagtaaattccagaaacttattagaagcggcggatcgaattcgcgacgaccgttccattagggtttcgaatcaacatcaacaaacgacgagagaaaacttttaaaaacatgtacggaggcgattttgacggcaacgctgctttcgccggcggcggcttcatgccttctcaggcgactacgcaagcccatgaatcctcatcttccctcaaggtttcctctctttctctctctaaattatcttctcaatttgaaaaaaaccctttccgcgttttgtgtaatccaagttctctcttatcatgcgaattttagttctgcctgctctctatacctaggtttatgtatctgattctcgtcgtttctcgggaatatctgctgcaaaaagttccattcgagttttctaggaaatgttacatggatgaaaagtatcgaagaacaaattgttgactagatattatctagaaatgtggattttatctgtgaattttgaatcttatcataattgtacgtttgtgaatctggatatagagatcacagatgagcaccattttacttgagcagtccagcaatgtatgagagtgttcaccactattttgcagaaccgcgatgtacgtaccttgcttcccctgacactgaagcagttgagcagcgcatcaaccactggcgaatcaaatttctctattgatggcgttgatattaaaactgtgagctcctttttatcttctgctgttaaaacttgtttgctgataatgttacgccttaagctctattgattcaagcatttgagctttggtgttatctgtgtataggttgtaatcgttggacggatttctagaatggagaatagaatcactcaggtcgattttgttgttgatgacggtacaggctgggttgattgtgtcagatggtaaatacttataatactaatgctaatacagcctcaatatgataatgctttcataaaagagctcaactatatctcttgctaattcatctgcaggtgtcacgctcggcaagaaactgaagaaatggaagcagtcaagtatgtttcttctgcacattcctagatctttagaatagtatatcaaaaatttgatagttcacatgtataacaggctgggaatgtatgttcgcttacatggacacctgaaaatttttcaagggaaacgatctgtgaatgttctttcagtcaggtttgttttcctgacatacttttctctatcagtctatgatatatgtggtcagcgaatcat

SEQ ID NO: 36298 - DNA, 5856 bp, Arabidopsis thaliana landsberg
ttaaaatgaattgcaaccattaaaactacaagtaaaatcccatatgaaatttagaaggatgaaaaaacagtttcttaccagccgtggcaccccaaggattaggaagtggatttgcattaggtgtacctgtttcagcattcggtgccgaaatattaatgaaagtatcgcttccttgtgtagtaaccccttggtttcccaaaagagcagcaaatggattagagctcgtattgtttccagcattctcggacatagtggtagcattcattaacggttcctggacattttcatacatacgcctaagcatgttaaatccctcaggcatagactcaatattactcatagccctatcagtatttctcatcatttcacgcataagctctgggtttctcgccgcttctagagtttgacgaaggatgcttgggtcattgagcacatgaccaagctcaggattgcgatctacaagctcacgcatttgagggttattcataatcatactcctcataaattctgggttgttcataagattctggatggctggagtattcatcatctctctaatcatgttagggttctgagctagttgttgctgtgcctgctcaagatcaggaagaccagatccaaataatccagccatagcatttccaccacccaaaggattaaatccaaggccagggaacaaagattcacctcctccgaggtttgagctatcatttgaaccaaccgcttgaggagcagtggtttggtttccagcatttgcagcgggagcagaaggagaagaagccacaaaacctcgaaccatatgaacggtgtgatcagcctgcaaacctatatataaaatggtccacagagaaaggaaacattgaggctcatgatgcaaaacaataaaacgtggaaactatccaacacaatcatatcaacaacagccattgatggagaaaatatacatcccaagaagatacatgatcatgagaacattaggaactctaagaatggtatgaatcaattatcgtatcactaactacatctccttattcttcccatagaaggattaagcatacatcaaaactcataaaatcatccatgcttctgtaaaaacctaacataaatccaatgttccaaccccctagaaaccctatgagattttcagtcaaattaaagcaacggaacaatagaaatgaaacacgaaatgatcagaaaattaccatagctgaggagagtctgatcgtctttgaggatacgtcccttgtaaatcaaacgctgctgatttgccggcacatcgctgttctgcgcaattaactctttgaaagactccaccgtggaatcaaggctcgtcgtcacactaaatttcgtgccattggagcatctgacgttcacggcaacagctacgccttcagcagtcagcggctgcctcgaatctgcttcaccacccattctaatttcagatcctagttcaacaaatcgcgaaattgatcggagaatcaaaagctctaaacctagaagaaaaaatcgtagaagaagatttgaggagactcgaagctctaataagtcggttctgaagatttcttgaggaaagggatataaattatttttggtcgaataacaaatgagactgcagaaaattaaagagttatttggccccgaacggccaattaaatgagaatccagaaatgacttgcgcttcagagaacgtatcgacgactcttactgggtaagattgggccgggtcgggtctaaattgaggcatttggtatatagttcaggaaggaattggctgtaacttgaatctaattgaagatgatgaatcaactaattggatattcctttgcaacatgccacttctctctttgggcaatttggtttaacctttgaaccggatcagaaggaaccaaaaatttaatgggttcaatttcactttgatgtctataaacacttacagatgttgtatgttgtaacaacttgaaataagttatcaaagataaacacccaagatatataggtttaagggtagttaaagacgaagagtgaccactgataacaaataccgtattgatgcggcttttctatcaacaaagttcacgatcctatcatatataaatttttatgaattcgatgaatatatcattactgaaaaacacacattcaagctgtttattctataactgagaagccagatggagagacatcagttcatgaacctgtatgctactgtccgatactccccaagagtcgttctacagcagcgttaacgttaccattggttgcaagcaacgccctaatgttctctgctctgtcatagaatcccatttcctgcaactgttgcaattgagtagcgtaccgctcttcaggaggaactggaatcaaacagacaagtttcagtggaaccatcacaacagatgcgtaagctaaaaaaattttgtagtctctaaccattggattggttcgtgccactcaggccgccagcaccaagactgccaaacatattcatcaataaatccagccccccgttatttcctgtacccatcagtattgtcattctactattaacttgtatacgatacaatatctgctaaaataaaacatacatgaaagcaaagagaactaaagagtagctgctatactacgtaacataactaaaccctttatactactgtagaataaatacatataatatctttaagagtacctgtggcagcaccagtttgccccgcatccctacagagaagatagatttgggaacatgaatgcggattgatgaaaatcaaaatatggagattaacacacatagcttatgctaaaaggcataatcaagaacaaacaaaatgttatgagccctattcaagtgtattccatcgattaaaatgctttatttatagcctctttgatagatgtaactagtgatcagcccagtaaatcatacaagagttgctgcattagtcatggttcaatccttttcttattatagagatcgttcacaaccaatctttttagctagttacaacattgtctaaacactaaacaacccaaaaaacaatatgtaaaggacatgtaaatgctcaactttgtttaagcaaatccaaacaacgaagggttttaacaaaacttactggctggctgtatttctattctgagatagtgattgctgtagagtcatcatttgctgaagaccaaaaaacaatagaaaacattaggtttaagaaacttctttactttgtcccaaaaaaaaaaaagaaaagaaacttctttacttgaaaatagcttagatacaaagaaatgtttcttttgagagactaccatgttaaaaattcatatgcatacagacaataggggacaaactaacctgcatcatctccggagaactaaactgacgaaggaaatctgggttctgcatcatttccctcaactgaggattcgaatctaacatgcttcggagttgtgggttaagactcataagctggaatcaagggaaaacaattaatatatgttcacaatggtaaaaggctcttaagttcagatcattctaggcctacctgattcatgtattgtggattggaaaatacgctttgcatcatctgcgatatggctgggttttgcaataactggctcaattgagaagcatctggagtcgcaccaagaggtgaatccgctccaagcataccgagtccaccaaggcctccaaggcttccaagaccaccaaggccaccaagtccagggctcctcgcatccccaccaacatttgtccttccaggggcagttgtctgacctgtcaagtagcccacaaaatgttcaattatatttagtgtattatgagtaaatgttaaattagaaacaataagccaagaaaatcatatgcaaaaactacacataacaacaaattgtggtaactacactaactcaccaatttactatacacaatattgttcctgaagcagagcagtgaacagtaacgtccatttcttataaacaagccactttttcatttataaaatattactgcatccttcaaaagacaaataaaatcgacaggagattagaagatgaaaatgcagttacttaccacctgtagcaccccaaggattaggaagtggatttgcattcggaatagtccccgttccagcatttggtgtcgaagaattattagaagcatcacttccttgcgtagtgaccccctggtttcccaacagagcagcaaatggattggagcctgtattgtttccagcattcccggacatagtggtagcattcattaacggttcctggacattttcatacatacgcctaagcatgttaaatccctcaggcatagactcaatattactcatagccctatcagtattccgcatcatttcacgcataagctctgggtttcttgccgcttctagagtttgacgaaggatgcttgggtcattgagcacatgaccaagctcaggattgcgatctacaagctcacgcatttgagggttattcataatcatactcctcataaactctgggttgttcataaggttctggatggctggagtattcatcatatctctaatcatgttagggttttgagctagttgttgctgtgtctgcacaagatccggaagaccagctccaaataacccagacatagcatttccaccacccagaggattaaatccaagcccagggaacaaagattccccaggactcgctcctcctagattcgagctattatctgaaccaacccctcgagtaacactaggtgcagtggtttggcttgcggccggagcaggaggtggtgctgaagaaggtgcagagcctctaaccatatgaatggtgtgatcagcctgcaaacctaggtacatgttccacagagaatagaatccacaagagtttcaatcaataaggatctacgagaacaacaaaagtacccacacgaataaatcagaacgatgaagattaccatagctgaggagagtttgatcgtccttgaggatacgacccttgtaaatcaagcgctgctgattagctggaacatcgctgctctgagccaccaactctttgaaagactccaccgttgaatcgagactcgtcttcacactaaatttcgtgccattagagcacctgatgttcacagccacagcttctccttcaccactctgcggctgacttgaatctccctctccacccatttctaatttcggatcctaatacttcaaataatcgcagagctcgcgaaatcgatcaggagccctaaccctagaaaaattcgatagagatttagcagactcaaaagctctgagtcggttcggtagattgcttgacgaaatggatcgaagagaacaaaacaagaagacttctgcttcagagaacggatcgaagggaccgggtcgggtcaaaaacaaaacccggttcgttccttttctcacccggatccgagaatacatacggcatcgtataataatatcatttatctgcttcgttgaggcccaaagggctttagtttatcggtcctgcagtatcgtctaacttcatgcatctatgaagactctgaacgacatcgtttaattcagaatcactctggcttaacttgtctccagccaaaaacctctttgccaagtttccttcacgaaccatgctataacccgcaacgacccgaacctttctctccttcaccaacctcctcatcattgctacatcttcccatgatttttctgcagcaaatgtgcttgacgcaagcaagtaacctgaagaacacaagggctcgagttcaagaacctcagctactacctctgaggtaatgatcaattttttaaaacggtttctgcaaccgctaagaatcgctccccaagcactagcccctgctttaacatcttctggaagattcttgat

SEQ ID NO: 36299 - DNA, 1764 bp, Arabidopsis thaliana landsberg
  unsure (1)..(1764): unsure at all n locations
ggcccagtcaaatattatgatgcctttaaccgcaggatgcgaatacgcttccctcaaaatttcttcaatgtatacctcctatcaagcaattgaaatagttaacaaattttaatgattatgataatgaaggctttcttgttaggcaaggtaagatgctgacaaacctgattagggcacttaggcatatcaacctctgtaagccagataggcaaacctagtgagcctaaagtatccaatgcagatctcatgtaagctaagttaggctgagttggacgaaagtgaccttgagctccaatagctcctttaatgttcatgttacctgggtaagcaagaatctcctccatcttctccttcaccttaaccggcgtcgcggtaacctctacacggttctctatcgtgttgtactcgttaacgaacattgtcacatcaggatcaagcttaaaagccaaattgtagaaacttgacgaagcgttggcaccaagcattttctcaaagtaatcccaatgcacgttctcattaaccacgtgccacccggttaacttacctttgtatctcgtcataaccgagtttatccggttcaatgtcacattcatcaaatcgtttggatcttctatttttggcacccaagttggctgcattcagggtcatccccaacacagtatgacctctaaccaatattccatttctgttccgcaaattttaacattgaatcagctgccgagtagatctcgtgaccacgttctttctccgttgtataccatttcatttcattggtgaaggatgtgattttaaaccgcgacgcaaaccaatttctgtacccttcgctttgtaggatnnnnnnnnnnnnnnnnnnnntaataagaaagatggtttggtttgttctatagatatcactgcgccttttaccgcagttttgttctgataagttacttcaaatctcaccttgctcttccttatctgcaataaacataaatcatgtaatacccaaaacaactggccagaccggccttaaaaaagctagtaggtgggctggtcagaatcaggtcgggctagttcggccatggctctccgagcatggtacatattggtacttttttgtatattgtgtgatgtgattcgttgggtaaaatcaagaccgagtttaacttaaaaacattataggcctcaaatgggccgaaatcaacaatgaatcgggcttaattgagccggcccataacaaaaccctaaaaggctaaaactatacagatgacagaagatcaatgctaccttttcaattagttggtcttgtttcagtttccattcttgtttactgaactgtttcagggacacatcgcttgcagaaatctttgcttctttgtcatcactctgcttccacataaaaccgtggttgacgcagtgttatatatacatataggaataaacatatatagctagttgttgtacctcgaagaaaatatctacagagcctgaaacatctggcacaatgccacctttaagcaaagtccaacatcttttctttgccctaacttcacctccatgaacaaatcttccattttctgtcctaaacacaactcctactttcttattggttccttctctcaacttcacccaagctgtacttccattaacaaagaaactatggatggtcaatgaaacgattatgtattacactgaaatcagactgaacacaactatcaagattcaagaatctttggtttgaaacagtaacttactagaacaagaaaccatgaaaacgaagatgaa

SEQ ID NO: 36300 - DNA, 802 bp, Arabidopsis thaliana landsberg
ttctgcattaaaggtgattaacaatggaaatctttgtaaggcgtcgaccatgtatatacatgtagacatatttttaccagttgtttttttggtcttgaagctgatcaacgctagtcttgttcgtcggtagatatcttaacattgttttcaacaatacatgagacagctcaattctcaaatcgtctaaaccagtcaacgatcgtcctggaaagaactcgagtttcgctaagaggaatggtctttagcgcctgagccacagcgtctgctggcgagtacacagacccaatttgccactttgggtcctggagacacataatgaagttcaattaacatgatgtagacatgagagagcaaagttgttaactgcacaactactagctctagtgttgcttggtatttattacctgtatgcaaggtgtgagatggtttccgttcagccgaaccttttcaagagtgccaccaatagaatctatccgaggcttaagggtttcttcgagcaaatcagtctcgtctattgcatcggagttgaattgtacctgtgacaaatgttgcagcagacaaagatcaaatatatgtattatttgctggttctaatcagacagatactgttcacttctatgcttcttatatcaaccaatatggattagtaatgagtaaataaacagtctctatgtccaagaaaatcatctcagacatgtataacagttagcttagcagttggttcactctttgaaccgtcaagttcatataactataaatgaacttgtggtgtgtgcattaccagtagagtgtgtggaacgct

SEQ ID NO: 36301 - DNA, 6199 bp, Arabidopsis thaliana landsberg
ggtagtatatatccatataattagcaagacttgtgaaagtatatattcagtgtcgagcaagtgtcactaattcataatgcaaaaggaaggaattggaatctgaatcggattcagatccaggcaaggtaaacgcattctcagaccattcaatgactccccaaaccaactcgcgctcaagcaaaattagtgcacaccaaatctccgttttacattccttagtatacgtcttccaccaaactgtcactctccttcctccgccagggcttgccaccgaaagaagataattacaagacaattcttcaagtcccccaaccgtccaatgccacgccatagcgccacgacagcgaactagtttgagtttcccatcggaaaccgatgcttggaagtcttggttatcgatctttagcatgcaaacatttggacacaagtcaagcttgtccatgggtgtattgtaatcaagcgtgtccatcgttgtagtgtcataaacttttccactaattaggaggccacaatcaggaaaagctatgccatcctttattagagcacatggaatcacaccctctttgttcaaggcaccttccggaaatggctcccaagtttgagtcattgggtcgtaaatctctccccagtttacgctgttatggtactcgctgctgcatcctccgtacacattgatcttaccgtcaatcacattagcggctgcttcttttcgagctatacgcattttagggagtcgacgccattgatgagatttacaatcgagaacataagctctcctgcttctcttttcctttgcgacgaatccgcccagcaagtagatctctgaaccagttgagacaacagttgagcaattgggatgtggatctgggtaaggaagagaagggagtggtatcagtttatgtttaggagtttgagagagtatgaaccagctagggttagggttgttgttgttattcaggtttaagcagacatagaggcaggtctcgttttttaggatgcggaatcgttcggcttcgagatcaggcaaagcgaggagtgatctgaaactcttggatacgagagagagaattggatcgtgggttctcgagacacgagacaaacagttgaaaacaacgtcgtacggtaacgacagaaacgacttgggagacgactctgatgatgatgacctcatgtcttcttcggtcgtcatcgtgttcgtgtcttcggatggaacgtttaatctagggtttatatgggtgtaatatatacgagagcttttaccctaattgtaattaaagagttatatacaaaattgtaactatttagcgaaattctagtttgaaaatcttatttatcaatttattaaatattttgatatcttctagttgaacttgaatccactgtagaagataagataaatattcaattggcaattgcttaatggagttagtagcatttgattaatctttgattatttttcaatattcaataagtcaatatattatagattgattatccacgattcaagaggggactgaaacaccatataacaaactacaaatgaacgtagaattaaaaaagttcaacacgattcaacagtgattgaataatgaagatcagttccgtataacacaagatgtagaagaagtactcttgcttaccatagcagccattcctttagtagtggaatataacgaacatgaataagaccatataacatctcagcagctgattcccccaaattataaatgttctcaacgttttacatatttgcatcatcattaccaaaaagttagaattgacaaaaaaaaatgtgttttttaacattttttactcggatggtaaaaaaaggcagagagtgaaaaactcctctctctctcgttagggcttctctctcacgcgcctttcgtatctctctcgtctctaatcgctaaactccttcaggcgagaaagcgaggatcttttcgattacccatttgatttttattgcgaagtcgtaatcttcttcgacaacaatcttctgggtatctccagaatgagctatcttcttaggaggaacaagttcgtagctttactcaaaagacagagtctcatctttccgattacttccactgaagctaaaaccctgataaacccagatcctaatatccctcaatttcaaaacccttgttcgattttcaggattgctcactatgcaacccaatcttcaaagtttccagagtacgagatgcctacagtcacatggggagttatacaagggaagaaagagaagctcgtgaatcgcgtcaaaatctgcgactatctcaagggtttggggataatcaccgatgaattggagagtattgagctaccttccaccattgaagtcatgtgtgagcgtgttgagttcttacagaagctagggttaacgattgacgatataaatgagtatcctttgatgttaggttgtagtgtgcgtaagaatttgattcctgtcttggcttacttagagaaaattggaatctcgagatcgaaattaggagaatttgttaagaactatcctcaggttctacacgcaagtgtggttgttgagcttgctcctgtggttaagtttcttagaggactcgatgtggagaagcaagatttgggttatgtattgatgaagtatcctgagctgctagggtttaagcttgaaggcacgatgagcacatcggttgcgtatttggtgagcattggtgtgagtcctagggacattggtccaatggtaactcagtatccttatcttttgggaatgagagttggaaccatgatcaagcctttagtagattatctaatttccattggtttgccaaagaaaattgtggctaggatgctagagaaacgttcatatatagttggatacaatctcgaggagactgttaaaccaaacgtagattgcttgattagttttggcgtcaagaaagaactactacctttgcttatagctcaatatcctcaaattctcgggttaccagtgaaagccaagatgtctacacaacagtactttttcagcttgaagctcaagattgatcctgaaggatttgctcgtgtggtagagaaaatgccacagattgtaagtcttaagcagaatgtgataatgaaacccattgagtttctcttgggcagggcatttcaagttgaggacattgcgaaaatggttgtgagatgtcctcagatcctctgttcccgagtggaactcatgaagaatagttactacttttacaagaccgagatggggagaccgatgaaagaactcgtggagtaccctgagtactttacttatagcttggagtcaagaatcaaaccgaggtaccaaaaactacagagcaaaggaatcaggagttcattgaactggttcctcaattgcagtgaccaaagattcgaggaacgattacaaggtaacttcattgatccagatactgaaggtccaacgtttgacatgggtgggaagttagaaatgcctggtggcgagatagtgactgatgaggaagaagatgagagtgatgatgaagttctctacagacgcactcttactttgtagaataatcaaaagtcttttagcttaattgagcttttgcatttagctacaatttttttgcaagcattgtgttctgttgctctctctccaattgattttgttgccacatttgctaaatcttaaatctttagatgttaaaggactaactctgactaatctacagctactcagatccaaaatcaaaatttgatttggtttttatagaattttaaattatgtgtctttggtggtatcttgtggagaaagaactactcctgagctggctactatgtcaaaagtggaataggtcaacaagaattttggagagttattaacattatttctagtttggtccatacaagttttcattttctcgtttatgaccttacaaatatacattttaacaacaaaccccaactacaaactttacgtatacatcaaaagatcacaaaataacgatatctacatgattcgttgtacataaaatcaaacacaacacgaaataaaaatgcaaatttcctaaaaaaattttttttttttttttctgtatttgagaattttcttgaaatgataaaattattgacctgagatgcaagaaaacaatctatggctcttgaatcttacaagttgaccctcccgcggcggagtaagactcttctccggagctacaccaccgtttcttttggtttcccggcttgataacgatgagaaatctccaacggaccagccacggcgatggtgacgaccgtcgacgttcatttcaatatcggaagcgaagtcgtaagactcacgagttgttgcggaataggagagacgttcgtaacgacgacgagttaggttcttcttcacggccttaagggccattggtattaaaccatccattgttgagactctctttttgttttcttatttcgctctttgtggttctttgagatgaagcaaaaggtttttgttaatggttattgactttgggtttggtgattagttaccttccaatattcttcttttatatttgtctttctttatacaagaaacctcaaccttttttagtattgtttcttctcccatttgatttatgtcacaaattataataactaggctctttttatagttacctatttggaattgcacatttacacaataaattatataaacaacatgattatctttagtttgtagagttatatggttacggtgtatcttgttttgacatttcatgatcattatttttttggtcatgttcaaaacatttatatgtaatttaagtatttaacagcaagtggttgatcgtgagattaatatatttttatacttgatatgatcttttgttgttgtcaacgagaaacagattaaagaacaaacttaaacgtaaatcattagcgctcaatgcatatgcatatatttacattaaaaaggatttgtgattgagacctcaaaaaagtccaacaggtcacttccttttaaaaaatgatttagctgttgcacacgttatcccccattgatctttgacttggtgtatgtgtatatcaacaatccaaaatatatttcagtgaagattttgtgagactttaagtttgtttgtttgttttgttttgtttaggtttatctccaataacttttttttaatatatttttctaaatagaagactggttaagataacctctaatgcttgtaaagaaagtgagatatcaataaataagtcgagatactttgccaaataccaaagaatattaatatcataatggcaaaatcgtatacattaggattaccaaaattcgatgtcacaaaatattctgaattctgagttctgacaatgtatgataaaattgtaactaatgtgaaaatgtggattgtttgtatataatagtagcaagatttttattagtacttaacatgtgataaaaatttcatttctataagaatagttttgaagatcaactaaacatcgcgcataaactcatcaaatgtatgatgagaagttgtcacgtacatagcgaagtaaagtattgatacttccctaaccagtattgttagaatttgtctcaacgttcaagttaccaccacattaaagatgctttttcgtttaagaaaataaaactaaagacggtcaagtcatcggaatataaataaacaagacttaaagaagtagattagtagtaaaaaaatttaaagaagtttagacaagagtgacgacaaagctgatgatgtttcttacgctaacaaacactaaccatattgaattattcaaaagcgacatttttattttatgacaagaattaaagaaagtgacaaagtggaaagataagacctaaagaaaaaaacacacttaaatttctgatatactgtaaaacttgagatttattttggtataaactgatattttaatatcaatttttgtgaaaaaagaaacctaagtattttgatattcacttataaatatgctaatatagctaaagaagaaaaactaattacccaagaaaagtatgaaacaacctaagtgtgtttcatttacaccacaaacgatgaataacatcatcactgagattaagttgcattaaacacttcaaattcactgttctcttgttcaagtccttcaagtgcacttcacctcttagtttagctctggtctcgaggattattagccttctctctatatcattcttcaaccaacaggtgatttctga

SEQ ID NO: 36302 - DNA, 5902 bp, Arabidopsis thaliana landsberg
  unsure (1)..(5902): unsure at all n locations
ctactaccaaccgactctattttatcatttgtggatcaggctctatacatcccctcttttgcttcattttacgtattccttttttttttatagtataaactaataaagtatttctcaattataagactcttcaaacaaaacaaaacaaaagtgctctagttaaaaaaagtttaccgagtttaattatgttacaacttacaagcttgagattagttctctttaatttctccgaccgaaagaatgtttaagacaaggctttggaaaagaacactagtttttccaaatccaaattctacagtctcccgagaaaagcaaaggacaatgttctgctcctagcaacaaactgacaattcctgttgccgagcaagccataaaatcagctatccaaaaacaaattccatactacaagtagtcctaataactcctaatcaatcaaacaaatctaccatttcaaaacaatcagaatcagaaaaattgagaagaggaataaataacctgaatctctagagctttcgctggtttcctccttgacagtgatcggagaatttttcgaacccaacccgagaaaatctctctccatctataataaagacacagcccgctacaaaattaattcgatctcaaatgtctgtttcgattaaaacgcgtgttaaacgccggaatcaagctaaatagagcttcgccgggaaaagggaaagaaaaacagagacttttgagggagaaaatgaaaaaacgtggaatgaagttaattcaccgcaatttctagttttattaacaaatcgcatgcgacatgtgaatcgtaccattaatttataactataacaagaaaaaaagattcttttttctcatatcctattggcgcaaaaaccagctacaggttgtcccggttacgtcaccggatatagtcggtcaaaaaggcacgtgcatcgtcgtgcagtgtgtggcgtttcttttggtggtgagacgcgtggcgaggcacgtgcgctattttaacgtgaatgattcacgagatgcgaagcggcagttttaatttatttttttattcaatgacaacactttcttttgtcggctgacgcgctaagtgtagcgcgtgagtctaaccccctttttgtctcaccgctcaatctaaaatagtaaaattagttacactactttcgtgcacgttctcttgaccaagataaacatttgcacgttgcatttttttggcaaaatatattaatttgtattttagtactatatttttaatctttgattaatcggatggtactataaagtaattgtaaagattagactttcataaaatgatttaaatacaaacaaaataattgttgcggaaatttagttccacaactaaacattattaagctaaatctaaatcctcatgtgattatgtcatcactctaatattattcttgtaaatccaattttaaatatatttttctgtcattgtacttttattaatatttttcgcgaattattaaagaatgttgcttgttgcttaaactatacttgtattaattaaggtaattattggtaccaaaaagaaaatattactttaatgtgcatattactaaaatcactcgttgacatcgtttttgtgtatttataagatgcatgtggtccgggggaggaaattacgccatttcgtgcgtcactttcttcttaatttagtaagaactaatactatactaaattaactaatgttttaaaacatatctaattatctcgcaaatataataataaagttttcatttttttatgaaaatgaatatttaaaattcaaatctatagaaaaaatggaaaggagtcaatgatcacaacaacttgacgatctctaaacaaaaaaaaaattgacgatcatctcccacgataacatcgttatttcgagtctgggggatatgcagcacacgtcattttctccagcctagaatttagatattaatatcacattattaagaaaatactacactgcagtttattatatacacaacattccatatagataatagatcagatcagatcaaaagtggacctacaaagcgaagattatatcaaaagatgccataaacgtatctctcacgctatgatccacataaaacatccgaaatttaattctgtttttacatccgacatttaattcttgttttctgtttttacatcatttaattctggttaccacgacattttttttgttttaatggtattagactctatatagacatacaaaactcaaaacaaaagattcaatgatcaccccctaccaaaaaaagaacagattaaatgatcacgagttggcttaacaacgaaaacttttctccaaccaaaaccaaacttaactattctaaatcaaactcaacagcaacgtctgtttacaacaacaacttaaataattttgtattaaaatcgaatgagagtaaataatggcaaagagaaaatcaaatgacatatgtatatgcatgatatatagcgcagcatctaactatatttagactgacttgagtacttgcaatatttggctctcttttttttgagtttggtgctttagtggatcctttgatggctcatcctgcttctcgtcgacgtcgagccagatccagagaagagcctccctacttaatgatctggtcatttctcacctgtcaatacttacattttagtttttattttgatgtagacttatttgctagtaattatggacatccagaagcaattagtctttcgtgggctcttgacatcgtatgccgacttgtttgcctaatttcgacccttgtttacggcggcttcaccgtttacgcctccgcaataatttacgatggaggtgtacgtataaagctgagaagattcaggggccaaaatgtatctccacgtcttggaatttcatggaagttagagagggctgtggtggagaagaacaaggggagtttagggaaagacgaagaagaagtttccccaatctgtctagaagatgtcaccataggttttggttatgttaggctaagagattacatgcacaaattccaccgtgattgcattgctaaatagcttttgaagagtgcacgttatcctatatgtcgtgcttttgcaaaattataaacaattacctttgccttcgattatctatatagagctgctaattattgttttagactttttcgtggaattgagctacgacataatttgtttttttccgagttctgacaatccaatatcgcagcgatggaagtcttttgatagtaatgacaaaaacaccatgttgatcaaaaatcacatgcaagaatacaatagtacactcatgatgcataccattatagtaatttattttgtcataaaaaaatttggattcaatttattggataattgaaaagcagaaagaaaacaaactgaatttgataaagttttcacaaaataatcataaaacgctcaaaagtaatgttattaattgagatatagacgtaacgtgaacacatcatttaatatttagctagcaaaattactgaaaaataaagaaaaaatagttacaaaactgttgatctgaaaataaagagaagtagatcgaactcatcttgaaccatctttatctcttgtgacttgtatgatcgttttgcctgactcttctcccttgacatgtccattactaatataaaagtccgactaatatgggcccaaaatgtaataaggaatggcccaaatctaatagtcataataagtttgtatcgcaatgagccaatgaggatttgttgttttgccatggaccgcataaagttggatgcatgcactgtgttagtggaaacttttcggattcacatagctagatcacatcttgtagttgtagatcatcagcacttaaacattattttcatttatttattttgcgagaaaacaaaagatcgttttctttgttatctaaaattacgaaaataacatttttgttaagtaatggaatagagatattgattaataatgtgttgttatttgtggatttatatgaaaaaattgagttgttttgttaagaaatgattgaataaaattaattttagtttaagtcaaaaaagtcaaaatttagtcttaacaaagaattgactgttttccatttcaagtaaattaaatgacaaaggcactgaatctaggctttcccactaacagttacgctttcgtcttcctcgtcgcttcctcaaaatccttaacctcgaaaactctgaagatcttccagagagtctcagcgagtgagagagaaagctatttgttctctcgtgaagtccgagtgtggaaattgacaactggatttatggttggatttggtgtgtaagtgtgtaagcgattaggttttgaatcagcggaatcgaaaaaatggtattcaagaacaaactcttcttctcttcgaagaaatctggatcttctagtcccgatagctctaatagtcccagatctgttggctccaactctccgatacgatcagataagaagaagtctaaatccgcttccaaggatgaacctccgatccctattcctggatttgttggagttggttgcaagcagacgcagattaaagatggtttgaagaagaaggatggttcatctaagggtaaacaactttcatctgaagttcaagctcactctattggaaaatcgaacttgtctcctagttccgaggtgaagaaaccacctccgccggaagtgaaggaaggacctgcttttgtttctccaatcatggcttcgtctcttggtttgaaccggattaagacgagatccggaccgttgccacaggaaagggttttcaattataggaatgatccggctacgagcaatttgtcgaagatgggtgctgatggtggtgacttgggctcgggttcagctacttctggctctggtagtggcaatagaaagaaagaagctgggagtagcaagctagggttagaagagaacatgggtcgcactcgaccaagtgacaataagagtgatcgtgatagtttgtctcctgatacaggaccaccgaggagcctcagccctactttgccgccatcaggatctcgattgcagaatgtagcatcctcatcgggaactggtatgtccttagatactaataacatcttaaaatggttgatgggggtaagcaatgactttgtctcaaccctttccgttacttagatactaaatgggaattatgagagaaatacgtattggcagcttgctgtgctggtacttgtgataaacttgttccgtgttctgcttgttatgagtatgttagctnnnnnnnnnnnnnnnnnnnnnnnnnnnnnnnnnntctgcatctgttttaatagtggaacttaatcactgcctaaacgcatcttatactgtaatgtatccagatcatttgtgccccctgttagattttccgttcttatttctcaagtttgcttctgttggtacttcgcaggtcgctctgagatgtcatccggtcgttctggccctctaagaaattcagacttttgcaccccagaggtacccaattattctccatcacatactttttaaaaagtagtttgtgatatttgtattagttttagcttttaaatggtcttggtgacttgacgtttatctttctagaattcatatgaatgggagaatcccaaagagtcagaatcgcctcgttatcaagccttacttcgtatgaccagtgctccacgaaagaggtttcctggtgacatcaaaagcttttctcatgagttgaactcaaaaggtgtacgtccctttccattatggaagcctcgtaggtcgagcaatgtggaggtattctaaagtctcctatctctattatccccttgtgatcttttttgtatgcagaatctaatcgtctgtaatttccagagagtattgaatctgattcgggcaaaatttagaaagcaaaggaagaagtaatctc

SEQ ID NO: 36303 - DNA, 3172 bp, Arabidopsis thaliana landsberg
agccttcatggttttggtatgtgatgacgagaattgaatatttaaaactatagtcagagaggcagcagagcaacaatttagtatgaacctaaagctgctaataagctacatattcaagctttttacttacaccacaagataagtagaactgtaatcaacttgatataccacacatcttgttattcagataaacagtctcaacccaggaccaatcatttttctatcaacccagcaccaatttctatgtaagatttgaaataatagagagaagtgaaaaacaagatgagaaagaaatgcgtatgcaccatgtcctgtccccaaaaggatttctggcgctaagtagtcaggagtgcccaccgcagaccgcttatggtccaatgttggcaattttggtttctcctcaacaagcagcgacgttgcactggaaactggaccagagagatcatcagtgttgttgatgagaccaacttttgaaagcccaaaatccgtcaactgctcagacgaaacaaaaaggtaccataaggtctacagggaagcatggttctgataatttatacatgtatgatatttatagactcataaatgcagaggctaattgcccgtgtgggtttataattacgagattcagaaaggactatataatctccaaagttccaaattgcatgagatcaacaaaacattctgaaggcctgatactatttaataaggcctgatattaccttaacatgaccatcatgtgcaatcaacaaattgtcaggcttcaaatcacgatgcacaacaccctcagagtgtaaatattccaaagcaaggacctgacacgaataatatcgacactgaatcacaacatttagataaaatctcttgttattatggcatgatctgtgagagtattacacacttacaacttctgcaatgtatacacgggcattagcttcatccaagcaacctatttttctcaacattgaataaaaatcccctccattgaggtattccatcacaagatacaggttttcgctacaagtaaaagaatagaagaatcgaacctggtcaaaagaaagttacgttagtgtaagaaatctctgcagaggacttaatatgcttaaagctcgaacagctcaccacaaagggattgcgggcgttgatcaaaatatctcgttcggcaagtatactttccacagcattcttgcggatcatatctgccttcctcagaacctacggattatgacagcccccaaacaagatttaggaaacagattttgccaaccaagtcagcttaactgtcacagacagaatcttttacaagagttacaaaaagtaaaacgaactaaaatttagaacaccttaattgcaaataggtctcctgtagtgttcttacgagccaaaataacatgcccaaaagctcccctactaattgacttcatgacctcaaaatcatctatggatatgcggtcccgcagatgtactggactggtcctcaagctgcgaacaacatcatcttccaaaggagcatcttcatcaattatggtacctttttcatcatccataagctcgcacagctgaagatacttttccctaatatatagaaaaaggattcttacaataaattctcagcctgagctatacttgcctcaactgacaagagaatagttctggagacaagaatacatctcccagaacactttcattataagcaaagacagcacggggtaccaggaactcactgtatcaacttttctatgcgtgttccaaaagtttctactataagtgcatcaaactttctgcggtcaatgacaactctcaagtcttcaagacaggaaagtaaaagctgaatagattgatcatcaacaggaatggcatttgctgcgcatcttgcaatgtcagcaagttcactcatctgcatcatcagttatccagggttctattcatcagagcagatattaaataaaagacaagaaaacttatgaacatggagcacaaccatcacaaacctgtggaatatcatcttgatcgtggaatgtacccttgcctcctaatatctgttcaattggatcaggcctaggggtcggaatcggggatctaggagtcatgctactggcagatgaagttgtcataccttgatcagacttgggaccaaaacgggttctacatgacattagcggtaaacctctcagatcatccataaaaattgaattatcagcctccggaaaacagtcaagcatgtcttctgatccttttcgcgaccaatcactcaaccttggagagagaacatcagattcttcagtcagatgtgaattggatactttcataccatctgggctctctgcggctgctaggctatccttatgcctgaaggtctctgctatcttgtcaagtgtaccagcaactgccatcagtcgctcatcaacactcagtcctttctggtcatatttatcagccaatgtacaaaccctagagtgatcttccacatgagttgtcggaacttcctcctcacagatacggcacattattgaactttcctccgaaataaggggttgttccccccagtaaccccaagaaatattgtgccgatgcttggaggagtgttcatgagaatcttttgctggaggaaagttgagaatagcaacagcggcatcatccctaccttgtcgactcccaactatatttggaggttcaactttgctatcattctgctcttctgatgctggcgcttctttcacagttttcagtgctggagatggaagttttttccaggaagacattctatcaatgtttgcaggagattcagattcctttatagcataattttcaggaggagcaagagggggaactgagcgtacaacagcgtcttccttccagtccaaaccatgctgctcctgactataagctttcttggtagatggtacctttgcagcactgtaactccttcccgctccactcggcggtattttctctatagaatgcaagactcttgactgacgtagttgtacaacttgttcctcctccccccagctttccttatgaaactgaagtaatctagtacatctggtaaggataaaaagcatccgagtatgaagctgcttgaggacgcccgggggaagctcttgacgtctatcatctaagtcctgaacaatgccttcacactgaagccagaaatctccaggagtagtcatga

SEQ ID NO: 36304 - DNA, 9199 bp, Arabidopsis thaliana landsberg
aacaagctcatgttgatcttcactaacgcaattatgagcattcgccatgtaaaatacttatggcatgagtttttccccaatggtaatcttgctacttatactcctcgcttggaactatagttttcggaatttcttttagaattttgggtaagctaaatgtttccacctgccatgcagctgagcacaactatggagctgtggtgtcactctggttaccagtaattctggtatatttttcttaaccacgcatctaaatgaattagatagaaagtccatggatgtctcatattccttaaatttgcttcaggtttactttatggacactcaaatttggtatgctattttctccactatatgtggtggtgtcattggggcctttgatcgtttgggagaggtagtttttctggaacctttttgctcacttcttttacccttgttttgttactacatcaaaataaaggtttccacattttctgaggatatcaagagcgtttgagatgattcttttacatttgcttatatcgcatcctgtgtttctactcattcgattaacattcgtgcattatatcttctcgttatttttaattagtatacatttttctaactccttaacgtgattgtagttagtgtaatccaaatggttcatgaagtagtatattccgtcgaaatagtttatatctagttttcaaatgtatatctcctagtgaaaattcattatatatcacagacgcaactgtgtaacttgatgcatcttcctgcatgaaaatatattaacaaagactcatttctgttctccttccagatacgaacgcttggaatgctaaggtcaaggttccaatcattacctggtgcatttaatacgtacctggttccttctgataaaacaaggagaagagggttttccttgtcaaaaagatttgcagaggttacacaagattgatgctcgttttatcaacaaagtgattgtggaaagaatgttgtcatacatctactaaattatatctgtatgcaggtcactgcagcaagaagaactgaagcggcaaaattctcccaactctggaatgaaatcatttccagcttccgagaggaagatctaatcagtgacaggtaacaacttaggtattatactacctttctttatgaataccttattttccgtgccttaaaaccaactattttttcagggagatggatctgttgcttgttccttatacttcagaccctagtttgaaactaattcagtggccaccatttttgcttgcaagcaaggttggtggtctccctttgtcatcaaaaataccgttttcttcttattgctaaacttctcatcttgttacagataccgatagcattggatatggcagctcagtttcgaacaagagattctgacctctggaagcgcatatgcgcagacgaatatatgaaatgtgctgtcattgaatgctacgaatctttcaaacatgtcttgcacaccttggtaattggggagaatgagaaaaggtatttcctcattcatcagaaaagttcttgattatgatttatgaagcactttataaatcattaagaatctataaggaaaccagcactccaacttttctcttctgttgaagctactggctgtcttattagttttgataatagatgttctctaccatgtctctacttgattttctgacgtattgtagtaacatttctcctcctaaggtggcatttttaagtgcgtcaacattcctctgttttgataataaaatagttttcttaacctttcacatatatatgtgctccaacctgcaatttcagtccctctattgagttttcattcatttaattgatactaagaaaagatataatgtcacaggattattggtattatcatcaaagaggtggagagcaacatatcaaagaattccttcctttcgaatttcagaatggcgcctttacctgctctttgtagtaaatttgtcgagcttgttggaattttggtaagtgaacaacatccttgtttaatcattggtattgatttaaggctggttattttttatgccagagacagggcaatcccctaatttaggtctgtttattattaatgttgtgctggaagggataatacttgtgaaatgttatctagggaactaaatagttatgtatacttatgatgctgcagaaaaatgcggacccagcgaaaagagacacagtggtgctattgttgcaagatatgttagaagtagtgactcgagatatgatgcaaaatgaaaaccggttagtgagctatagagaactcgaaagttctttttatgtagatgtatatagtaaccacacaaacaagatttgacatgggtggcacctttcttcagtgaattggtagaacttgggcatactaacaaggaatccggaaggcaactctttgctggtactgacgcaaagcctgctatactgtttcctccagtggcaacagctcaatggcatgaacaggtaaaatctcaaaacaaattataaggctaattcttagagatactctgtatataatgatctaattcattgttgtagataagtcgccttcatttacttttgacggtaaaagaatctgcaatggatgttccaacaaaccttgaagcacaaagaaggattgccttcttcacaaattcactgtttatggatatgccacgagctcctcgtgtcagaaatatgctgtccttcaggtatgtgctctggttatcactatttttgaacagaatttatgctcctttgaaggataccatgtgctatcaatattctccaatttaaatttttctacaattgagggatccaacttttccagtttttttcacattttgttttaatttgggctggaatgaatatacaatagaaaatccatgtagctgatactctggaactgttatgaatgcctactgcagatagcagctcttccttatttaacctttgagttttgttttcgcatttacagtgttctgactccgtactatagtgaggaaaccgtctactctaagaacgacctggaaatggagaatgaagatggtgtatcagttgtatactatttgcagaagatctttccaggcatgtataattgacgagctcttgttgttgaacttagttactcctaaatgctttcggtaatttatacggccccccaatttcagatgagtggactaacttcttggagcggcttgattgtaaagatgaaacttctgttttggagagtgaagaaaatatattgcagcttcgccattgggtttctttgaggggacagactttgtttagaacaggtaacttataccatccacgcctatttatattttgttatatggtctttttttgcttacacctatttgtatcctgcagttagaggaatgatgtattacaggcgggcattaaagcttcaggcttttcttgacatggctaatgaaacaggtgaggcttgattagttgacttgtgttgaactaaaatcagctgcacagattgaaacgttcaagcgttttcagctcgctgtattatgtcattcttgcattctactaccaaaatacagacgcaatgttgatcatttgtgtgaagtattcatagttccatatcgaacatatttttaacattctggaatacatacttataacatttcttgtgtttacagaaatattagcagggtacaaagccatttcagagccaactgaggaggacaagaaaagtcagagatccttgtacactcagttagaggcagtggcagatctcaaatttacttatgttgctacctgtcagaattatggaaatcagaagcgaagtggagaccggagagctactgacatcttgaacctgatggttaagtaagtccctcccccatatttgttgattccagcatttgttggttccctggtgagtctcactttcatattcaatgctgcagcaatccctctctccgtgtagcatacattgatgaggttgaggaacgagaaggcggaaaagtgcagaaagttttctactcggtgcttatcaaggctgttgataatcttgatcaggtattttaacttttttgaaatcttaacagattggctagatactatggtccaattcgagaacccccagatttcaaacgttgtatctcttacttttgaaaggaaatatatcggataaaactacctggaccagcaaaaattggagaaggaaaacccgaaaatcagaatcatgctctcatttttactagaggagaagctctccaggctattgacatgaatcaggtaaaatactttcccccaaccgaaagcttccacaacataaacatagtggacttttatttgttggaagagttttacttaccaataatatttaatttataggaccattacttggaagaagcacttaaaatgagaaatctgctggaagagttcaatgaagaccatggagtacgtgcacccactattcttggtttcagagagcatatttttactggcaggtatttgggaaatatggttattattttcttgtcgtgtaaagaacttcctgcattttgctagctgattgatatgtgtttcacttcggcatcttattcgcagtgtttcttctttagcctggtttatgtcaaatcaggaaacaagttttgtgaccattggtcagcgagtcctggcaagtcctttgaagtatgtcatgttcttctttctttcaatctacacacattgatgctcattttaactaaaagtttagtagctgttaaaaatgtaattccttctcgatatcatttaactcacacaggcaccttggatttgtgatttcagggtaaggtttcactatggacaccctgatgtcttcgatagaatcttccacatcactcggggtggcatcagcaaagcttcacggggcataaatcttagcgaggatatctttgctggttagattgtgaaccttacttcttcaaggaaaatttgatgttggttccttcatcatttacttatgattgattcatgtttgtatataggtttcaactcaactctgaggcgtggtaatgtcacccatcatgagtacatccaagtagggaaaggaagagatgttggtttgaaccagatatcactctttgaagccaaggttgcttgtggaaacggagagcaaacattgagtagggatctctaccgacttgggcatcgttttgactttttccgcatgatgtcttgttatttcacaactgtaggcttctacatcagctcgatggtaacttctgatcttccaatgtcaaactaagtttatcgttaacacataatttgcttaaaacaaaacataacggactaattatgtgtactacagattgttgtcctcacagtttatgcattcttgtatggaagactttacttgtcattgagtggagtggaagaggcgatagtaaagtttgcagcagcgaaaggagatagttctcttaaggcagcgatggcgtcacagtccgtagtgcaattgggtctgctgatgacactaccaatggtgatggagattgggctagagagaggattcagaacggcgttgtctgatctaatcataatgcagcttcagttagcgcctgtcttcttcaccttctcacttggaacaaaggttcattactatggtcggaccatcctacatgggggatcaaagtacagagcaacagggcgtgggtttgtggtgaagcacgagaagtttgcagagaactacagaatgtattcgagaagccactttgtgaaaggaatggagctgatggtgctgctgatatgttacaggatttatgggaaagcagcagaggactcggtgggttatgcgcttgtcatgggctcaacatggttcctggtgggttcctggttgttcgccccattctttttcaatccctcgggattcgagtggcagaagatagttgatgactgggatgattggaacaagtggataagcagcagaggaggtatcggagtaccagcaaacaaaagctgggaatcatggtgggaagaggaacaagagcatcttcttcactctgggtttttcggaaagttctgggagatatttctctcactgcggtacttcatttaccagtatggtattgtgtaccaattgaacttgaccaaggagagccgaatgggaaaacagcacagcatcattgtgtatggactgtcttggctggtgatcgtggcagtgatgatagtcctcaagatagtgtcgatggggagaaagaagttcagtgctgatttccagcttatgttcaggcttttgaagctgtttctgttcataggatcagtggtgatcgtggggatgctattccacttcttgaagctgaccgtgggagacataatgcagtctctgttggcgtttttacccacgggatgggctctccttcagatatcacaagtggcgaggccattgatgaagacagtaggaatgtggggatcggtcaaggccttggctagagggtatgagtacatcatgggagttgttatcttcatgccagttactgtactcgcgtggttccctttcgtctctgagttccagacaaggcttctcttcaatcaagcctttagccgtggtctccagatccaacgtattctcgccggtggtaagaagcagaaataagtctcagactaactttctctgatttttcttttccctcatcgtcactctttagcactcttacaacttttccccacaattctttgcttctttttgtttgtatccctctgtttttaagtgaaaacatatatgtatatcgtaagaaacatacggatagatttaagtgaaaagtttctataataaatagttgaggttatgtagcaagaggaattttcttgcatttgttttggtattctcagtttcctcattcctcgtcaattactgtcaaaacagtattatggaagcaaacgatatgaaatgttttaatggtatttttgtggcactgtagctaccataatcataaacaattactcacaaatatagtaatgcccgatagaaagaaagtaccattttgtgttttgtacttgttgctttttcaaaccttacgactaatttagctccaaaaaacatccgaaacgaacatatcatgcgggtggagacaaaaggagagagagttatattacagtctaaatttccataaaagctaaaacctaacatacataatagcctcttgaacacttggaataatttgtttacctacaagtagatgattctacacctctaaggaatgacctacgccaccatatctgaaacgccttgctgagattagggcactcagtcccatgttttgagaaccacctgaaccattccatgaacacttgatactgctgttttactggtagcgttaacagcgtttgccccatcccttcttctacttccctcatgtctagtcctttcttgcatctctgtagccacccaaaatctactaacattggcttgaaccacgcttctactagccccgcccttgcttctcctccgcattgcactctccttttccccattgcaataaatatcgctcctgttactctgcttacttcatacctcaccattggtgacactctctcatgcatctccactagccttttttgcttcccccatatctccacaaattcctctgctatttcccgatctatcatgatctccagcagccagtttatgttctcaacctccctcgaaatactttcaatcaatggcttttctttcttgctactagtactactactaccctcttcaaacagcttagctaatgaatccacacaacacttgcctgctctatatatgtcttccttgttgatctcaggctgttctttctcgtacactgagcttttgcaaagaagacccttcaccaaagatttgagctcgtttctaggatttacatcactgcaggaagttattgaccaaaccagtttcttcgataagctgtcttgcgagttttctgtctcgtttgaattaaatcttgccaaaatttcactaactgcagcatcatcaaagctataaattccaagaagtctcctcagtttttcctcttcatcctcagtccaaggaacagcttcaagatatttcagacacgacaagacggctcttgaaaatttgattccagccgccacctgtttatggttaagaagatgtgttagctccaccaatctgttagatttgtttaaggtaaacaatgagaaacaatctaacacgtagagcagaaaaaatatcaaagttccacacaacaatgttcatacttaacgacaacaaatactacatgaataaaaaccagatatgtcaacaaacacatgcaaaaagtatcttcgtagaaaaaaattagctgtagcagcattcacaaacatttcttgaggcctccacaagatcaataatagttcactgaaatggcagggtggagttagaatcataaaccacagactagtcactagccaaaagctagagaataagcgcctatttcacaatacctcatagacgaaaaaatcaaattagttatgtcaacagtgtaatctaatacatcctatcaaattgtaggtctttccatatctatgctttaaagaacaatctaagcctcaagggtttagcctaataggtaaaaaggcaaagtcttaagtcactaagatcgactatagtaactaaaacatatatggtaataacaacaaacacatcaaggaaatcaatatccatctcaattcagtaccaaggaagaaactttccaaacctcaagtacatcaatggctctgtagacacccattttcataaacttcttgataataacattactttcctcaaacatgagctcaacagtttccctaaaaacaccaagattctccacatcacatacttcaatcctgcatgtgttcttcaatcctatagacgatgaagaagaagaacacttcttctcctccgcaatcaaacccgagaacacatcagaattcgcagccaaaacctccgagctaagctccaacaccaaaaccccactaccatttcttcccttcaaactcaacctagcatcgtaaccctcactcaaacccgaacccgtaacctcaatcttcggagctgtaaaactctcagaacgcagattcggtgtcgaatctacaacaaccgcatcatcttcttcttcctgagtggtctcggtctcggtctcttgcattgtagtgacggtcggatccgaatctatgggtgaaacccgacccggtgataagatccgacgcgggtcgatccgattacgatgtttaaagcagatta

SEQ ID NO: 36305 - DNA, 2470 bp, Arabidopsis thaliana landsberg
ttccaataacaccacttgatgaactgtaaattataccgttgtttctgtttcggggtaaaggcaagtaattccagtccttaactcgacttgtatagccggaagtgggaccaagttctcaacgtaaggagatataacagaaatgtcttcagggaggctttggagtttgtctttctctgaaatatacttgaacaacaagccttcatcgtcatagaagagaacatccccttgcttttgcttaaagagagtcacgggtgtgaaggacctagactcctcgataccaagagaagctaaactaatggagtgagtcttgctccatgtttctttttgtccatccatactccatatctctagctcgaattggtgaagtggatgggagacaggcatggctatggcaagacgatccccagtgttgacaatctgtgcttcatacatgatgcccttgggaagaggtggacgtcggacatcatggaactcttccgtgtggaggtccaatatcgtgtagagatgatcatgcctaatttgtaaccagtagattgatccgttgacacacgccgattttctaccgacatcatcaaccttgtaacgacgtggtttccaaagtctccgccattcaccagtgttgacatcaaggatatcgcaataggtaggatcacggaagatcctcactactttatagctacccttaacattgtctctaccgaatcccatcgcacaatatcccgggaaatacgtcgtccatgattctaaatatatatttcagatcatatacagtatgcatgatcctacaaaaaaaaggacgacttacatatgcgttattaattataaaaaaatctatagtccaattatttaattatattgataattaagggagcatatgcgttattataaattacaacctaacctactttaccgacccaaagcctaaaacaaagctgacattcttttgttttccctctctctagaagttcctgttttcatcttcttctctctctagcaattcaatctcgacttcgcttttctggcttttctgggaattttgatttatttgcccccatcgttcgcttgaattacgaatcagatatcgccgatcgtcgtagatctgcgttgatattgtccggctgagtaaacagggtgaacaaaaaccaaaaacagagagggggtttaaaaatcctgaagaaaatcgcatgaatttgtttggaagcctgattttttcatcttcgatttcgagccacttcacgacttgtcttctcatctttattcttcatttctctccccagcttaatagtaataataataataataatagtaatcgtaattccaataatctcgagagtaatcgtttgatcaattgaaaaaaaaatcatggagtccaggaaaaactctgatcgtcaaatgcgtagaggtactgttttcttcaacctccatcgaaaagtctgttacttttttgtgaaatcgcttacggattgttatcgttgatgtataggaaggatctagggttcttactctagattataatctgggtaatttggtttatcaaacaaaatttgattttttttttaatgggtcctcaattttatccctcgtgctgaattctctgtcggtgatttgattccttcgtggcgtttactagtttggatgtatctgctgattgccacaagttttgtttttgtggggttgtttaattctgataatcactattgtttctttgttagaagaattgatactttattggactttggacggtcgttaattcgtgtgctttgctttcatatagctaattgcttttcagctggcgagaggatgaagacaaggtcgccctccgtgattgtgatcggaggtggtttcggtgggatttcagctgctcgcactcttcaggatgcttcctttcaggtttgtgatgtttcatgttttatacaatatatcctgatagctgattttgatatctctttctcacggtgtggttcttggtgtttaggttatggtactggagtcccgtgacagaattggtggacgagttcacactgattactcatttggttttcctgttgatcttggtgcatcatggtaatctcacggctctttcatcctgtcattagatgatgttttggttttggtttttggttaactttaggctaacacagcaacatcgttatgtcacaggctgcatggagtatgcaaggagaatcctctcgcaccagttattggaagacttggactgcccttgtatcgtactagcggtgacaattccgtcctgtatgatcatgatctcgagaggtttgcttgaatatttcgattttgttacctccatctttttattcttgtttgacaccttaaaactcacagtgcaattcttttgtttctgtagctatgctctgtttgatatggatggcaaccaagttcctcaagaattggtaactcagattggcgtaacgtttgagcgtattttggaagaggtatgtccttcacattc

SEQ ID NO: 36306 - DNA, 1530 bp, Arabidopsis thaliana landsberg
gttctattttataataaaattggcaatccgaatgcaaattttaagatacgtttttctaatgttttcttcaattctttttttttttctcccataggaagagtatatatcacataattttttgtaagcaaatcacttgtatgcataacacgagtttatctttaaaacgcaataaaatccttgatctttgttttagtaaattcagaaaaatgcttcttaactactggctcaacatagggattatgtactatagagcaagcgtttgaatggtatattttgtgaaaacgtggatactactaatctaagaacataacatggtttcacattttagaaaacgtgcaaaaatcataaagtatactgattttcccccaaacgaaatccacatttataagtgataaggacttgtaaacattaatatatcaatgtttatccttttatatcaatacttaatgttaactaatttaattgtaaaacctccaatagtttaactaaaatcaatcataaatatgtaacaatcagtagtattctcatttttttttttgtgttaccaaaacttatcttattcaactatttttatatggtttaaccactttttatggtcaatgtttagtcatttatttaaatttaattagtagtaacaaaactctgtttttttgttcattagtggcaaccgaattcatctaattagggttttgaatcaacaatctaatcttcgatcttgagctctatttccgggtttatacatttccttcaattcaaaaccttttctttcattgacaaatgatttgaaccaaaaaagttgtttcctttgccaaaatctgaagcgccatgactgaagttcttcactttccttcatctccaagcgcttctcattcatcttcttcttcttcttcttctccttcaccttcttctttatcttacgcctctcgctctaatgcgactctcttgattagctctgaccacaaccggagaaacccagttgctagattcgatcaagatgttgactttcatgcctcaatcgaagaacaagatttgagaagacggagcagtaccgatggaggagaagaagacgatggtggggaagatcagatttcgttgttggctcttcttgttgccattttcaggagatctttgatttcttgcaagagtaaccggagggagctttgtagcatggagattggatggcctaccaatgtcagacacgtggcgcacgttacctttgatcgtttcaatggcttcttgggtttgcctgttgaattcgagcctgaagttcctagaagagctccaagcgccaggtacattgtccaaagatcctacctttttattgaattgctcttaaaagtctcctcacaacaatgatcttgtcctgcaattttggggtgggtgagcagatggatatagaatgcttctgattaaggcttccttgtttcgagttgtagaacctctaagttttggttgtatacagattaaggcttatgtggaattagtgaaaccaaaacgagaagaacttatttgatttttgattcctttatc

SEQ ID NO: 36307 - DNA, 4031 bp, Arabidopsis thaliana landsberg
cgtctccaacttattggttgacaaaaaatatacagtcaaggtttgaatctaaattagaaattgttgtgtccaatgtcttgattttgatattttagcatacatcattcctcttgtgagacaagcttatatataaattatgatttttaattctaaattggtttggagacattacaaaaaggcgttaatctgctgaaacttaaaaaatacagcagcctcaagctgtcgtcttaaaaacaatcagaacattattattctaactcctcaatttgtcttgaaatttcaggtttgtgattttggtctctcgcgattgaaggccagcacgtttctttcctcgaagtcagcagctggaaccgtaagttcagtttgtttgaaactaaaacacgctgaacaacgtaactttcttctaggtcctatttccaatggaagctaaataattactggctttgatatatcagcccgagtggatggcaccagaagtcctgcgagatgagccgtctaatgaaaagtcagatgtgtacagcttcggggtcatcttgtgggagcttgctacattgcaacaaccatggggtaacttaaatccggctcaggtactttccactctaaacatctcaaataataatgatattattttgcatttggaagtccctcactctacatttcatagcatgctatatatgatcatacaaaaaaatgttccataggttgtagctgcggttggtttcaagtgtaaacggctggagatcccgcgtaatctgaatcctcaggttgcagccataatcgagggttgttggaccaagtacgttaagattttctatctcttttttgaattcttcttgaatagacttcatgtttatgtatgtgtttcattaccagtgagccatggaagcgtccatcatttgcaactataatggacttgctaagaccattgataaaatcagcagtttctccgcccaaccgctcggatttgtaaaatacccccggtccattcaaaagttgttataatcatgatatgcacatatactctcagcattcttttgctgcccaggagggagacactagttaagatatagctttaaaggtacattcctcatgagctatcaatcatatcctacagaatcccatggtttttatacatgtattatttttgcgatctttgtctgctgttttgttccctttttaatgttgcagattgttaaaatgtacatgactattgtcacagggaggaaaaaaaaatgtagtaatggaaacaatgtgagggatataatctatctatctagtcccaaagggtaagcaatattttgttgttatgtctttgtagcaatgcactgaaagctatgtttaattacattgctgtacatttataccgctaaattagttactaagcgaaggtaaaaaagagcagctggtaaatgctgtcaagggttttgcaaactcaatatgattcattggatttacatttgttcactgtgcgattagtctggactataaaccaacagaaatgaaataagactgtaactttcggagactctaatacagatgaatataatcccaaatcgttaaaaacgcattgggactgaaaatatctagatacatagtcaactatttttgccttcgcgtctaagcaagttcccacacttgaaaacgactttacctgtcttccgaattaatcgtttgatggatcggtaaccaataggattgcgtaaatcaaaattatacaatattaaattctgaaaaaggaaacacgaaaagcgaatcagtgatttgtgagggcccagttccaaattagaaagctgacctggcaaacgcgctaaatcactccctctcctttcaaaaatctcaagatgacgtgggacccaccatcgtcaccactttctctccttcaccaaatcacagagagagagagctaagtgaagctgcaagaaaacaactttcaatttcaatgtcggttgtacaattatttgtcactaaagtttccaaatttcttctaaactgatgaatcaatggaacatgatgacgaaaaagataaatccacggtggcgggaactgacccacccatttccaccgcctctctattccccagatttttttcaattatctgactacagtttgtcggttacttccttccctaaacctttataaaccattaaacctctcatccttcttctcttaaaccccctaattatcacacacaccccaatttctcaatctctctctcactaaaacccgtaaattttctactatatcaaatgagcccaaaaaaagatgctgtttctaaaccaactccaatttcagtacccgtttcgagacgatccgatatacccgggtctctctacgtcgacactgacatgggtttctctgggtcaccacttcccatgccactagacatcttacaagggaatccaattccaccttttttatccaagacttttgatttggttgatgacccgactcttgacccggtcatctcttggggactgaccggagctagcttcgtagtttgggatcctctagagtttgccagaatcatacttccaaggaatttcaaacacaacaatttctccagcttcgtcagacagcttaacacttatgtaatcatctctcttgctctgtttctgttttctagatagactcattcttcttcttcttcttctttctttcagttttgttttgtttttatgtttctgtaatctttttgatgaccgaaaccattttgtatagattcttgaaactcgtcttttgataacttgtaaaaaattacctgtaattttcttttctttttgggatttgtttaatctctctatcatgtaacactgagttttgtatctatgaaattttggcctcgattggatcttataataacttctcatctgaaataagcttgtaatcttgtatacttatggtttcgtttgaatggagaattttggtttatgaagttttgttattttctcacaatgttaacttcagtctggtttaagacatcattactcacatgttcttcacacttcagaggtagaatctttctaatatcttgagatatttggtcttgtcttgatgtaaatgtgtttacttactttatcttgagcttgtttgagttgtttttttggggttggaatgtttccagggatttcgaaagattgatactgacaagtgggaattcgctaacgaggctttccttagaggcaagaagcatcttctgaagaacattcatcgtcgtcgatcaccacaatccaaccaaacttgctgcagtagcactagccaaagccaagggtcacctactgaggttggaggagagattgagaagctgaggaaagagcggcgtgcattgatggaggaaatggttgagcttcagcagcaaagcagaggcacagctcgacatgtggacactgtaaaccagaggctgaaagctgcagagcaacgtcagaagcaattgctctctttcttggctaagttgtttcagaaccggggtttcttggaacgcctgaagaacttcaaaggaaaagaaaaaggaggagctcttggattggaaaaggcgagaaagaagttcatcaagcaccaccagcagcctcaagattctccaacaggaggggaggtggtgaagtatgaagctgatgattgggagagattgctaatgtatgacgaagagactgagaacaccaagggtttaggagggatgacttcaagcgatccaaaaggcaagaacttgatgtatccatcagaagaagagatgagcaaaccagattacttgatgtccttcccatctcctgaaggacttattaaacaagaagagacgacatggagcatgggtttcgatactacaataccgagtttcagcaacaccgatgcatggggaaacacaatggactataatgatgtctcagagtttggttttgctgcagaaacaacaagtgatggtttgcctgatgtctgctgggaacaatttgctgcaggaatcacagagactggattcaactggccaactggtgatgatgatgataatacgccaatgaatgatccttaggatcttttcatat

SEQ ID NO: 36308 - DNA, 2153 bp, Arabidopsis thaliana landsberg
ggttaaaccctaatttctttctctcccgaatctttctctgtttttgttttgcgcgattagtttccgccgcttagtaatagggtttccgatcacttacgttttgtgttgttttgttcggtctctggttcttccactgtgatctgttttgttcttaagttgattgtcttaagttatatcctctgttcaataatattctggtcttgttgggggtttccacaggttttctcgtctctgacgcatggcttctaagaggatcttgaaggagctcaaggatctgcagaaggatcctccttcaaactgcagcgctggttagtctttacctctcctctcgtgaatcgtgtctgatctatttttgagctttgttgttagatcttataatcttatctttaagcaaacaaaaaaatgaaatcttttttagtcttcgtaatcttataacaaagttatctagagatcttgaggtggtaattgcagctacgttatgatcttagtttagaagataccaattgaaagttgagatttttcttagaacagaacaaacttatggctgtactgatccttgattgaaaattacagatttctaatgatcatagtctagaagatagctattaaaaattgggatccatttacccatcctggatactattgatcataattaataagataacagttggaagttgagatttttcttagaacaaagttgagattggtcgttgcagttatcttatgatcatagtctaggaaatagctattgaaagttgtgaattttcttagaattaagcttttggtgttgtatgctgccttgtttatccaagtatccataacggatcttacagacttgatacctcgcactgatagtctttcttagttatctattgcattcaggtttatacgtgtttgctttgtttattaaaatgtgagaagtgtataatgagtccatattgttggtctcaatagagtcagaggattgttgtagaagtttctcaaactgctcatgcattcttctgctagagaagtctcagggcacatgagtatttatgttttgttgtgtgtagttcagtaaatgccatagatcatcatgtttaaaagactaatctttctattttttccttgtatgaacaattgtgaaattttcaaggcccagttgctgaagacatgtttcattggcaagctacaataatgggtccatccgatagtccttattcaggcggagtctttctcgtaaccatccacttccctccggattatcctttcaaaccaccaaaggtaacatatcattttcaccaaattgaaataatgaatttggttctattggaattcaaaataccctttttcttgcaggttgcattcaggacaaaagtgttccaccctaatgtcaacagcaatggaagcatttgccttgacattttgaaagaacaatggagtcctgcactcaccatatcgaaggtgaaaaagcactctttaaccaatagcagtggatgatatataatgaatctcctgtgattttaatcaaatctcttgtgaatttataggttttgctttcgatatgttcattgttaacggacccaaacccagatgatccattggttccagagattgctcacatgtacaaaaccgatagagcaaagtatgagtctcctgcgagaagctggactcagaaatatgcaatgggatgaaagtttgtgtcctttgatccctcaaagactcggttttaatagagagagagagagagaaagagagaggacttcttcacatagggatcttccatgaaataagttagattcctatgttttatcatctctttgtttgaaacctctttaatctcaaacaaaaacattccttctcctctttattatccctatgtttcctatctttgtttctatgcttttacaaaaaatttataagaaaaaatatttatgtaaagctggaaactttgagcttttacctaacaaagtctgtatgaagatgatgaaagatgattaaatgggaacaacaacaaaaaaaaaaaaaaaaaaaaaatttggtgtttgagaaaatattgaaataaaagcactttcgcagaaaaatataataaaaattgcttgattttgaagatgttgattcgaaatttgcccttgtatgaaaataataggaatcagatcctaacaatttgctgt

SEQ ID NO: 36309 - DNA, 4138 bp, Arabidopsis thaliana landsberg
aaactatgatgtgataatctccaacttactgtttggatggaacatccgtgaaacaaaccgcactgttggtggtttatttggataatcttccgaaaactgcagtgacaatttgaaagtacctaacaagaccatacaaaagagacataagaccagatacataaaagattgccaaaattctcaagttaagtgattacaataacaaaactttacctccatcccaaggggtatcatcaggcctgcaaatccacaatcagaagctttaataagtacagtgcagagaaacctatcaagtatcgttttttttttgttactttagttcaattacccgaatataacagcattccacaacatgatattgttgtcttgtggagcaccactaattcctgcaggtgggtcttgctgcaacctcttgaaatccctcatcaatctcttcctcgctggagtcgacatccttctcttactctatcaaattccagtaaccaaccattacagtatttcaaaaaccaactatctcagagcttggatatgcaattatctcaaaccatttgaatctgccaagcaagtttataacctaacctaatgatcatcacctaaatagcttataagcacaactaggaagctttgagatcaattctatacaaaactacacaattctctttaacctaggaagctttgagatcaattcacacgaaaatgtccaaaggatgatgataacatctgaaaagaaactaaaatcaatggatctagcaacgaatcatcgtagaacagaaattagagaacaagagagagatctcactgttgtgcgaaaaggtaaaagatcggtggagattcgtcgtcaagcaagcatctctcagccggagaattcaaacaacgacgatgagagaaaaagtctccgatcaaaaagctcgaggatcctcgaattcaccgagcgatgagagaaaagagaaatgatgtagaagttcgtataacgcacgcagtggtgtgatcttctagaagcttcgatctaatcaacacatatctatttatctctctctctgtgtacagtcagagagacttcagatatttttttgttcaggccatgcgagtggcacttaaccgaaattaaaccggttttaaccagatttgtaaaccaaataaaagagtgattttgattttgattttgttcattgtttgttgtcgacgacaatggaggagctttgatgtgttcgttctctcgtttacattttgtatctttctagatgataaacctaacgagacagagacaccgagtctcgaatctcgtgaccggtggaacttcgctggatgtgattttgtctcactctcctaacaagttcacattcccgcctcttcttaaatcatgcgcgaagcttggagatgttgtacaaggtcggattctgcatgcccaagtcgtcaaaactgggtttttcgttgatgtgttcacggcaacggctttggtgagtatgtatatgaaggtgaagcacgtgacggatgctcttaaggtgctcgatgaaatgcctgagaggggtattgcgagtgttaatgcagcggcttctgggcttttggagaatgggttttgtagagatgcgtttaggatgtttggtgttgctagggtttctgggtctgggatgaattcggttaccgttgctagtgttttgggtggttgcggggatattgaaggagggatgcaattgcattgtttggcgatgaaatcaggttttgagatggaagtttacgttggaacctctcttgtttcaatgtattcgagatgtggagagtgggttttggctgcgagaatgttcgaaaaggttcctcataagagtgttgttacctacaatgcttttatctctggattgatggagaatggagttatgaatttggttcctagtgttttcaatctcatgaagaagttttcaagtgaagaaccaaatgatgttacttttgctaatgcaataactgcttgcgctagtcttttgaatctccagtatggtaggcaacttcatggtccttgcatgaaaaaagaagttcagtttgagacaatggttggacgtgctctcattaatatgtattcgaaatgtcggtgttggaaatcagcttacagtgttttcaccgagctgaaagataccaggaacttgatatcttggaactctgttatctctggaatgatgattaatggacagcatgagacagcagttgagttgtttgaacagttggattccgagggacttaagcctgattcagcgacgtggaattcactgatcagtggcttttcacaattagggaaagtaattgaagctttcaagttctttgagagaatgctatcagtagttatggttcctagtttgaaatgtctcactagccttttatctgcttgttcagatatttggactttgaagaacggcaaagagatccatgggcatgtcattaaagctgcagcggaaagggatatatttgttttaacgtctctcattgacatgtacatgaaatgtgggctctcctcgtgggcacgccggatctttgatcgatttgaaccgaaacccaaggatcccgtgttctggaacgttatgatatctggatatggtaaacatggagagtgtgagtctgcaattgaaatattcgaactattacgagaggagaaagtagaaccgagtttagcaacctttactgctgttctatctgcgtgtagtcactgtggcaatgtcgagaagggttctcaaatatttaggttgatgcaggaagaatatggatataaacctagtacagagcacataggttgtatgattgatcttttgggtcggtctgggagattaagagaggccaaggaggtaatagatcaaatgtcagaaccatcgtcttcggtttactcttccttgctcggttcatgtaggcaacacctagatccagttcttggagaggaagcggcaatgaagctagcagagttagagccagagaatccagctccatttgtgatcttgtccagtatatatgctgcattagaaagatgggaagatgtggaaagtatcaggcaggtaatagatcagaagcaactggtgaaacttccaggtcttagtttgtctggttaagtatatgccgactcgtcgaatatgagcaaaggcagggatctctttgggggagtattgacttgctcttgactcgggtctcgtaaagcaggtgattcaccaatttaggtttacatccacagtgtggaagacactgaaggacctaaactaacaaaggtaaacggctcagtgtgcggggtattacactcggtttaatgtctgaatgcgataatccgcacgatgatctctttatctttgtttgtttaggtcccttagtttcttctataccgtgaatgcaatcctgtattggatgagctggtttatgacctctgaatcgagagcatgtctatgctccctaaagagatcagagtattagatcctttgtgatcaaatattatatgtaaacactagacaagaggatgagtatctgattcttgtattagcaaaattgtaattgattgcttttgaatgaatacagattgtctaacacaaaatataagttatttcctacacaacaacacattccatttggtctaaactacttcagtctctgctgctgcttttctttccgttctctatctcgaacagctcttggtgactcattgatttgcaacaacaaaaagatggtatggaccgaaaaaccgagtttgcaagattgcctctaatctccatcatctactccattcgtagtctcctccatacttaggcgaagcattgttaaggcggttagagtcttctggtttgatggagttagcaaatgcactccagcctataaggtgcggcaagacgaactgcaattcaagtatacagttagaacaacggggaaagcttctcacaaagagtgtgtgagagagaacttacgttgaaagcagagataagaacagcaaactctgctttagtgattggtatgtatacactctcatctacattcaagagcttgttttgaacaccttcatgaaaaatcaacagttgaaatcagaagagctagacgaaaattaagaagaagagaggaataaagcttttgcttactcaggttaaagaagcggccagaaccatctgggagcggctcaactttaacactt

SEQ ID NO: 36310 - DNA, 1948 bp, Arabidopsis thaliana landsberg
tgagaatgcatctttcaaactcctcaacaagcttaatgaagagggtatcagcatcaggttcttcagagaaaaagctgtaaatgtcttcttcacaacattcagatttacttatgtattctgctgctaacttgcagagatttggacactctcttctgtccttgaatcccatttgccttgctacgtttcatgtcccaaatcaggaaaaaaagcgttaacttttggtacaaggcattccttgctcatggaggataatgtgtttatatattttaccgacgtaatgagagaatctctcgagtttctcatggcctttgtgtttgtgagatgatttgagacgagggatgattttggtgtcacgtagcctccgcagacggtaatgcactgcggctgctatcattaaacctatcgatgacaccaccaatatctgagagtatgtcgaagttctgttgcctgaatattctgtcaaaaacaacaacacaatcaggaataagatttttttcttcttcttcaaaacctgtaatatcaaaaacttcacctctctgcatgacgatggattgattagtgaatggtgtgtgttttgttgaaactcagattgttcttcgtcgccattgttgttgtttcttgagtcttcattgtgttttcattttccgtaatctgtggcgaagattaaggaatctgatttctttaccaccatccaatttggtactaaaaatagctgaggagatcaattggtcttggaaaactctatttataggcagagatcccctcaaatattcaacaaaactgtatgcaaaaccaagtaccatattttaggtgtccaaaatcaagtaaaagattatcagattcgacccaatgattttttccgtagttcattgagaaattggtcaaataaaaattgatcaagttcatgtcgaaaaagatgtaaaaggaagtagcatgttgcattaacctaaaaccatagtaaattataatttctaccttctgagagcaaaggagggaccaaaaaatatcctaaaaacctaagaagccccacaaatagtgcagctgttacattacataggagcagtgcaagttgttctgaaatggcctgtttgattacaccgaccacaatgaaccacacgcctcacacggtcacgatcctctgcccttactctcctcttcctgggagcacctttcatagcctttggtgtttttattacattttcactgtctctctctgaatcattttctttccactgaactttgtctgatattggctctagagtttctgcataagctcttctgtaattctccactgtgaaacaactctctgtgtatctataaacgtcctcttcgcaagacaagagagctccaacggcgtggctacagggcaaaccataaacctgccaccggccgcataaacaagaacagttttcgatatttacaacgacgtttccttcacaagtcatgacttcaaattctgcttcgtttgctctgtaaactcggtgagcacgagattgttctatagcagcaagcatttgtttctcagcagaaggaacaagcacattagaccaatgcaagctcgtttcacggcgttctttcaacatatttatcaaatggcggtggatacactccatcgtttggattataggaagacctgaggtatcttcaacccaattgctgagtgactcggtaataacatttgcagttaattgtccaaaccttgttccttcaaagtatgatgatgcccatcgagcaggagacttgttttggatccataacgaagcttccggggatatctgctcgatcttgttgatttttgatttgaactcgagaactgtgagacaatgcgcagcctcccaaaaaaggtctacaagaacagagctttggaattctctttggaatcgttctgtgagataagggaggcaaaagccgtgcaaaacaaacccaccctagcctgtgccccatcaac

SEQ ID NO: 36311 - DNA, 1077 bp, Arabidopsis thaliana landsberg
ggcgtgtcggtgttgttattggcttacatgaataatggtgcgtttgtcccgccactctctggtagaccaaattatgcttcacatttcaaaatcccttttttgttgcatcgaagatcgggaaggtcagaattgtttgggtttttgaatcgaattttgagatttttgaaggtgggcatctgtgaaattgtgatgagttcggcgaatttgggagatttgaacaaggtctgggaaataaaggctttgaagaggaaacctagagaagatgaagcgaggaagattctggagaaagtagctaaccaggttcagccgattatgactagacgaaaatggcgtgtcaagcttctctctgaattctggtaatttaaagggtttttgtcaatttgtctatttataaaagttttgaatcgataagtggttgtggaagaatgattgaaagtattgttttttagggttcatgatgtttgttcttgatttcgaaattgcagcccaacaaattttttgcttttgggggtgaatgttaatagaggtgtgcaagtaaaattgaggcttaggagggtaaaccatgatttagatttcttatcgtatcatgaaattctcgacaccatgctccacgagctttgccacaacgctcatggtcctcacaatgcaagtttctataagctttgggatgaacttcggaaggtatctcgatttactctgttaaaaatgtttcttatctaggaaatagtactggctattgaagaaaacttatttgaaattttgggtactttttttatttcattacacatgcttcatttgtttgtgcaaacagtgattaactaattccattacatctaggaatgcgaggagttgatgtcaaagggtattacagggacgggacagggatttgatatgcctggtaagcgtttgggtggactttctcgtcagcctcctctatcatctctcagagcaactgcagctaaagcagcagaaaaaagagtgcgtgcgggaactcttttaccttcaggacctcatcgtcttggtggtgatagtagcatcatgtcagatcttagtccaattcaggctgctgcaatggct

SEQ ID NO: 36312 - DNA, 3218 bp, Arabidopsis thaliana landsberg
cacaaacgcagaacctttcttctcagttattgatgtgtcctatagatcaataatttttttaaccaatcagaggagactataccctacaggcaaaatttatctaatgtcactggcaggatcacgcattctagggttttatacagcatgaatttcaaggattcttaatctcacttagaacttaaaataagaagcaatctaaaatttcccagcaaatttgcccagctcaccaaatctagggttttaacagcactaacatcaaacaatgaaattgaaacgaaacctatggttcaaaaaacagtctcatataaaatgaatcgagatcttcagagtatcagttgattaccttggcggtataagtaatatcctcgagctgacagttccagttatctcacactcaatcatacttcctctgtaaagctcgccgctctttagctccaccgtcacgatatgacctgaggcctcgtgaagaagcttcaccggtattcccaaacttcggctcatctttctctctacaaaaccctaattgaaaaccttctcctttaactctgcaacctagaaagaaaaaaatggcggaaggaaagaagagcgactcagatgcgattgacgagtttacctcttttaaagctttcctgatttatttttgggctttatataggcccatatttatattaggcccaatttgagaaacttgctttttagtccctatatttgacattattttaatccttatttttgtacagacgacggctgatttcacgggttaagacgaaggaaccaccgttaccaaaactcgccggaagagatggcggacgagatggagaccaaaggagagaagaagtacaagtatagcataatcattcctacctacaacgagcgcctcaacatcgctatcatagtctacctgattttcaagcatctccggtaaatgaatatttatttcttttggtcttttcacgttcattctttcatttcagaatcggaattacgttttttgttattcttttactgaatactcgaacctgatcgccaatttcaagttacggatctcggaaattttccgatcatgtttctgtagattgcagatcctaattcgtgatttgttgtttctgtgcatgagctagtaaaggccaatgtagtgatccctcaaactatatagtagtagtttcatggtgttttaaaaactttgatttagtgatcagagaatagtcagaagctacatgtgctaatcttagatctggttatggctgcttatatgaaattaatatagaattgcacttgttaagtagactctttgttaactgttactgagaatttgcttcgctacttgtttgtatgatttagggacgttgattttgagataattgttgtggatgatgggagtcctgatggcacacaggaaattgtcaagcaactgcagcaattgtatggtgaagaccgtatcgtgagtacaatgatgtgttaagaccttaatttgtaaattattgggcgttcttctgtttaggtgaaatcatgtttttatcttttttatgatgcagcttttaagagctagagccaagaagcttggtttgggtatgtaatttgtatcttcattgtcttctagttttggttaacaagaaatgaaattaattttcttggcatggtcaatctcaggaactgcatatattcatggtttgaagcatgctacgggtgatttcgtcgtgatcatggatgctgatctttcacatcatgtaagagccattaatttagttttcttgtttacctgtttaattgtttagctaacccagtcacttttcttctgtgcagccaaaatacttaccaagtttcatcaagtaagaaaaagaagagtctcttgataaattactagtttcacaacctatagtgacttcaactgatttgtttttttttttattatcataaaggaaacaactagagacaaatgcaagtatagtaactggtacacgatatgtaaaaggtggtggtgtacacgggtggaatcttatgcggaaactcactagtagaggagcaaatgtgctagctcaaacacttttatggcctggtgtatctgatttaacaggatcattccggtataattcaaataacatatgcgcatatttttaactgacatcatttgatagtatcatgtctgacctccgcacctctttgtttggaaggctatacaagaaatcggcgcttgaagacgtgattagctcatgtgtgagtaaagggtatgtctttcagatggaaatgattgttcgtgcaaccagaaaaggataccatattgaagaggtctctctttttataccaattcactgtgattttgattctttctaaactatatttccattcatattcttgattctctggtgctcatcttcatctgcaggtaccgatcacttttgttgacagagtctttggaacttcgaaactcggaggatctgaaatagtggaatatctaaaaggcctcgtctatctcctgcttacaacttaagacacaccaagcaactcaacaacacacgagtctctctttatactcttcatttgttccattgcttcatagatttctcttaacagttgaactctgatcatgtcgtttagaaacttcacttactttgacttcagagagtcgcatcttttaagactcaaaagttcatattatagacattgttgattttgaatgttgagttgagatatcttacatttcataaataccttaaccaaccaaccaaagaaggttttatgttttagatcgttcgtaatgtgataatctttgtcactgcgacgggcctttataatttgggcccatttgagacctttcttcacttgctctcactcactctctctcactctctctcaaattcacccacatcaaagcttctccgatttccctccgaaccaatttggtatgtgaaaatcaaattcacagtgatgtctgagtcgttgcttcgtattgatcacgccggcttagacaccctaattccgggaatgatgtgcagtcacagagtttggacacactcagaactagctcctccttcagtgagcgtgaatgaatcccatctggtaatgccacaaacactactcttttcaaattcttttcggcaaagcaacttaaaccctttttctccggaggttaattaggtgaaaggtctcttacaagctttgcaaggattctctagtcccttcattttctgggaccgaaaggaacaaactttccgcgctaa

SEQ ID NO: 36313 - DNA, 5495 bp, Arabidopsis thaliana landsberg
tgcattgaggataatttcactttttgatgttatgattgaatgaccgagaaagaaaggagcaaacttgggaagaatgaatctaaagttaccgtggtgagaataagcgaagattgctctgtaagtatagatgtgatctcctggctttagctcttctctctcaatcttgttcgtaagcaaacccatttttcttcttctctctctctctgcacaaagcttttttttaccttgcttgtggacaatgcaggaaacggcgttacatgtgtaacctctaacggtgggatccgacttcagcgacacaagcgacgataagttacgttgtttgcagtggcgtgctctcatgccatcaacgagctgtagagagctgttgagcacacccgacccagattcttggaacagggttatctctcaaatcctaatgctaccaacatactgatattgcggggcctcttgaccttgattccaggcaggggtaatacggtcacttcacagcttggtggtcgttgaactatgaagtaaaccaaccagaagcaagaagagaacgacttggtcaagcaaaggattttgtttaccacacgacatcgtttttaattgcaaatctgaaagattcttctgcttttattttttccaaaggtcccaaaaaaatatatcaatttacaagaatcaagatgatgacacactgacactgtatgtatctttcaaatacagatgctccagttgtaaactttgacatcaaactctgcatgttcttccaatctctgtcttaactccttggctttctctgcgtccttagccaatataagtgagaatccaccaccacctgcacctaccagcttgaatcctgagctataaggttgcgaaaactcaaaaagcttatccacaaactcattgctgcaatacggatccagctcttgatgcagtctccaagcatctgacattatgtcgcctacctcgtcaacttcgcagttcatcaacgcgtctctaccggatttcgccagctccgtcaatcgcttaatgcttgaaattaggagattatctctttgcaaataccttgtaacgaccttgtgtaggacttgatgagctagcctgacctgtttatataaaaaaggcataaaatgaatgagactctgtagctaacaaaaaatcttttcttcctctcagtggttgctacttacttgacccgtgaaaacaacaaggaggcgttgctccaactctgaaattagctgtggcgaggcgagtaaaggaacaacttgaagacgcatagggattcctggaaaacttgaagtgaatttgattcctggatataatccaccaatctgatcttgccagccacctcctgtacccatgagttgctccagaaccaagacaagtcttgcaatgttttcattgctttcatctccattagatatctggagaagtcctttcacaacagctgcagctagaatgctcgaggttcctagaccactgccacgaggaacattggcccatgtctttattgctaaccctgtggagtcaacaaaattttcttggacaatgccggttaccaatagagcagatttaacaagcctgaatggatcattgacttcaaatggtgtcttaatgcttattggatcttcgatgtgtagctcgtttccagcgtcgtcttggattgagattcccatctgatttgttgtttcaatgattgtgccaattggaagtgaaccttctaaggttatagccatgttcaggacgtaacctgcacgctctaagctccatggaggtgtatcactccaacctcctacaaaatctacccgaactggtagttcaacttttgtccttcttggttgaaaaactcgatccggatgagaaatatgattctcagaatgagacttgccacttgattccaacagatgttctgaagaacaaataaaagagttaaatccaggtttatgaaaggtgttataccaaacggtggtggctagatttttacctctaaaaccatatctcacagctgaagcagtttcttctgcaactgctccccatactttatgctccaactctatagcttttgcttcatccccacatgctcgaagaagatcaacttctacctggtatgctcgactctttggaagaattttggagttctgctcctgaaatttgggacattgatccagaaaattcttgcatatttccaatcctaatgactctttctgtaaaatctcatggcacagctgagacaaattacgcccaagcataccatagttcatacatgctttagcgattccacccgcaagatcagcttgatgattgctggaaccattgcacatctcaggaaagttgattgatccatgcaactcttctaagcttacacgttgtgagcttctccacaacttaatcttctccttgtttctactatcatctaaacccatcaaccacgacgctaacttcagcatttcactatacgtaagaatcgggaacagttttgcattccacaaacatctatcttgtgcaacatacgagctccagaggtcgctttcctcaatgccaagatcaaacaataccttctccaagggtttaccgcaaaaagttccatctttatgaattgagttctttggattgtcatggagaccacaatacacaatcactcttcccttatgtcccactagtgggacctcccaaagacaatgcctatcaggaagcatgaacctgaaactctctggagttccaagatcttcgctcgggatgtgaataccaacaactatggactgagaaccaatttgtacagcaccagaaactgttgaatcatatataagtgaatcttcaccaatggagacaccaggtgcaatttcactagacaaaataacggaagatgctgcaatatcagaaaccgtagttgcagggatggaacataagtgtctccgaccaacaattcctgaagcatccccgcttaaatgatccaatacctcacttgatgttccaaaatgcaaaaactgcaaatcatctgacacaagatgatacaaagagattagaaaagtaagcatagcaatctcgatttctttttttttaagtttagctagtcttgaaatcagtacaaacatacaggtgcagtagctgtacatcttttgcctccccagactgttaacaagaagttcacccaaaggtctggttcgcagccaatcatgccttgaaggaacccaagcagccaccaaatcttcatacaaactcatctgcaaagtcaaaaacccattcaattacaaaacatgtataagaggtcaaagtctgttgaagaagtacaatatcattctttaggaataagctgcataatatgagaaacttacctctttcttactacctataagctctaagatcatgggttggcacgagcatccaagagcgaccaggtccgaccatgctctgcccctagcagatattatcccagtgtcaaggagtgtccgtccatcatgtaaaattgcatctttcttgacaagatcctctactgtaggcttctgcagaagatcattgactaaactaactgtatagctttcagcaagtgactcagattttgatgtgacaataacaccatggttggaggcaatatcgagagtaataggcacagtaactatggaagctgcgtcttcagggagagtcattttaaaagcatcaaaacaaggaaggacgtctccagtcataataaataatccaccttcacaaataaaattcaaaaatcagcatccgttgtatgttttacatagctaaaaaaaggatatcaccttggtcttggaaagcttgtcttgcacatgaagcgatagcaagaatatgatcaaaaaggagaggaacaggaccatcagggtcatcagctgcaagataaggaagtgggaggaatactttgcccataggatttgcccatggaacccttttggagtcacctccagcatgaagcatcaatacatgctttgcagagatgaatctaacccatttgcaagcaccattcgcaacttccatctgttgattattaacatacaacatcaaatcacaccacactgctatataaacagatgtagtttattgcacatcccagattcatcaaattaacaaagttaatcaacaaaaccaactaccgtaatgattcagatatcaactcaagcaagagatacagtgaggtcaaattatgaatagtctaacctgtcaacacaatgtttacctcgggaccaagatcaaaacccaatttctcataatgacgagcgagagcataaatggcgttgagagtagcagcaccagacccgatccgtttgccatctggatcaggaacggccaaagtgacagtggagctagctattcgtcccatacgtttcgctcgccggagctgccagtcgtagagctccgcttgttcaggactagccgctgtgagcacaatcgcatcccaagtcgggacccgagtgggatggcgcaccgagagccttaagtggtaccatgacttgcgcaaaacggtggctaagtcagctttcttcctctgcttagacatcttcttgctacaaagacgaagaaatgtgagaaattaaaatctggagcctaaaggttaggtgaacagaggaagagggagaagaagaagtaagttttgttcagatcaaagtcaaataccaatgcaattaataaatacgtcgtcgtctcaatactgaatcttaaaccagatcaatttgcttcacctcaaagattaaaactttgcacaacattccaaaattatatcgaatacagaaactcttgagcagacagaaagaagcagagtacataaaggatctgctaaatttgcaatggtaaaacaaactctaagaagattgcaaaagaagaaactttcaaaattggcagaggcaaagagacagaggagatgatccatcaatcagttcagtcctcacgccaataaaagataagcgagcttttcatatttgggcctttgggcttttgctattatcaaagttatgggccttggagaatagaaggagttgagtgtcgaggagtttgattgtatcaaaaaacaaactttctctgcaaacgctggagtttgaatttacttaattcaacaatgtctgcttttcgaatcatttaaatgttttatgttattcctactaatgtttctactttcgccatctttgatgtatgtagtaggcgtgtggtttctttttttccttttcatagtttttactcttttaatctccattgatgcagtggttgctgttactactccacttgaaaatttcattacaaagttgcaagggttctaaggatacaaatagatgtcctgacagatctgatgagttcactgcaagaacaatagacgaatgtttaaaactaccgcaagaaatttatcacaaaagacatttaaaaaaaaaaaaaaaagagtttgtatagattctgtatactcaaagtcaataataatgtatactcaaagtcaataataatgtatcataaggattttaaaacaacttgttataaatttgctctatgaaacagtcgagaaaaagata

SEQ ID NO: 36314 - DNA, 1908 bp, Arabidopsis thaliana landsberg
  unsure (1)..(1908): unsure at all n locations
gggtttgttaatgtgacatccttgcgtagtcgtaagtacagcggagtctcattgtagccacagttcaagaacacagacgtttttgtgaagtgaagaatcgaaataactgtagattttccctccagattcagtgttgctcctcttcatctttcgtttaggcacaggcttaacaattcacaaaaaaaaagaaaaaaaaaaaattactattaaacgataaattcgccgtttgcagaaaattcggttcaccaattttaaattggtttatgcggtcattggttctaaatgagtttgaggtgtccgactttgattggttgagatgctaggtttttcattttccctccaaagaagctctttaatggtccaacaaatatatatttaatcgtaaataagataaagaaaaatatattttgaaaagaaaaatgcttttgaagtttgaagcttcttcagagttgagactagttgacccttcagtttctctcactgttcttcgaaagataagactgtcacatctcccggatatgacaatgaccagcgaatcttccggcaagaaatgcggagagggtgaccgcaaagtcgccggtaaaagccagcgaaaggtgggtcttgtttatgacgagaccatgtgcaaacacgacacacctaacggtaaggttgacgtagagtgtcccgatcgtatcagagttatctgggagaagcttcagctcgccggagtcactcaaaggttcatactttcctcttctcgtgcgcctttgttgtnnnnnnnnnnnnnnnnnnncctagaaaaggctgaaattttaggctaaatgggtgttttgatgattatctccgctgagaaaaaaaatctcgttttgtttttccttatttgacttgacgattgactttctcaatctgaattgtgtaattcatagattggaaagattctgctgattttatcctatataggtgtttcctagcttggttagctgtttctttatcctatataggtgtttcctagcttggttaactgtttcgttatcctatataggtgtttcataaattgttaacaatgttggtctttccttttttgcagatgtgtggttcttggtggtagtaaagctgaagataagcatctcaaattggttcacacaaagaaacatgttaatttagtgaagagtattagcacaaaaaagaaagattctcggagaaacaagattgcttcacagttggattcgatttatctgaatggaggttcatctgaagctgcatatcttgcagctggatctgttgtaaaggtaatattagattcatacaaattgtctctctcacacaggaggatagcaaactgttagaatgatttgtttgacgattagtaacaaaacaaattagcaacttggtaggtgacagagaaagttgcagaaggagagttagattgtggctttgctattgtcaggcccccaggacaccatgccgagtcagatgaagccatgggtttttgtttattcaacaatgttgccgttgctgctagttttttactaaacgaaagagtaatgacttcttttgacttttgtgatgcttttagtatctcttacttgctctcaaatttctttggtcacattcctttggtgcgtacgtttgttctcatgttatgcggcattaatcgaatgcagcctgatctagatgtcaagaaaattctgattgtcgattgggatatccatcacggaaatggtacacagaagatgttctggaaagattctcgcgtactaatattctctgttcataggtatgtatttgcaacctctgtctattcttctttccaaactactttttcacatgatctttgttgaggtttaaagtgactggaaatgcatttgtgactaggcatgatcacggaagtttctatccatttggcgatgatggagactttacatg

SEQ ID NO: 36315 - DNA, 2029 bp, Arabidopsis thaliana landsberg
  unsure (1)..(2029): unsure at all n locations
aatgtcctatattataaaagccccatagttagattttatgtttcaaagtctagaaaaaaaaatcaaaatctaatagcaataacaaatggaatctttagagaatacaatgatggcatgggttatgtgtttttcggttcaatagtccaagacaatacacaatgatccaaagaatggactcaaaaaacaagaaaaaagaagaagagaaatagtaaaagtggaagttgtgtgatatgtgatgtgtgataccgcttgtaatggttcgcaaaacaatttgttatagtcatcgaggtatctaattttgtttggctaaacaaagctgttttagattgtgcccgattttcattctttatgtacaacaactaccttagtttgactaagataacaacaaccctaacacatgtttgggctcatctccacttatggctcagtgactaactaataccaaaacgcaattcataagtggccttaactccaatagctttcttgagtgtggcaaataaacacaactcttcgttgacttctcactcttcttccttcaatcacgagcctttgcttcttgttctcattgaagatttctctttgaagaactaatcaaaagttcagattcaacagtttgtctaaaaaaaaatgatttttctatattaaaaagtacacactaagactcaaaacttcaacttggttctccacatttctccaataactttcccaggctgtggattatctggtcctctatccctctgtcccgacgtgaagtacaaataaccgttccagaatccggccatcgctgttttgacacggtatggtaaccgtccaatcacagaccaagtctgcaaaatatttcatattcagtttaagaatcagaggagcatatctatgattgagatgatgctgatatcatagtgatactgaccaacggatctaactgaaaccggaatatctctccaacaagaacaagcctttgcgacagtggatgccaatctgcggtaccaccaacgatgacaatggagttattgacaatgatccacgcagattcaatgtgggaattgttttttggcattggtggcaacattgtccacttcatctcctcgtccatgatgtacacctcaccattaaagatctgaaatgcgaccaaacattataagctagaggcgtttttttgatcttttcagtattgactaaggaggatggtaaaccttgcgtctacgtgagcacttgaagatggctgagtaagggttggccatgaagtcaccttctcggccaccgattacaagtagtatatcgatagcaactacgcaagccctacacaccgtaaaaccgcgatggttgcaccctatgggtactaaaacaaacggcaaaacaggcattgattcaagactatataaaacctgtgtggcccacctcgaggaatagggacctcttcccgccattcgtcgagtgctttgccattttttacagctatgctccaatggtcaaaagcaacggcattgcgattctctttgcttccacccatcacatgaagcctccctctccatatctgagtcgcaggagcatacctgagtccaacaaaacagagctcggcaatcgcagtccactatactttaacatgatatatcttctgacttaaagtctttaccttggagctggtagtgaaggaaattcgagccaagtctttgtgaatgagtctaaaacaaaggaacgagaagtaggtcctctacattgtggaccaagctgccctgaaaccacatatacataccgtccatccgtcacaatcccgaggtgcgaattcgccatttctttaggagtgtggaatctgtcacaccacttattgtctgtgaaattgaacacatccacatgagaatgaacctgaggcaaaataatcaagtgatcattaacaccatttttaaaactaatcaagtgatgatcattctcaagttccttacatagtcgagactgccgtaaccggagaagacatacaaaaggttattgattngaactgagtatccatcaagacgaggaactgggagctgat

SEQ ID NO: 36316 - DNA, 2363 bp, Arabidopsis thaliana landsberg
tctaagtgttttaggacgcggagctgttgaactggacctacatataataggtaggggtctacaatttctgcctgctcagctcctcgcaagcaaaacacatggttaagcgtgacactatgggtacgctcaaccttaggaaagcttccttcatatgtgtcacttccatctcttaagtttctcttcatccatagcgtcttctttgatgattttggagagttgtctaatgtgcttcttgctggttgcccagtggtcgaggcgttatatctcaatcaagatggcgaatcaatgccttacaccatatcgagtcctacgctcaagagactatcagttcactacgagtatcattttgggagcgtaatctcatttgacctgccaaatctcgagtacctcgactactctgattacaccttgtatgggtatccacaagttaactagcaatcccttgatcaaacttatctacaatcttgataaggctgaacatgtcgagaggccggatgtaaccaaactcattatggggataagaaatgttgagatccttagtctatctcccgattcggttggagtaagttagtcaatttattctatatcgtttggaaactcttggacattattattaaactctgattgtgtttcaggtgatctattcatgctgtaaatatgggctacttctaccggtattcaacaatctggttagtttatcttttgggactaagaaaacacgagcttggaaattgcttgcagatatacttaaacagtctccaaagcttgaaactctcatcatcgaggtatgcaaaacctaagaccaaataaatatacacacgaacttagaggttgatcagttaacatacatttatcgattgatacttcttcaggatctgaatggttacccactcgatgtctccatgcctctgaaccaagtgaaggagttgcagattctggaatatggagaaagtgatgacgaggttaaacggttgaagagttttcttggggaagaaagtatgatagaagttgtgtttcctgaagtttgattgcaaacgaaaagggacttcctggagtttgagatcaaagtactactacatttcatctagtttattttcatataattctgtgcaacttttaacttattaattgtttcatgtcacgttgctctttgcagaatacaatagtttttgaatttaatctctttaaagactctagtttagataaatcaacccatattaaagttgcaaagtccaaagaatcgagttaaacaaaattttaattttgacctgattcttttttttttttttttttaatttatattcttaagtttccaacaaaccattgaaccgaatcatttctcctaattaattagaaaatcaatattcgttgtagacagatgtgtcatgtgtgattgccatttgttttagccagattgaatataattttctaaatttctaaagctataggagaaagtaaatctattgctacaacttcagttgtaaatataacaaatatttcatgcagttttgaaatcaagttcctttttaatatatgttctagactaatttgaggtaatcgatcatttgatatttattgattcaaaatttgtaatttttggaatttcacttaaaataattggtttttgagatacataagaaaattcatgttttgactttcttacccaagatgccatgtttaaagatgcacacgtatacctcatattaaaatgcaaattgtaacctatcttatcatttgtataataaagatgcttctgatttttgtttttcttcgtaataacttattgtatgataagacaagaactgtcacgagccactgttattttcgatcaactttatattttatcaatggttttgctagctagcagttggtcccatcttggaacacaagaaaaacgagtaatatgtcaacattatactttttggtgggttgggtaatgtgtcggtgggtgctttcgttatatatgattgtatcagattgctctatctgtcttacgagagaccaaaacgatggagagcacgaagattgctccttcattcgatcgtgccagtgagcttaaagctttcgatgagacgaagactggtgtgaaaggactcgttgactctgaaatctcaaagattccacgcattttccatcactcatctgtcgaactagcaaaccctaaaccacttccctcggacctgctacatctcaagacgatcccaacgatcgatctcggaggacgggacttccaggacgcgattaagcacaagaacgcgattgaagggattaaagaagcagctgccaagtggggtttcttccgagtgatcaaccacggagttctcgctcgagcttcttgagaagatgatagatgaagttcgtga

SEQ ID NO: 36317 - DNA, 3482 bp, Arabidopsis thaliana landsberg
  unsure (1)..(3482): unsure at all n locations
ttactcggattcatcctttttctccctcgtagacgaaagaccttacatcattagatactctttgagttatgctcctaacttggatcgcttcccacaaacactgtccgataaaatggatgagcttatcatcaatgcgacttcttccccatcgctatcnnnnnnnnnnnnnnnnnnnnnnnnnnnnnnnnnnnngaaacagttcgagggttcgtttgatatagatacaatggctcagtgtagtcctgatcttgatccaagaaactgcacaacgtgtctgaaacttgcggtccaagaaatgttggaatgttgcaaccagtctcgttgggctcagatctttactcctaaatgcctcttgaggtacgaagctaccgctttgtcttcaccgcctccaccatatccatcacctccaccaccttcttcaccacttttttcaccattattgccgtctcccccgctttttaagcggccgcaaaccgcgtcagggtttagcgggtcatcttctattaacgttataaaaggtaattaagcatgcatattatatatcattaatatacgtatataaacgttttgttatacaattcgggttatgaagaagagactatatagagtaaattactaaacagtttgacttttttacttgtcttgcaggaaacaaatcatttgggagattttttattgcggtcatgacagcttatgtgtcaatacttctgggtgtaggaatgtaaagatgactttatattggttgtgtgaagtatgatgtgttatgttcttgtctcataggatctaaaattttgtttttttttgttagtgtgttttcagttttctttgttggttttgaaatttttagtttgaatagttttgtcaaaacacacaattgtatggattgacagatgagaagaaattggattttttgtaccatataccatccatcttcttttttcccctaatttttttgctgtcgattcataagtctcatgtgttcaaattttctcaatcttgatataaaatttaagcctgtataatcctccgcatgaggatgaatacatcaagacatggatatacaaagttgacatttcacaaaatcgaataaatatacggtaaaatcagaatacatgatagttcacaatttgatccatagaaatagctagatcttcacagaacccatgaattgagtagagaagctcataagagacggagagcttcttcctctaattttcagtttatcttttcctttgttgatcagaccgtacatttcattatgcattatgcaagcctaacgatcataattgaagctttgtctgcaatttgggaatctcgtaagtgaagcagagcttcttcctctgattctcaattgttcttttcctttgttgatcagaccatacatttcattatgcaagcctaatgatcatagttgccatttatgagtctgaatcaaaatctgtgatctaattgcaaacagccaataccgtcttctcttcaaagtgagttccatcaattttacaataaaaattacttgacaaatgaaatctgagttcttcgggtaaaaaaaagcccccgcttttattcattacagtgctcaaataatttcaccaggaggcagctctgcaagcttcggttgagtaccaagcacgcgttccatatcaaaccgaacctcgatattgcgaatgctatatccaactaccattaaccaatacaacaattttgcaaggtccgctgcgcttgtctctgtcacattcgtctgtgtaaccaccaaaacattgatatcagtcaattcacaatcacactgtataaacaacacacaactcagagctttcagctaaagaagttattattagagaaccttcatttggttagggtctgacacagctagaagcctcttgacaaatgtattcatggctacggcaacatcttcgcctgcagtgcttgtaagctcctacagattcaaagcattccaattgataataaacattggaatacaaatttgatcaagagaaattaataacaacatatgaatcatcatgccttgagattttgaggttcgagagattttagatactccaagatttcattctgctgattcgctgattttctccccacttgacggttgagttcttcgatctctgcttccagaagctcgatatacttttttgcatcaattttctcagggccagatacgttattccacctgatcacttccccagaaacattcttttgagttcctggtgcatagtcttcatcacccccctggcttaatcagaaatagaaaaccagtgtcacatatagcctgatatatcaaacacacgcatatctacaaagagagagagaaagagagtctaataggtttcaaaccggtaaaccccttatatattcaattaaccaaagaactataacacaaaagatgattgataatcaggagaagtctaactctcaaccacgacccaaaccaatatacgagaccaatccagaatatcccaactcgttctgccaaaactatactgcgctctagctaactgactaacctatagttgctgagctatcaacgcagctacatggggtaattacaatgctcctacagtatcttaacacaaggcttatcagcgggaagcaaagaagaagcagaagtcatcggcatgtacacgtttacaggccaagcaaaaaacagaagttataaaactgaaaatgatcaccttttgatcacgtggttcaggaagagcaacctgctccaaactttgttgcaattcaagacgatattgagcgtttctaaacatatatccagtcatcaacacgctcatcatcagctgtgcaaggttctcagcaacctaaagcaatatataatgctcaattcaacaaataaatccaagtaacaaacacagtacacaacttgttgaaaacgtatcgcttacataaagcactcacagaggtgacagtaacggcgaaaaactgcggtggcagcgttccaatcatattcgtcacagtttgtctcattgcttcaaccacctaagaaacaagatagaatcaatcataagctctaactctaaatggttcttttgagaaaatgaagcagagtaacgttacatgtttaggggcacgtttaacgaacatctccatgaactctggcttcacattctgaacatactccagtagaatatcccttctgcttttgggctgctgcttaaaaccagtgatcgattgtgattagggctaatatcaatttcgaatgctgaaccaatggaatttcaagctcaaatgcaaatttacccgagtgccattgggaggcgtggaggaatctgcagaggaatcagaagaagaaccataagctttaactctcaaaaccaacaaattcccagttccgctacacttccaagtgttcgtcttcaaggggaaggtcacagaggaggaagtagtagagagtttaggttcatggttggctaaaaaagacggacaaggacgagatggtggtgattgcaagagcgagaattgca

SEQ ID NO: 36318 - DNA, 3094 bp, Arabidopsis thaliana landsberg
ttagaatccccgattatgaagggtgtttggggttttctttatagaaccgagtggcaatagtagtctctaacaggggctaaagtcttggtaacgcaattcttgttttaagtttcgcagcacctcgctcgttaattctcttctcaactcgtaaggacacaaatcacaatgctcgtccatgtcccatgctgatcagtataatttgacaataagcttaggaaggtaacaaatctataaacttaggtaagatcctcgtttgcgtagtaaaaacgaataattacatatttgatttaatctctttttctctctcgtttttgggcaaacattacttctctctttcctcaaaattattacttcatgttgttacgtttccatacagatgtatacaataattattacagtagggtattttgggaatgtttgaaacatgctatagttgaaaacagatataaatgtgggacctaagacaaaaattcaaaatatcttaaattaaaaaataaaaataaacaaaaaagaaaatcacagcgtggttgctgctggcttgttgcttacattgacatgaacaagacacacagtgcaaaatgacaaagagcccttcatcgatttcgaatcttctctctgagtaaatcaatttcacaaattcgaggtttttggtttttagcttactatactactccaagaagaaaatctcaagttagagtcacttcctatcaaatctctttcatggcggctgctattctcgattctgctgctcgctaaattgcgttttccttccgccattttcatgtaagcttctttcattttgcttcccaaagctcgttttcactatgctttagcaacaacattattgtagaggttaaaggcagcaaaatctatagattaaggatttcttgtggttaatttctgaactcatgtttctgtgtgttttcttagtgaagctgattataaaagcggcgtagatctgtgaagtgtgaacctattcattgcatttccgcgtttgtgaggagaaagaggagaagatgttgtgtgcttgttcaggcgaacaattccggttcgaggatcagcccggttcgccggaatccctagctacaagagatttctcagctagtggactttcttctcgaaacggaggaggcgattgggattccaaattggaagatattcaagtcgatgaagctgaatcgactttaaaggaagctctctcactcaactatgaggttggttttagttactctgatgcatcaattttttggttttaactggaatcatcctgatgctgagtttttcttttcttccttatgtgtgttaggaagctagggctttgttggggagacttgaatatcagagaggtaattttgatgcagcgcttcaggtgtttaaagggattgacattaaggtcttaactccaaggataatcaaagccattgttgagaaaactcgtccttgcaaaccacgctctaaagctgttattgtgcctcccagcacaatgtcaatgcattcagtcagtttacttcttgaagcaatcttacttaaagctagatcacttgaagaacttggctcttacaaaggtaagtattcatgaatttgaatactacttgtgatgctctccagatttttgcattggaatctagtcacattgtcctgctgttttattgttttaccagaggctgcagaagaatgcaaaataatcttggacgtggttgaatctgcactgccaagtggcatgcctgatggaatcagcggattcactaaactgcaggacatttttcagaaggccctggaattgcttcctttactatggacaaaagcggggaatcatcatgaaactattgcttcatatcgccgtgctttatccagaccatggaatttggatccccagaggttagctgttacgcagaaatccttagctttggttttactttacgggagtgttgaggcatgtccaaaagacaacatcgaggaagcaattgtgttgctaatgttacttgtaaagaagatggtggttggggacatacagtgggatccagaactcatggatcatctcacttacgccctttccgtgactggacaatttgaagtgttagcaaactacctagagcagactcttccgggtgtttacacccgtggggagagatggtaccttctctccctttgttacagtgctgctgggatcgataaagcggctattaatctgttaaagatggccctaggcccgtctgaatcaagacaaataccacacattcctttgttattgtttggagcaaagttgtgctctaaagatccaaaacatgcaagggacggcataaattttgctcataggctgctcgacttgggaaacagtcagagtgaacatcttttgagccaagcacacaagttccttggtgtgtgctatggaaacgctgcaagaagttctaaattagactctgaacgggttttccttcagaaaaaatctcttttctctttaaatgaagcagcaaagaggggcaaggctgatccggaacgagacgttatatttaacctaagcgttgagaatgcagttcaaagaaatgttcaggcggctttggatggtgcggttgagtattctagtatggtgggaggagtttcaactaaaggatggaaacatttagctattgtcctttcagcggagaagcggctcaaggatgctgaatcaattctggacttcaccatggaagaggctggtgacattgaaaagttagagcttctgaagttaaaagctgtgcttcagatggctcaagaacaacctaaacaggcaatgaaaacatgcagcagcttgctgggactaattcgagcgcaagaaaaatctgaacaatccgaggtacatagtttggatgtcacaatatgaaagaaacatattctgtgaaatttttgatatctctgaataatcttattcttttgttcccagagtctgctacagaaatttgaaacggaagcttggcacgacctggcctctgtctatggaaagctaggttcatggtcagatgcagaaacatgtctcgagaaggcaagatccatgtgctataattctcccagaggctggaatgaaacaggtacggagaaaaggctttcagtcttaagc

SEQ ID NO: 36319 - DNA, 2345 bp, Arabidopsis thaliana landsberg
tttgtttgagaacatctcaaaagtttcattttttcttgtttaataattaatcctgggatctctaactttagtatagtcatatgtatttctgattcaaaatcaggtaatgttgcaaactggtcatgcatgccaagggaataagataattattgatgacgtctaaggagtctctcatcatagcaagtgatggaccctgaaaggtttgcttccactataatctactctcaacgatttactaataatggtaggtgtttattcaaatattctattctactactatgttggcaaggaaaagctaggatgatatatctccttcgtggctctgaaacttcagagtgaccggggcttttggttagtagtttccctgtgcttttggataagtcacactccttactcgtatctgtattcaaaacgtttaccagttagcattcacacatcgactaggtagaagtattacacatatcattagccatatctttgaaacatacaagataacactcaaggttcaagtatagtcttagcgtttgcatatagctgataacattagagagtactagagagagtggtagttatttatttctctataacattgttagataccacaattttaggattctaagagagaagtttagatgacagaagagagagagcagacagcttctctatctaatctgtggtcgcttgaatgatgagtttggcataggaagtgtcatctctacccttgatctttcttgattctgcatcaccacctgaccattgattcctctccgacctgatccttctccataagtactctcaccagagctcttccttcttcgctcattgtgtccagctaagcgcctcctacaacttctcttagcttcatcaaactcttggaggtcatgaaacctgtttcaagaactcaaaaaaaccattcaaagatccagacaaaaagttttttgaagggtaaattaggttgtacgttacctactgcattgttgacaaaagcgttggttaagtcctgagagaaagacagaagatgcctttgcatgaacttcacacactttgtgtctccggtgatacagttttgcctctttcatatcagctgtgcatctatctacttggcaaagccgcaacgagccaccacgattgatgctacctctagaccctctaactctatccctacctacttcctcttcttcatccgtatcagtctccatatcttgttccacaaggtaagacttctttttcatgtaaccttgtccttgtgatctcttaccctccattatggagtcttataaagatggtttgttggaggaaggaaactctaataggttaagcactgtttgaggaatgggacttgatgatattgttgacgaaattgaagggtttaaaaggtgaagtaaagtcgggagatggaccactgtgttcttgcacgtttctctggtggaataagtgcatgattacgttgatgtgctagcttcccaaaaaagaagaaattaaaaatggagagtataggtcaatagattggaattacacaagtgaaaaatgtcttgtaactatttcataggcctttcgtggttttggtttcttctgatgcaattaatagttgatacaagattggagctgtatattgtacttccgggtttactgttttgaattttaatttgaatttcttattcaaattggggacccttttgtttttaacattgatgtccttctaggtaattaaggtgaaccttattgatcagtgcaactgtagacatatagtacagggaagaagagctggaatatcataatttacccatggtcttctcatctaactttataatatatctctagaaacagacaaaggtcctaataaatggtgacatcctttgtcgatgtagactattggattcctcttcctgcaaccctagtggtcatctattgttggacccatctagagtataggcatttaaggttagcttaggatgagaggtaaaatggttatgttctgtttaaacacatcgttgtctttattattacatactgatttgtatctggttttaaaattgccttgtctgtggtatatgatgttggcagcatgaatatcgtctgttctggaccatagcatatcaacgcattttagttgatgcctttgcactttttttctttctttcgggtgcaaggcatttatcactatttcctataaagatgctattttgtgggagtgcaaaatcagagattaaaagtaaacaatgagatctctttagctataaagggtcaatgcaaacgacacttggaactatattcttatgatagagagctttgatgtttaaggtttaaagttatagctgctcaaaagagtaataataacgataaag

SEQ ID NO: 36320 - DNA, 888 bp, Arabidopsis thaliana landsberg
gcttttcgcacacgcactcaatccaaaaggaaacgtgtacttatctggagaaatcccagaattcatcattcgaagaaataacaatatagcttcgttgcataacccagaagatgcatatcctcgaatcaaagaattgtacatgaaacaagttccatacgattcactgttctcaaacacttctttagcaaagctcaaactttcacgagtacccaattcacaactccgtgctacaagcttagttatagtggagacatcattatcaagtccttgcttcgtgagcgaacgatgaaacattttgagttcgtctatggttttgcaattctttaacgacgatggcgtggctttggtacacttgctctggtttagaagagatggtttcgtagtcgtcgtggtggctaacaccattggagagagatgaagaacattacccaacatcgccattgttggctcttactgattcagtatcttaattataaagttaaaaccctttataatcaaaaaattcaaaaaaaaaaaaaacaatttttggttacaaaaaaaaaaagctctacattgttcataaacagatacttaagaaaaaaaataacagaggaccattactggatttgaaccaaactcggaacataactgaaaataattgaatgccattttctattactgttaagtagaactctttgtatgtttaaaggttgtacgaaagggatttctatatatccatcgtcctctccgataatgtataccatgttcttgctgatcttatcatcattaacattacaacacaggacgactttcttctcctcctcgaaataaaaacttgggaaaattcgaacacaataaaggcgggggtttaagggcagtctccacaacaatgtagcatcagtatcaatg

SEQ ID NO: 36321 - DNA, 6746 bp, Arabidopsis thaliana landsberg
gacatttttaactaattttacacttaatttgttgcattgtctctcttattaacgtatcagttttagtgttgaattcgtgtatttgtatatatatttgtctatttatgcaatttcatatggtttgaattcgtcaacaaatattctctagtaataaagcagttaaaaagtaaaaaggaaaaaatattcagttaaaaagtaacagattttactaacaaacaaacgaaaacgctcaacgattagtggcaacaaatgtaaatataaacattttatgaaattgcataaataggacgaaaaatccaaataaaaagaaattctcagcaccttctttctctcgcgctcttcgtctcttcctctgttcttccttctggtgaataaccgtaggaaccgccattggagtgggtgtggaagaactcggagctactcaatactcatattcaatcttcttcactacttcgctgtaatttcaggtgagtcttcttcgttggttcgaggattagatcagcgatgcatcttttgcttttgatttagtgaaacgcgaagacaatctctatacttctttcgtcatttcttaacaaataagtcatttcttttgtgttagccgctgcttctcaccatttcttttatgattatgttcgcaagatctaacgattttgcgtttggaacttgatttgagatacagggcattgcttattctctgtatcgatggatcctcgtccaaatactgcaaaggtggtatataggatccaacaactgtatgctctgttcttcggatttcattgtcctgtgattgtaactctctgtataaacgtaggtgggggatgagtttgcaaggcagtactataacaccttgcaaaacgccccggagaatctctataagctttataaagataagagtacgatttcacggcctggactagatggaacgatgcgtgtcttcactttatcggtaaagatacttttcctgattgacttagtaactttggtgaaatctttgttctcttgaatgattcctaatcttggaacagaaagatcttaaatggcgatctcctggtagttttgattcggttaagataaccagcgtcacgtcccaagactctcttaagcagggtatcctcgtcgttgtttatggctacctcactttcaacgagagacctgcaaggcacttcacacaagttttctttcttgttccccaagaaaaaggctacattgtttgcaccgacatgttcaggtttgttgatatacccgaggtcaatgcagccattcctcctgctaatgatggtgagtaacagttcaattataagcagcctccatattttgctttgcgaggaagtaagtgtctaagatcttggtttaatgcgaatggttcagtcatagaggagaaagttccagaaacggagggagctgctctgagagtttctgaaccaaatcatggttttgataatgttcccaagctatcttgtgcttctgagggtgcagccatttgcgctaaaaaacttcctctagatgcaaccattgcctttgttgagaatgcatttaagcagtttggagaaattagaagaggtggagttgaagttagaatcaactgggtaaaatgttattccactaacaaccttttttattttttgaacactttcttcttcatggaaacactaatttgtctacttgtataaaactggtagcactgtactgggaaatatgcttatgtggagtttgaagaagcagaggccgctaacagggcaataatggtcggcgctttggaccttgatgacccttgtttaattatttgatcggtgttttgataatgctggcatgaatcttattcaggcgtctcctataagtattgatgggtacagaacttacgtggagaagaagtacgcttacaataaaagtgagtattagttagtcactgtaactgtcaaggaatcgtgttaaaggctttagttttgtttggtttagtcttgtgatcactcaacagatataaaagctgatgctggtgctgatactggaaatgggaacagtcaggactctcaaggtaaaaagtttgtcttttctccttcccgtttatgtatacagtgaggagtctcaatttccgtaaccttttgtgtgtttatttaccagctataactgaagatgcacacattcgtgtaaaagaccttcctccaaatgcaaccgttgccttggttgagagtgtatttaagcagtttggaccaattaaaaagggacgaattcgagttataaaccctgctaattcggtaagtgttgagtgatctactaacaagcatttttcttattaatggaaaggctaatttggttacatttgtgtgaaactggtagaactattggtatgcttttgtggagtttgaggaagcagatgctgccaagagagcaatacaggtacttgctttggacctggacctggaccttttttatacatttgttctgaatcttggttaggattcactttgatctcttgaagccttaagtgttagattgactttgacaatgctggcatgatcttattcaggcgtctcctctaaatgttaatgtccgcacacaacttacgtggagcagaagcaaccatactatgaaggtgagtatgtgggagttattagttagtctatgtaacgatcaaagaaattcctgaagggtctagttttgtttggttttggaatcaggttactatgaaagtccatccgatggaccaggaaacataaagagaggcgagggagtgagaggatcactaggtaaccccatttgtaactggcagaagatggaggaagtgagaggagcagatgtttatgacttgcaaaactggcaaaagattatgaatcaatcggaggagcagatgaagtttcaggaggaagaagggcgacaatacaatcaaaacagatatacaagcgaggaagtgagaggaacagaaggagttggtctggaggaagaagaagaagaagaagagaaccaaaactgggaggaacagaggaagattcaggaggaagaaggaacagaatctcacgaaggtaataatggtgggtaacaatggtatcaactctgtttttatcaactctacttttgacatatctctttgtttatctatcagcgtccgttttccttagacgtcttcctctagatgtaacctttgccttgattgaggatgcattgaagaagtttggaccaattaatgccatttcaattataaaatctggtccggtaagtgttcaagtaatatattaacaagcatttttctgaacccttcttcttattcttcatggaaacactaatttgtctacttgtatgatgaaactgttagctctataaatttgcttttgtggacttcgagaaagcagatgtcgccaacagggcaataatggtacactacacgctttgaaactggactattcttaaatgttttgtgggattcgatttgatctcttgataatgctggcatgaatctcttattcaggcgtctcctgtgaggatttgtgagaaaaacgttaacgtgcagaagaagctaagtgcaggtgcagggaagcgttacacaagaccaacctgcagagacacctcggtgccgctaggtgcaggtaactttcattggctaaactcaaaaacgtgcaaagaagggtgctgaataggcttcttttggtttgacttttcagaatcaggtcacagcggagcaggtaagtcaacgcagatatggaagcgagcaagtgagaggcacagatgcttctcacttttggggctggcagtggcagaagtcaaaggaggaacagagtaagcttcaggaggaagagggagaaatacaagttgatcattcttgggaggaggaacatagcaaggttctggaggaagagagtaagcttcaggaggaagcggtagaaacacaagttgatcattcttgggactatgagcagataatggaggagcaagaagaggaagaatcaaaacagaaccagactagttatattgaagatattgcggcttttttttcgggtgttttatgattttgactagctcccatgtaattgtaatgatagaatcattgatttgtgataaaagaacacgcagagagccagagatattggttcttaaagtgtggcatcaatggccaaacatgttctgaaaatctggatgtgtgacattaaaaggagataaattaatgtgagcataaatatactatcacatagagccgataacagaatatataaccaaccaacaacgtaactattccttgaaaataaaacggtcaacggttagacgtagacccgttttagcgcgctactcagtggcaacaaatgtaaatatgtaaagcttacgaaattgcataaataggactctctgcgagtgtcagcacttttctctcacgctcttcgtctctgacctgcttcttccttgtcgcgaataaaccctcaaacaccaccattgaaggtggtgtcgcagacctcggagatactcatattcaatagggttttcttccctaccacaaacctctctctctcgctacgatttcaggtgagtcttctttccacggttttggtttatctttggtttggggattagatcagcaatggggtttttcgagttaaacgtaaaggcaaaatctttgcttcttccatgatattcttaacacgtagcccatttcttttgttcaagactgcattctttggttatatgcttatgtacttggctagatttaaggatcttgagtttggaattttgatctttagattcagggcattgattaactctctgaaccaatgcatcctcctgcacgaccttctgctaaagcggtatatacaatccaaacaattgtatgctctgttccatcggatttcatttttcagtgattgtaaatttgcaactctctccataaaacgtatagattggggacggatttgcagagcactactataacaacttgcaaaactccccggagattctccctggctactataaagatgtcagtaagattacacggcctggacttgatggaacgatgcgttcctctaccctaccggttagacaattttcttgactgagtcgttcattaagtaacattggtctgttactgattcctaatcttggagcaggatataatcgaggatcttgatatgctatctcctggtggttttgattcggttgaggtaaccagtgtcatgtcccaagactctcatgacaagggtattcgcgttgctgttgatggctacttcactttcaacgagaggcctgcaaggaacttcacacaaaacttcacttttgctccccaagaaaaaggcctctttgtttcgactgacatgttcaagtttgttggcatacccgaggctaatgcaaccattcctcctgctaataatggtgagtaatagtggagcctccatattttgctcgcaaggaaatgtgtcgttcactatcccatttgtttatttatacattgctctataactttctgtgtagccgcaatttgcgttaaaaatcttcctctaaatgcaaccattgccttggttgagaatgcattcaagcagtttggagaaatcagaagaggtggagttgaagttagaaacaaaagggtaaatgttaactaatctagatactaacaagcttcgttaacaaaaacactaaattgtgttcatgaaactggtagagcttttcttatggcttcgtggagtttaaggaagaaaatgccgcccagagagcaataaaggtaaacgctagcatttggtcggactgactacttgggggttcaatttcagaactgtctgattggttttgataatgttggcatgaatcttatgcaggcttctcctgtaacgattgatttgcgtagcgtttacgtggagaagaagcgacctgactatatacgtgagtttgtgggagtattagtaaataatagtctctgttaatttgtcaaagaattgtgctcaaggctccggttttgtttggttgagaatcaggatactgggatactccatccactggaccaggaatcatatacagaagcgagggaatgagcgtaacaaaagattatggtaataagggtggaaatgagaataatcaagagcctcgaggtaaaagaaatacttatgatttgtttttgtgagctgcagatagatgaatcactgtatttaacatttttgttgttgtttgtatcagcgttatatgctgcagttcacgttaaaaaccttcctccaaatgtaaccactgactgggtagagaacgcatttaagcagtttggaccaatcaaaagaggaggagttcaagtttctaaccgtggtgtggtaagtgtaattaagtaatctaataaaacaagcaatttttcttattaatggaaacactgatttgtgtacttgtatgaaactggtagggcaattggtttggtaatgtcaagtttgtgcatgcagctggtgccgagagagcagtaaatgtacgtgctttggacctggaccttatttatactcattgctctgtctcttaggtgggattcactttgatctcttgaagccccaagtgttattgataatgctgcctggcatgaatcttattcaggcgtctcctctgttgattggtcggcgaaaacttaaagtggagaagaagcttgatcagcgagtgcagaatcagacctgaacatgaccagttgtgtagatgtagcctgcaatttacatagacgaattatgggttttaccaactgactgttcagttttggttattggtagtgacaacagcgttgagagatatttggattcattgtaagcttttct

SEQ ID NO: 36322 - DNA, 3680 bp, Arabidopsis thaliana landsberg
  unsure (1)..(3680): unsure at all n locations
tgatcatccctcggtctctccagcacccaacaaggacacagccttgttgagttgtgcacgccaatggttaggccacaccgctaaaactctagtgtacatctctgaagctctttgaaacctacccaaatccatgtaaagcccaccgaggttataaagagcatcaacatgaccaggtttcaaatctatagctctctggaaaacctcaatagccctctcatcctcccccattgcatgaagcgacgaagccaaatcacaatgcgcatcagcataatccggtttcaaatatatagcttcctctaaagccttcacagcagctctatactctcctacaccaaacagagcactacctagaagcttcaaggctctgtaatgcgttggacaaagaatcgcagcctctctataatactcacaagcactcaaaaccataccttcaccttcaagagagataccaagattgacataaatctgaggaagcaagtaagcccattgattcccaccagactccgcagcttccaacgccaacaagaactcgtctttcgactctttatacttccccaatacataaagacaattcccagctttgaaatgaggtctcacatcagtcggttgcaactcacaagctctcttaaaactaacaagagcttctttaaacaactggtgctcatacaaaaccttaccaatcgccatatgtccatcaaaagcttcttctcttgatctagcaccatctgctttacttctcaacacacctaattccttcacaaacactccataatcatgactcgattcttcccaatagattctcttatccgaaatatccgaagacggtcctaactctctagaccatccagcttcagaaaacgcatcaacattattattatccactttcaatttcccatctttctcctgcttagacttcaatctcttaaccaaaatctccaaatcatcaacaagcttccacgtctcatcgaaaacaataccatggttcggcgaaaccgcccaagctgccgttctctgctgcttctgcgcttcaacagctctctcatcagtaatcgaagatgacgaagcttcagagccaccctttgtctcttcgttaaactcaatccctaaagcgtcgaaatcacgatcaacatctccagcaccgtcgtcgtaagttcggagaagaccgtcaaaggtcaaacctttatctccgtcgatgaattcagcgtaggttcgaaacacttcatcgagaattgcgcttatctgttcgtcgctgaatttaaccctagggttcacagctacgacgagagctgacatctcttcacggcttaatcctccgtcgagattcccgtcgaattgctggaaaattctcttgactttctccgatctgcttcctctcgtcgtcattttttcctcaccggaaaaataaaaatccaaccttttatctttccctccccacaaaatctaaaagtgagaatccaatgtaggaaaaaacacgaaattgaacactaattacggatcaatttcgaagctttgttgagagaagctacttaatcctctggtttgtattgtgaaaaaaagttgctaaatttaagaaatgaagaagaaatcaaagtggtacaagagtccgagctgtctatttgttgtctctctgtgtcttaaaaaaaactcagagatagtggacaggagataacggtgttgttgtactctgctgttgtgggcttaactctatcttttattattttgattaattcttacgaaatatttgtctttctaatttttttttaaaattcgagaaaagtaagtacaactatataaatagttcaatagtcaataccaataaattgaatatttattgaagaagtcaattctccacttgtaattagaaaatgtgatagagaagagataaaatgacgcattattggctaataaatgcgaaataaagaacaaaccttgatgttagtttaatcaattcacactaaccttgatgtggtaatcaagctaggttttatttcaagaaattcgattttacttttttataaccaaatttgaagctaaaccagagaaaaatttcaacattactttgacaaatccttcaaactattgatacatcctagtaaaccaaattcacaaaccgaannnnnnnnnnnnnnnnnntaagagaagatgaagacaatggaaacctgagacgaagcttatatatttgctaaggggtctactagtttgaagatgatgattatggcatcgttctggtgattcttgctaggcaattatctttgggtcgattgtgaggcaagaacatcaccggacatccgggattgctcctttccaccctgtgattatgccattggaaacaaaacattacgattctgcatgcagagtgataacttgaaagctgagctatatacagagagagaggaagttaccggtatttgaggaggaaatgatgaagaaaaatggaaatctcgagcttggcaagatcgtttcccgggcataggtggcttcccaaaccaaaaggaaggaatgtgcctgcttttggtgtgtatccctgtagaaggaaccagacaatgttcagatacttttgacatataagagacggcatcaccaaatacagttacaaagacatttcattgtagaatgcttatctctacgtacctcccatcttgaaggatcaaatttctttggatccgggtagatttcagggtccaaatggacgttcctaaaccaagtcagaaccttccagccttttggaattatatagcctgaaagaaaagacatgagaaatgagtataataaaaaattaagatgatttaccatgttccatgtaggtaatgagtatactgattactgaccatccatttggacatcactctttgcttccctgaaggccgtcagagagaatgtaattactcgaagggtctcatcaataacctgataaaaagctctttccatcagtaaaagactgtaacaactcatacaatgttataaacaccaaaaattacgttgcaatgaggcagaaacttgacctgagaaagatacaccatttcacgtgtctctttaagcgtcaacttctgtcccggtgctctcttttttacgatcctctcttgttcttcctatggtacaacgaatatcacaactcaagagtataaactgaaattgtgaaacatatcttctaatttaccttagccttttgcagaatcatagggtgttcttgcatcaaaatggtagcccacatagtgaggtgtccagaagattcatgacccgcattaagatacatcaacaaaaggtcaataatttcctcatcatctaagactcttccgttttcatctttaacatctattagattatccagcatatcttttctattggatgaaatattctgcttcctttgatttcttcggttagtcactatggactgaaaggcagctacaagttttttccttgcctgtataagtggaaaatactactcttcaaatcccaagagatatgcacaagtggaaacaagaggttgttgaatgttttaccttcaaagctctatgataagcaaacccaggaagattaatacccattgctcgaactccatagttaaggttggtatactcccgttccaatgaatccatgacatgctcactctcactgctgagaaatatgtacataataaactaanacgtaagcttacgcaaatgagataagaactcgatttc

SEQ ID NO: 36323 - DNA, 980 bp, Arabidopsis thaliana landsberg
gttcaaaatgcatatccttcataaattttagagcttctactaatagtcccgaacgggcataaatgtcgatcatacaatcataatgatcaatagtcggagccacattatattttcgaagcatcgtgtccaagcaatgctttccctgttcaactaggcctgcatggctgcacgcggttaaaaccgcaataaatgtaactgagtttggcttcataccacaactcaccattttctcaaacaatctcaaagcttcagaggcatttccatagtaagcatgacctgatataaaagcagtccatgcaacaatatcggggttgtccatggactcaaagacttcatttgcatcatctaagcatccacatttggaatacatcgtaataagagcgctttctccatactgagatccaatcagacttctttttatagcatctgcatggacttggccaccaatgttgcaatctgcaagtaccgagcatgcttggaatatgctagtatatgtgaatgaatttagaatcgatgcgtttttgcttctcaaagacttgaaggttttaacagcctcctcaaattgactcatttgacagtatccggagatgattgcgctccaggaaacatcgtttggctcacggatttcttgaaatgcacgacaagcagactcgaagctggaacatttgatgtaaaaatcaacaagtggagttccaaccgagacttcagattccaatccaagcttagcgacacaggcatgaatttgcttgccaagattaagctcttcaagagaagcacacgctttaagaacaactgaaaacacaaaactgtcccattcaacaccttccgttaccaaatccacaaatagtttcaaagcatctcttgctcttacagcttgagtataacctaccatcaatcccgtacaagccactggtttcttcactgccatctgatcgaacactcgcttagcacccactaaccaaccacatttcacgtacatg

SEQ ID NO: 36324 - DNA, 1865 bp, Arabidopsis thaliana landsberg
  unsure (1)..(1865): unsure at all n locations
ccgcaatattgctgatgccggaggaaggtgtcgactatactctagttccacaagacgtttggagaaatttctttaaatggtgattgtttcctatgtcctggagtattaataggatagttaatttttgtattttataaatcacaagtttattgggctaattctcttctatactttaggtataaaggaggtcctccagtaccgagaaagttgatatctcaagggttttacactaagagctttagtgtggaggtttacctactgtgtcttaccttgacagacagtagagacgaaagcactaccatcataaggttgagcaaacaggtatggtgtcgtcccgtactaccttacatatgtattttaggttatagactatgtgcgataattgtactcacatgctttgttcacttctcctatggattgttgatgttccaggcttctataggtcaactttatgagatggtttgtgctggaaaaggggtagcaaaagaaaaggtgtcttctcgcagcttttcttttctacttcatcttatgccatgatgatatacctcatttttttattcagagatattgtttgctcgatattcgatttgtataagcaggctcgcatatgggattactttgagaaaaagaaaagcgtactcttggatccttcatctgaacaaagtgtggaggaagcgggccttcaattcaaccaagatgtaagtgtgacttgaaaactttctcaggcacatgacaaattttgagctctataattgtcactaaaccaatatctcgttttggcttgcctttatttaccataattttatgtgttgagcattgatgtgtgcattccatgcagattcttcttgaggttgatggatctgcatcttctcaatttgtcatgagcttggctgaaaatgaattagctatggtacctctagagcctatgaggtcagatgctatggatattgtgcgtggtggagggaccttatctaatggtcactccaacggttttaagtttagcttctttgggagaaacactttcaaagatgatgtttcttcaaggacttttgggaaaggagagaagagaggtttaggaggattgcaaaatttgggaaatacatgcttcatgaatagtactcttcagtgtttggctcatacaccccctattgttgaatattttctacaagattaccgctccgacataaatgcaaagaatcctttgggaatgcgtgtaagagcttgagagttttggtatttgtatattatataattccatgtgaagtcattcaaacgaatctatatctctaatgtagggtgagcttgcaattgcatttggtgaacttttgaggaaattgtggtcatctggacaaaatacagttgcgccgcgcgcttttaagacaaaattggctcgatttgctccacaatttagtggttataatcagcatgattctcaagtaagtcatgttctccaaaatggtttatggttaatcagcaagtaagacaaaatttgttgtgtcacttatggcttttttccttcctcttacactaggaaaccagtgccttcgttatgtcttcatgtatgatatgttagctcattgtttccaggaaatgcttgctttcttattggatgggcttcatgaagacttgaacaaggtaaaacgaaaaccttatattgaagctaaagattcagatggtcgtccagatgatgaagtagccgaagaaaagtggaaataccataaggcccgaaatgactctgtgatagttgacgtctttcagtaagcatttctactctttgtattactatctacangtatccgaggtatagttaaccaaaatgttttgaagtacttctctctttgctgtttaacgacctcatgtgatgg

SEQ ID NO: 36325 - DNA, 2281 bp, Arabidopsis thaliana landsberg
gtctcagaaacatttgcctgtaggtatcaacttccttctcaagaaaatgtttctccctctccctcctaagcaaaatttctttgagaatactcatctcttccgcatcaaaagcagacttttcttctatcatccgctgatattgcctagcttccatctctatcgacgctttctcctcttgtaaccgtaatatcatattcaaagcctcatctgcagcagatgcagcagcatttctctctttctctagttcaagagctaatgaagcacgtgcagctcgttcttccccaagcatctgttctaaaatctcaaccgccttctgtatcataccaggggaactgcatgtaccctctcctactccacacccaacagaacttagtgaaacacttttccgcaacgacacatcctccaatggatgtccactatctacattgttataacttgtatcaaaaccaacattcactatccaatataattgaataaagacaacaaaaaaacttaccattggagttcacaagaagaggatcattttcatcatatgatccctcaaagctcttaaggcctaaacaactttggtaatggttcttgaaaccatacggcgatttatggaagctaagccgcttactcttaactttaaagcttccttttttcaaactttgcgcagttaaaagatcgaaccctgaagccttattctcaaactttccaacagaaggagtagtactagacacctcatcttccaactcaacgcgcttacgctctccttttctcttctttccaccattaccttctttatacagaattgaatcaaaaggtgttctgtttttaacagatctttgaacagaagagatctttttaaccggaagattccttaaactctcttgaaaacactcactgtatagaccatcacaaggacatgggaggtctaaaccaaataaaccgaggaacttcgatgttacataaacgataaacgatgcgcaaagtagcgaaaacgcaacggaaagatcgataaacgcagccactaagcctttaaatgtccatgattttacctcctggcaacgcattttacacctgcaagtatacaataatctacagaaattactcaaaatttgagaaattgattagagaaccagattgttatttgaatcaattacaagcatatatccaaatctaagactaatttggtaagttaatcaatcaatcaaattatatataaacccaatcgttaccacagagaaaactcaccgatgaatcaatcgacaatcgatagcacagagaaactccttgcgatttgaataagtttagtaaattagagaattgaaactcacacgaagaagaagaagttgagaaatcttggggaagcaagcacaacgtaaacggctcttcctctgccgttttttttttctctctttgttcaaaaatcaaaacttcttttttagttttcaaaacttcagttgcaaatcaccgtacgagtgagcggatacgccttcgttttatcgccgaccccattactctcttgagatttgtgtgtgtttttaaaaatattttatttttacatacgtaatcaaatttgtgcatttttacgcaaatgtgtgccaactaatttgtagacaagatccaatctatattgtagcatggacataagttaggatactttaatgaaaatatttataatatacacttacacaaagtctatatttcagttgactattcgtccgatatatacagtttaactattgaaatatttacgacaaaaaaaaaaaatattgaaatatttgagtcatttttattctacaagtttgaatgattttaaattttatatgatttgtatagttgactcatgaattctttaggggtatgtttcttattgatatatccatctttgaaccaaaacattgagatatccaagttatttttactatacaagttcgaacgatttaagatttttatatctaatttatataattgactcataaatttgtcgggatatatttcttactgacatattcggctttgtatcaaaacaatgagatatttaagttatatttactctaaaagtttgaacggttttagattttctaatcctaatatagaatttgtatagttggtccatgaattcatcgatgactgcttttattgatatatccgactttgtagcgactttgtagcaaaatgacaagatatttcagtcatttttactttaaaagtttgagcgattttagaattcatatatataatttgcttatgaatttgacggggctccaattctccacaatatatctggttttgt

SEQ ID NO: 36326 - DNA, 1758 bp, Arabidopsis thaliana landsberg
gttgattcttatgatcggagctcttcccgccgcgttaacgttttactggcgaatgctcatttctgaaaccgccaggttcgtatttctttttgtctttttgttcaccaatttttatcctttaaatctttaatattaccattgtatagactataattatatatacatatatatatatatatatgcactatatcttgtgtgactttgcttcatatcatcccacatacaaaccttggaaaatttctagactattaaataactctctcctaaaattttgtttttagaaatattttccaagattaaaaatattgagatttgaaacggtaagcattttcaccatggattgcttctatcgcaaactagatcgttagagcatattaatccacaacaatagttattacttgtcatcaccattcaaacttttctgtatataaacccttattttatgtatatcttgcgtgactttgttagctattcaatgtagaaattataaattaaatcactaaaaagtttagtcgtgtgcaaaacaaaagttctactcatacgtctccgtacgaaacaatgttggagaacctgaaatttaacataaattcgatctgatgttgatcagatgataaacataaaataatatatgtgagcgataatgtaaagagtggcaacttcgtggtttgttactaggaagtacgttgacttgtgagttgggagggagatataccaaacacagtggcatatacctttctatgctacctcttttgataacatatttcaatagtatttctttttatatgtataatatatagttctggtatgttttcctgtattaattattcctcccagatataaactccagctaactaacagagttttatttcattattataaataaccacgtactctcttcctaacaagttctcccactttagtttaatgctctaacttcatacgaaaaagtcttaagagattggaatttttacattccgtgtattgtatgagttatgacttattatgactaattgttagcagtgacatctctcactaataataaaccttatctatgttgacaaaaaaacctaatttggcagaaaaaattgttttaagtagctaatttgttagaaatctcacatctaatgtcaaccaactacagctattgttacatattttttacaaaattataaatatttgaaccttcctacaaaacttaaatatgataactactacattttatgacaattcatgcagatacacagcattggttgagaacaatgtagtccaagcagcaaaagacatgcaaagagtcatgtccgtatcaatgatatctcaaataaccgaagattcatcatcggagctagaacaaccaccgtcttcttcctcatacaaactcttctctcgccgtttcctcagtctccacggtcgagacctcttcgcagcctcagccaattggttcctagtggacgtcgtcttctatacaagcaatctccttctctctcaaatctttaacttctccaacaaacccctcaactccacaaacgtctacgactctgcctttgaagtagctaagcttgcagccattgtagccgcttgctccaccatccctggttactggttcacggtctatttcatcgataaaatcggtagagtcaagattcagatgatggggtttttccttatggcggtcgtttacttagtcgctgggattccgtatagttggtattggtctaagcatgagaagactaataaaggctttatggttctctacggatt

SEQ ID NO: 36327 - DNA, 2217 bp, Arabidopsis thaliana landsberg
  unsure (1)..(2217): unsure at all n locations
taatgtttatgcttgaatgtcatatagctctgcagacgtgggatccgatgcaggtgacaattcttcttaaaagacaactaattctctgactttcctcttagtgactataagaatagttgaactcctctattaaatttttcgtttaacaattcccttagtaccggaccacattatgactcaatcaagaattctcttctctgtatttctcctctccatctttatcttacctctccgaaacgccttgaaccctcaaaaatgtccttcatcctactcggattcatatcttaataaatgtgaaccacttggaatccccattcgttttcctttctgcggccatccaggattcaatctccactgcaacaacctcgataagacagtcctagagcttcctatgtccggaacatttcttgtcgatgaaatcaactaccaaaagcagcagatttctatcagcgaccctgaaaactgtatggtaaaaggcttttaaccttgagatacttgaggatctcctttctcttatggcttcagtttctactacacgttcttgacctgtccgaatgaggtcgtgataccggtttggtctctgatgtccatcccttgcctaagcaattctacctcctccttcttcgccacgtctaatttgactttttcaaaattgttgccgccttcttgtcagattgtgaaaggactatacgttcctgttgatgtgatatataaagatgtgataactgaagaaaaagggttctctacagtgccctggcttggaaacgtcttgttggaatggagctcgccgaattgcagaggttgtgaaaaggagtccttgagatgtggtttcaagaacaaggcctccctcgaagtcaaatgcttggctgatccacccggtatgatccttattggnttaacttcttcttcttcttcttcttcttcacttataagttataatcgaagaaaactccattattggtaaggctgaagaagttttggtagaaaacttcaaatccaggttcttttaggtttagattaatcaagaagttttttacaaagagaaatcctagtaggaattaaatatggaaattatgaattgactaattagttttttatggtcgaagattagttataatttaaccaaccgaagtattctcaatttctaattccccacgctagctagcgatcgctagaatacttaacgcatattttttgtttttattaaactgacatttgttgaaataagcaaatatcaaacaaaaatcgtaatcaattaatttctctacttcgactgtttaaaacacattcttgatatgttatccggcagatgaaacaaaaagtagattacgaccactgataataaccctttgcataatcggaggaatcaccgcaacttgtattgctgctatccgcatttacaattccgagaggtttgtcaatcagagaagacaaaatgcagctattacagccagaaacacaacgcaacaaccacgaggggttgtggtcactacaggtcttgaccaatctacaatagaatcatacaagaaagtggagttgggagaaagtagaaggcttccaggtactaatggtatcatctgtcccatttgtttatcagaatatgctagcaaagagactgtacggtgcatgccagaatgtgatcactgtttccacgtccaatgtatcgatgagtggctcaagattcatagttcatgtcctgtttgtcgcaactcacgctcgtaaaggaacttgttgtttgttgttgtttgaatatgaagtatttcgacattttaatgaatgtcactaattcttctgcttgtaaatcgatcaaataattcaggagtttctgtaaatcaggttacatattcaaacaaatcaaaaaaacaactcaagagcaaaaaaacaaacaactgaacagagcatatatagctaatgatcaaatgattaatagttttatttattcgcaaggcataatactcaaagggcacagtaatcggtgagatcagatatgtctttccttgcattaggtaagttgctgaatttcaagaaaccccaaaaatcaaaaggcttatagagacgaggatgttcatcatctaccatcttctcaggcgcatttatgatcactccttctttaagaatcgtgaacagtgcagccacataccgatctttttttgcggttataaccacaccgcgaagcggaggaaataccccaccattcaacagtacctacaacaacgt

SEQ ID NO: 36328 - DNA, 2867 bp, Arabidopsis thaliana landsberg
atatcggccatatctgttgcttctcgtatatctgctgaaagaggtgaatccattggtgaatctgtgggttatcagattcgtctagaatcaaagcgttctgatcaaacacgattgctattttgcactactggtgttttactccggcggctggtaagatacaactattctactactcaactactcatcacatgtagttgaagtatgatattttaagcttctttactttgaaatgtcgaatcaattgttgaaatgcagattgaggatcctaatctaactaacgtaagccatttgctcgtggatgagattcacgaaagaggcatgaatgaagattttctactaatcatactacgcgatctccttcctcgacgcccagatttgcgtcttattctgatgagtgctacgattaacgctgacatgttctcaacatactttgggaactctcccactatgcacatcccggtatgtctagttgtaaatccagtgacttgtttatgatctgatattcgtgacttatctcttttcaacttattgccagggtttcacatttcctgtggcagagttattcctagaagatgtattggagaaaagtcgttataatattaagtcgtctgactcggggaattatcaaggtagttcgagaggtagaagaagagaatcagaatccaagaaagatgatctgactactctttttgaggtatgctatgctacccttgttacttgcaaatctcgagagcttgtttcttagtaaaagaagtatgaagcttcattttgataccgctacagaaaatgtgtataccgaattgcataataattcctgttctcaaattcatcagtattgcattcaagtttggttcattattctgattcatctagcctaagaactgttttttctctttatatttcacgctgatatagacatttagtctccatgtacgtggaaagattaaacctcaagagtcaaaaccaagcttagttcacgtgggaatttaagtttatggttcagtaactaaaaacggctcggttgtagtttagaaaaacacataagtcttgatcttttgcatttttttcatcatcaaagactgaagcttactagaatatgttttaccttgaaagctagaagtctgccttatcaagtttttttattttttgataggatattgacatcaattctcactataaaagttatagctcggccacaagaaattctcttgaagcatggtctggtgcacagattgatgtggatctggtatgaatttcactttattctcttggtaatccagctaattccagcccatatcatcttttactgaagaatctcatcatgaactgatctttgaaactctgtcgtaggtggaggcaacaattgaacatatttgtcgtcttgaaggtggtggggcgattcttgtcttccttactggctgggatgagatttcaaaactgcttgaaaaaattaacatgaacaactttcttggagattcgagcaagttcttagttcttcctttacatggttcaatgccgacggttaatcaacgtgaaatttttgaccgtccacctcctaacaaacggttagccctctgagctatcattcgcatttcttcttttatcattctgctttgtagcaacttttctaagcgaatgctctgcttttgtaggaaaatagttttggctacaaacattgccgagagtagtattacaattgatgatgttgtatatgttgtggattgtggtaaagcaaaggaaactagctatgatgctttgaacaaggtggcatgtctcttgccatcatggatatcaaaggcttcagctcaccaggtattcgactaaccataaaattgtctatcagtaatcaagatccccttcattcaatgatctcagtactgcgcccagatcatagatgtgcttgtaagacttaaaacccgtgcttttctctgtggctttggtacaaatgcagagacgaggtcgtgctggacgtgttcaagctggagtttgttataggttgtatccgaaagttatctatgatgcttttccacagtatcagttaccagaaatcatacggactccattacaagagctatgcctgcatatcaaaagtttgcaagttggatctataggctcattcttggcaaaggcactgcagccaccagatgcacttgctgttgagaatgctattgaacttctcaaaacaattggggctttaaatgacgtggaagagcttacaccccttggtgagcagcaactctggtctttactattgtttttttagtttgtaaatatatgctacactcaaaaccatcatgttacaggtcggcatctttgcactctacccgtggacccaaatattggaaagatgcttctgattggagctatcttccagtgcgtcaatcctgctttgacaatcgctgctgctctggcgtatcgtagcccatttgtcttaccattaaataggaaagaggaagctgatgaagccaaacgatattttgctggtgattcctgcaggtatgacatctataggcaaattacgtttatttcacaccgtcagtcaaccaggtcactgtgttctgtttcttacggaaaagatttggcatatatgtgttgtgcagtgatcacattgctcttcttaaggcatatgagggatatcgggatgcaaagcgtggtggaaacgaaaaagatttttgttggcaaaactttctttcccctgtaactctaaggatgatggaggatatgagaaaccagtttcttgatcttctatcagatatagggtttgtagacaaatcaaagccaaatgtaagcatcaggaacccgccctaatacttcaattatattttcgaaccctgataaaatgtgaaactactgatcattttcatttg

SEQ ID NO: 36329 - DNA, 2341 bp, Arabidopsis thaliana landsberg
taacaagtggagagttttgggttcgattccaacgtggtgcgatgctgatcgagacttttttctgtttaagccgtcgtggtcttctgtgattggattactggatcaagaacatgtacatgtgctcatgcccatgcctatgcccatgcccatgcctatgcccatgcacatgcacatgcacatgcacatgcacatgcctatgcccatggccatgcctatgcctatgcccatggccatggctatgcctatgcctatgcctatgcctatgcctatgcccatgaccaagaccgagaccgagaccgttaccagatctgaagtcatctcatctgtaatggctattatgggtctggttaatcgtactttgtcttttatttaactaaattagtttatttaaagggtgcgaagaaagagttgtttttgttcttctccaaatctcaaatcagtttgtgtgaagcttaaaacgttttacaaattggtttaatctatgaactcaatatatatttgatgcaaaagtaagcacaactccctccgcaacacacataagcctttttaatctgaggccaatcaaatgatttcgatttccaacgtaggatttataaacaaacaaatcaaatagcttaaagcacacgcaaataagaatcggaatttacaatatatacccagaaaaaaactggatgcctattaacaagtaatcccatcaaaacaaaaaccacagttttaaaatcactataactcactggacagtttcaaagagattttccctatgcgatgtttgggaatatacttgagaagtttgggatcttatcaatgtgtttcaacgcgttctcagcgatctgtctcgttctaaaatcagcgttttggaaagcgtccacaagtgcagcgctcaggctctgttcctctgccacctctcttgctatgtcttcaatccgcaagatcctttccaccatccaaaccgctctccttgtcagcctctctgttcggttctccctcagaacgtttagtatatgccgtatcccatccgcttcatcgagtatcttgacccctttctctacatctaacccgtcttctagtaagctcgatagagctgcaagtgcggcctcaaccactttcacattttcatggtctaatagagccactaatttctccacagctcctccttcgacaaggcaaaatgtttctcttaatgaacatattccctggtggatcttgcacagcccgtttacaacgtgtggttttctcacacacgaaaagatcgagccacagtagttcacaggaggcggatcaggcatccgtgtcagctttatagactctagtgaaagattctctaaagccatggcggacaccatctgtatgttatcttgcccgttggattggagcagatgaaggaagagtgacgcaacatcgtgctcacggcaaaagttaatggcccgagcctctttgttgaaaacaaaagtaatcctagcaagtatacgcacaagtccttccagaaaaggattcacaaacctcattcccttgatatccccttggcggattccaaacactttggatatgattttttcaaaagcaccaacttctaacatttcctgagtaagacccaaatccctatctggcaattcagctaagagcccagcagcagcagcctgttcttcagtgattggtgtcttttctgaaatgatagcaacaaggcttccgagttgtccagcagtgccacataaggccttagctagttcttcactcatgaatggggaaaggttatgaagaagctttatggaagccaaccgcaaatcatcattctctcggacctctataaactgaaccaaactgatgattgcaccggaggttttaattgcataaacaacttttggaactgtttttgggcaactggtgagtccaacaagaacctccaacagcttgcactggatcgctggacctgtgttgctaattagatggagcagattctccactctgttctctgaaacaagagtggctttgtcaaagtcatacccgatgttcactatgttagcaagaatagtggcagagacttctttcaaccgaattggaaggttgtttggccccacataaaacagatctttgataagtggggggagaattcctttgctgatcaagaccttagcactcccttcgaacgatgagattttgttaagagctttcaaggcagcttcccgttggggcatgtcaccacttctcataagatcgacaagagaagaacccacagtctgagccacaagaaccttcacatcgttatttaagggaagctccccgagaaaggaagccatagagagttttgtttcaggtgaacctgcagatttcacatgtggtgtca

SEQ ID NO: 36330 - DNA, 3240 bp, Arabidopsis thaliana landsberg
cacattcgaattagtaaaaccatcgtcctacattttgaaaacaagtagagtttctgcagacggttaaatgattgctcacctcttcatcagctgctaaaacggtttcatccttggctgatggtttctcttctatcgaattacataaagcaagagatgatgaaacaccgacaaacaaagggcagagaataaccaacagatgagtctttttttaccagaaactcctcgatgtcgtagctgtgggctgagaggtgagcctatctccgaatctgtatcagtagagaagtctttgcctttcctgctaccgcccttggaagcccacttggacaaagcaaaatgaggtactgatcccaaagattcaactacaagagtccatagacatacactgtatataagttgcttccccgcaaaaaaaacataaattcatagcatataaacgtaaaccattgaactatcaaacgcccaaagcataagccaaacttaccatcttggtcagtcacttgcaatgttgaagaagcgggatgatacttaagatctaagagagtgctgttgatgcgtaaagttcccatagaatgtcgagcactagctagatcaaaccatccctgcaaaaataacacatttcagttccataccaaataagttaattaaggcagcagactctcactctcatcatatcagtgatatgaatccacaaaaaattttctcctcatggctactatagctagataatcaacgaaaacgtttcccacgcaatcctttttaatcccagattcaattcaattcaacacagaatatctcaagtcatctatacatcagaacataagaatcattcccataagatcccattttagctcaatacaccaaatatcattccaattacctctcgaagcttagaattcacagaatccataagcgttaaatatccatccaacgaatctagaaactgcaaaacattctcatctcctcccccttttcccagctcagttttcacttctgattctttattcacatccactgattcatctccttcctcgtaaatctccgccatcgaaatttagctccaacacacgcgaatcaacaaatcgaagcttacacgaggaagacaacgtaaagcgatcgaaacagagacagatcaatttctcgagtaaacgaggctattttcgtaatatttcaattagtaaaggcccaatagcccaagtagaagacaacgtaaagcgatcgaaacaaagacggatcaaacgaggctattttcgtaatatccaattaataaaggcccattaataccaatagcccaagtcgaaagattacctctttcgggtcaaaccggttatgtttatgggtgggtgggtagagcaagtcgagtgtgtgtgaacacagcgccaggctgtttgtctcagtttgtcaagttggcgtttggtggctccacgtctctctctatctctctctctcacatgacttttcgattttagtcaacctttcgtgcttttctcttaaaaattcgattttttcttcaacccatcttcttctctgctatttcctctcgcttttacctgtctctctcgttctcgcacggggatagaatcaactctgctcgagattttagtaggaggcaagctcgattgcttgcaattagatccatggatgaagaagaactcacactttctcgcgcgtttttagctcaaggagatttttgaagaagtggtcgttttcgaattgtcaacttcagaagaagaatcaactttggttttttcttttcccttctctgtatagctttgaggaggcgcttcttcaactggaacaggctggtgtgcttttttttttatctcttttggtatttttgaaatgcttcatgagacgttgtttctcttctttatctttttgacgaatattgctaaatttggtaatcttgctatataagggttcatgggagtgatgattttgggacactgttacttttcgtattttaggttatagttatgattgaaagtttgaattttgtttccttggctgtgaaagaatccgggaaccaaactgtggtactatccctttttgtgtttccaaaactttctcattcatttactatcaaatttcgacactttcttaccagactctcttgcattgatgtatccaagtgggttttcatctaggatcctatgtttcataacaatgaggtatttgcttgtacatttgcagtgagtttgaaggattaagatggttggaagctcggatggtgaccagtcagatgatagctctcattttgagcgaggagtagatcatatctatgaagcattcatctgcccattgacaaaggaggttatgcatgatcctgtcactttagagaatggtcgaacattcgagcgtgaagccattgagaaatggttcaaggagtgtcgggacagtgggagacctccttcttgccctttgacatctcaggagctgactagcactgatgtaagcgccagcatagctctgcgtaacactatcgaagagtggagatccaggaatgatgctgccaagcttgacattgctcgtcagtcactgtttttagggaatgctgagacagatattttgcaagctttgatgcatgtgcgacagatttgcaggaccatccgatcaaataggcatggtgtacgcaactctcagcttatccatatgatcatcgacatgttaaaaagtactagccatagagtgcggtataaggctctacaaactctgcaagttgtcgttgaaggagatgatgagagcaaggttgaatctgatttcttttcatctctgctgaatatttagtgtagcattttaatgggaaattgagcgggtgctaattaaattttcagcatcttgcaggcgatagtagctgaaggggacactgtgcgtacactagttaagttcttatcacatgagccatcaaaggggagggaggcagctgtttccttgctgtttgagctctctaaatcagaagctttgtgcgagaagattggttccattcatggagcactaatattattggttggtctgacaagcagcaactcagaaaatgtttcaattgttgagaaagctgatagaaccttggaaaatatggagaggtcagaggaaattgttaggcagatggcttcatatggtagactccagcctcttctaggcaaactccttgaaggtgaaagaatttcttttctttgtttggttttaatataacaattacgctctctacttcatttgcataaaacaagttatcatcttccttca

SEQ ID NO: 36331 - DNA, 6496 bp, Arabidopsis thaliana landsberg
tttagtgatcatgaaggtggaaatgttagtgctcacgctggtcacctggtatgtatttgccacatgatcttgatgcatgataatgttttgaacttatagacatttctgatggttctgtttttggctaatgatgtttcttcacttaggttgggagtgcactttcagatccatatctttcatttgctgctgcattgaatggtttagctgggccactccatggtttggctaatcaggtatgtatatccttaatgagtcttatattgttcgaatctacaagtgtatataacttgaactctaagattgactcttaattataagcttaaacttggaatcttactctgttttttttcgttgtcttgttgtaggaagttttgctgtggatcaaattagttgttgaggaatgtggagaaagtatatcaaaggaacagctaaaagattatgtctgggaaacgttaaacagtggcaaggttgacaaaattatgctctgctttgccttttgaaactatccatatgtattgcatgctaatcatgacaggccataacttgaattattgtataagtaatgaataaaagctttggattatgttttgattatggggtttgcctgtgaatgttgtcaggaaacttaaataaacatttgtcttgcaggttgttccaggatatggccatggtgttttgcgtaaaacggatccaagatatatatgccaaagagagtttgccttgaagcatctacctgatgatcctctttttcagctggtaactttttttccccctcaaatctttggtcatgctttaaaattttactggctcacaaattatgcaagtcaataggtctcaaaactttatgcagtggtgcctcctattctaaccgagctgggaaaggtactacttatactcatccatttcatgtgctaccagattttctgattttctctggttttatgaatcttgaaattgctgtatcaggtcaagaacccgtggcctaacgttgatgctcatagcggagtgcttctgaactactatggtctaaccgaagcaaggtaggaactacttgtgtatcgaggctttgaccttgttttgctgaatcttggttattatagagtgacattcctttcaaatatagatactacacggtgctttttggcgtctcaagaagtcttggaatctgctcgcaggtacatacatacattcatgccatcgacaattcgattttagtacgtatcgccatatccttcacaataaactcagactaatcttttattccttttctgtttcagctgatatgggacagggcacttggactgccacttgagagaccaaagagtgtaaacatggactggctcgataacttcacgcgcttgaaccgctaagttaatccctgactgatgttggtcaaggttctctcttttatcacttcagccttctcttccatttgattgggtagcttttagagatataaaaaaaacgatttttcgtcgaaattttgttctacagagttttcattttggttcttctgcaaaaacaataaagtcaaacaagtaaagaaacagtctttctcagattgagacaccatattattgttcctcaactttgatagacaaatgaagaccattgatatgtattgattagtctttggtgaattatcgcataataaacaatactcatgcaaccagtcccgctcaaacagagtgtttgaagtgaacagaagcagagtcaagaaattcaaagccctcgggatcaaacagaagcttcctcctatcttaagaagctccctacgaagctttatgatgattctacaaaacacatttgctatcttcagtgaacagtaagatgcaacgtgttctcttctaaaccttcagatatttggctaagtataagactcttcgtaatcacaaaaagccagaaatgcgaaattgattttgagtcttcttcctcacaagttttctctaactttcagaggagacgctggatcctgttaccgagaattattagaaaccgagagcagaggtttctagctaggacaggaaatatattattagaacatatcctagtcttccttgtcatggccagtccagtggtgcaagagaaacatacaattccaactcaagtatgtgatggacttgacttgcttaagccgtacggcatcctcggaaaaccaaaaccatgtcgaaaaaaggaacttgacttccttgaggcttacggtttcctgggctcgaacccaactacccaagtcaagtgacagagagtcttgacatagattaggcacctccttactaaagccagacaactatacaagattattggttcaaatattagtcaatcctttcgcgttttctggcttgacccgtctcgtcatgcaagggttggtcacgagtttcttattcttctaaagtttaccaaaattaatcccctttctttatctttgcgtgtgagtgtgaattaaagtattgatttatttaatgatgggtttaacttaaaaagtttaaaattgtgtcatcaaaacccatcaagacgtgtctgtaactctgtatcacacaaacattcgtgtgtactaataaatgcaaatattttagtcacaccttttcgtaattatttatttatcatttaaataagtgacaaatctgggtccaatctccattaaaggcccatttacaacgaattaaagcccatgtctttttgaagtggataaattccatgcccaagttactcacattaaccaacatcgatataaaaggaacattctatttctagtaacccatgagggtcattcctgtaaatagatctgccttccttcctcctctccgtagacggttgttgcacacaaagcgaggttggtttgacccgaacctacccgacccgttactatatatataaacacaaaatgggtaaagcaaaggtgaaaatcttatacgtaggtctatatcatttccatatgaagtggagatatatatatatagctaacgagaccctaaattttttttttttcttataacatatagtttcatttcatatatttaaaggcttcataatacgaaacaaggtgataagaaaaaaaaaaagaaaaaaaaaagcaaattaaaaattaaatccctaaaaacaaacgagcgtattgttatgaaggaggacgaagaagaagaagcagtgatatcgaacggcatgaacgacgacgacgatactaacaatattaacaacagttccactgaatttgataacaatcgtatcggagacggagacgataacagtaatctgaatcagatcaaacaagtatggggaacgtgggaggagttggtgttaacatgcgccgttaaacgtcatgctttctccgattgggactccgtcgctaaggaggttcaggctcgttcccggagttctctcatcgtttccgccgtcaattgcaggcttaagtatcaagatctcaaacgtaggttccaagattccgtcgacgtcggagacgaaaataccgaagcggcggcgaacgaggaggatgaagtcggtgaaatctcttggctcgagcagttacggagtcttcatatggcggagctccgccgtgaggttcaacgatgtgacgactcgatactgtacggagaagtctttatttctccgccgctggatctgagtttttcatttttattttaattcatttttgaatattttttttggtgtttttgattaggtcgcttcagttaaaagttaagaaactagaggaggagaaagacggagatgatggggacaataaaccagatctgaaaaacgacgaaactaaaccggtgagagttaaccgggaaacgacggagtctgaccgggatgataataggtcgatgaacgagtccaactcaactgcctccgtcgataaaatcgccgatcacgaccgattagacggagataaaatggttaaggctaacgagaattcgagaaatccagatcccgatccggttaataaggcggagacgccggaggaggaagaaagaacggttagtaaaagatcggaaatgagtaactcaggcgagttggatgaatcgggaacgtccaattgtcttggaaagaggaaaggacagaaatacagaagcggcggaggcggcggtggtgtcaaatcggccggcgataaatcacagccgttgatagatatcattaagcttattcggtctcatccccgtggttccgtgttcgaatcccggcttaggagccaggtaagcaaattgccttattttctttcgactttctttttaaaagtaaaattttctaatcaacaattaattacacaattatatcttgttttccaacgattttttttgtcgtcgttttccaacgttacgatcatttgcaacatgcgtcaaaactataaaatctttttgataaacttttacaacaattattctaaaatatctcgcgttcaatgttattaatatgttgcattccattactataatattgttttcttaataagacttaatcaagtatttagattgatagtttatagttagccatatatattcaggtctatatatagccaacctaatgttttttgttttttaaactccaattctccgactcaaatagtagtgttactttcagaactttattaactatctcgccaaataaatgcaaaacttattttgtttacgaatgatttggctttgcaacttaattttaaactctcattatatctttatgttttaatggtagattttgttgtttcctttctcttctttcccttgaaagaatttccaaggaagaccaatgaaattatgagaaattatccacacattgtccaatttggtcgggaccactccgattattttatagtcttaaaactcttttcacttttttttttcgatcaacaccttttccatttttcgaattacgctttattgtttcttattgttattagtatgaaacgtatataatttttcatatggtagcaaatatctttacgatatatatactatatagtattgaatatcgatgtttccttgtgtgtttgctctgtaaatttcacttccatatccgattatgattttcgtacagttggtaattttcttatggaatcacttttttttataacgtttttcttgttacccacacacaaggtttttcgttgaagaaatttgttttttttccgactcatttaccattttgatcacccaacactggacacctggcagcttccggttgaatcatggttttgtcgtgtctttcaagatatggtcaacttattgacttttcagccgcctttaagccagaccaatttttgggctttagttgggcttctagaaatccattacttatgacgtttttatggtggtctcatactttctcatctctgtcatctcgcaggacactaaggattacaagaggttgataaggcagcatttggacatgaagacaatagagaagaagatggagaaaggatcttatgtttcttcaagcctctctttttacagagacctcaagcttctcttcacaaacgccattgtcttctttcctacatcttcctctgaatccatagctgctcaagagctaagaacactcgtctcaaacgagatgaagaaacgaacgggaaaattgggtcactgtgtcatcaaatcagaggctgaatcttcggtttctagacagaaatcttctgttctttctcctgttccctgtaaaaagaagagctctgctttgaaaaaaacgtctccttcttcaagctctagacaaaaagatgagaagaaatctcaggaagtttcggaggagaagattgtgactactactgctactactagtgcaagaagctcgaggagaacgagcaaagagattgctgttgttgctaaagatactaaaacgggaagagccaagaataatattaagaaacaaacggatacgaaaacagaatcatctgacgatgatgatgatgagaaggaagagaattctaaaacagagaagaagacagtagcggataagaagaagagcgtggctgatttcttgaagaggataaagaagaactctccacagaaaggaaaagaaacaacgagtaaaaatcagaagaagagtgatggaaacgttaagaaagagaacgatcatcagaagaagagtgatggaaacgttaagaaagagaacagtaaagtgaaaccgagggaattgaggagtagtacgggtaaaaagaaggttgaggtagagaataataatagtaagagctcatcgaaacgaaaacaaacgaaagaaacagcagaggtggctactggaaaacgaggtagggaatcgggaaaagacgataaacagccaaggaaaagaagcagaagatgaaactgaactagcctgtggttaagcatttgtacatttgatgtgccagaagtattcatcattcctcttaacatcactgtttcggagggaatcataggtcttgttaggtatttattctcatagttcccagtttagttttttttttgtttaaactgtgttttcgtctgttagagggtataactatagccgtctatcacctgagtcttcatttatctgt

SEQ ID NO: 36332 - DNA, 1371 bp, Arabidopsis thaliana landsberg
agggtccgatggattattctgaatgcccaaaagattcgctttgtataggccttttggcccaataattccaatttacttccattctttcatgacattagcccatttccttcttttcaattttattattggttttgtcgagtgaagcgtaaaccctaaatcactaatcatcgattcttctccgttggatcaaaggtatcatgaactcggaacttttctctcgcgttttttttcttcattatttgataatcgaatccgtaaattcaacttgagttgtggcgctgtagatttctcttatagattttagaacgaagaaagaaaatcgtatgtcatctgctttctcaattttttttggttgtgggtttcttttagtgatacgtatcagtgaatttggtggaatactggattggaaaattgggggtgcggacttacctaactaacagattctcgatctcacagtttcctcatgtgtgtaaatcttgtaacatgtcaaagcgttccaatgtctttgaaacagtggctagttggcacatacaacacccaaattctcctaatggtgtctctcgccatagtttattttctcctcgctggcttcttcgcttaccatgcgaatctctgcttaaccaacacaacaactaatgaggttttaacttttccgtctctggaaattaactatgtctctccatcttaataacagatgattttttgggtttgtttactttctgatagacgtttaagtggagagagtatataagcttaaataagaagctcagtgaagctaaggcgagcgctgctgctctcaaggccgggatgtcatgtgaactaaagaagccatcagctgaaagcaaatgcttcgggctttgtggaagatcctctgcccgtgaagaagaagtcaaagccgacgctatagcgaaacggaatttgtatgatagaggaagttttcaaaacgtttctgagattgttttccctttatcatcaagaccatcttcttccaacaaatcaaaacgaaaatcggaatagttagtctttttcttatatgtacttttactactttatagcttttggtagctttagtgactgttttttgtgatttggtcctcaatgcaatttagacttttacatgacaccttatactgtacatgatctgagatttatatggtaaaagactattgtgattgtggaaaatactggaaattcaaaagctgagtaatactagtagaacagaaacagcatcggcgaataatgttttcttcactcacaacttaagctaccattacattctactaattatgcatctctcccacacatgatctctgaagaaagaaaactgaaacatacttacgagtcagttcgtggaactgtgtttagtctatg

SEQ ID NO: 36333 - DNA, 753 bp, Arabidopsis thaliana landsberg
aggatacctacatgcagatctttggggatctccaaatgttaccccatctctctctggtaagcagtattttctgtctataatagacgataagtctcgaaaggtttggttgatgttcttgaaccaaagatgagacatttgacaagttctgtgagtggaaagagttggtggaaaatcaggtcaataagaagattaaagtgttgagaacagacaacggcttggaattctgcaatctgaagttcgatgagtactgtaaaaagaatggtattgagagacatcgaacttgtaactatacaccacaacaaaatggtgttgcagaaaggatgaatagaactctcatggaaaaggtgagatgtcttcttaatgaatcagtactaggaatagagttctggacataggcagcagtttcagcggtgtacatcatattcaaatcaccgtctttggcttaatcgaaaaccctggatacaaacatctgagaaggtttggagcagtagcttatgttcatgtggatcaaggcaagttgaaaccgagagctattaaaggaattttcatcgggtatccatcgggtacaaaaagatacaaggtatggctcttggaagaacaaaaatgtgtcataagcacgaatgtaatattccaagaagaagtggtctacatggacctgaatgacaaagaaacagttgttaagaaggaagatatcagaagtctaactgataatcatcttgtcatttctaagactagagaagtttcagaccaagg

SEQ ID NO: 36334 - DNA, 1870 bp, Arabidopsis thaliana landsberg
tttatcaatgaggatattggtagcgtcgggggttttttctcactggccagccgctaaaatacctataacacatactattattgagctctcaattctttcttaatatgttcctgaagttgctgtcattgtagtttatacatatagtttcattgcttagatcttggtcatgcatcagttcatttgcaatagttttatgatgattgtgacatgtgtttaccgattcactggaaccctataatatttatgaactgaagtttggaagtgattttagatatatggcgtttctcctttcttcccacatctttggctggaatggatatctggcacaggaatatctacagtaacaatattctcatctaattcattaattatgcaatttttgtgtcctgttgcagtttggccgaagcacttgatatgcaacctcctgttatgccagaggatggtacaactaggctcacagcaggggacgaagcttcaccctctggtactgtaaaagatacatctgtcccggaacctatttgggacgacgaagacaccaagacattttacgagtgcttgcctgatctgaggtcagcttctatttatgttcataacaaacaaagatatgggaaaatgtgtagtttgcaagtggcattcagaaagcatttaattttcctagaagagtcttgactatctagttctgtattgcgtcaacttttttcttttagttttcaattgcttatgtcagatgcattgtttctctagggcatttgttccagcagtattgttgggagaagcagagcctaaatcaaatgagcaatctgctaaggcaaaagagaaactctctgtaagtggattacattctacattatattcgtcactttgctttcttaagatattgttggaagacattaattgttgttgctatgtgtgaacgtgcatggtgttcctttttgatatgtacgatgaaggacccttggtcggcaatcatcactaaattgtctaccttggaatgacataatttgcttgttgacagatttcgtgctgcgtatatgtgcattgtgaaaaacgaacttattactggagttatccctccagcgagaattgctttcttccttgcttgttgtataaaaagcctacacttttgatttaatgccttgttgtgattgatcgtaggagtctagctctgaagttgttgaaaatcaacaaacaaccgaagatacaacagaggtttctgctgattctgctagtatggatgatcgatcaaatgctgagcagccaaaagagaaggaagaagtagaaaaggaaaaggctaaggatactaagaaggaaaaaggaaaagagaaggatagtgagaaaaagatggaacatgagaaggagaaaggtaagagccttgacgtggcaaacttcgaaagattgttacagcgacttccgggttgtgttagccgggatcttattgaccagttaacggtaagagtccttgaaatggttttctacttgatgttttatttgttgaacctcttttctccattgtttatatctatactttgtatttccaggtggaatattgttatttaaattccaagacaaacagaaaaaaacttgtcaaagcgttatttaatgtccctaggacatctctggagttgctagcatactattcgcgtatggttgcaacactagcatcgtgcatgaaggacatcccgtctatgcttgtgcagatgttggaagacgagtttaattctctggtccataaaaaggttagtaatgaattttaccttcaatacatttgattatgactgcagttttaacctttgagcatactgaagtcaattcactctactgatgcgaatacctatgttctcagctttgctcccaacattcccttataaac

SEQ ID NO: 36335 - DNA, 3693 bp, Arabidopsis thaliana landsberg
  unsure (1)..(3693): unsure at all n locations
ttgcaactattaaatcccctatattgagaaattaagttgaggctgctaaaataaatgtaccggatgtttctatgaatcggaatctgaccctgaatcagtttctgcatcacacttcaccccaaacggtctcaatctgtttgtgtttgcttgcaatggaggcataccatcatcatcatcactcgaatcaacttcaccgtcatcttcatgctgttcaatgggtgagcttttctcagctggaatcggtctagtatctttgaagatttctggcctgcattcaccatgtccaaactaacatgagctataattactcaatatgagaagccatccatacagaacaaaagatagaagctataccattccggagacttttgaagaagacggacttgctcaaagaatagaactttacatacaatagatgtaactttgctaccagactcttgagccttttcctttcctgtatggtcaatcactacaaagcttcctgcaaatcagtgtagcacatctcaaactcctccaatccacaccaaatcatgcagtaaatctaaccattcaagaaagaacaaaccagagaagactaacaagaaaaagtacctcgtctgatccacatgctctcacgaaacttggctggaaacaaagctaatgagttctctccttttgcatccattatcttcaaagagacaacaaaacaactacagcagttaaaacacaaactttaattcagtacatacatacatacaaacaagccaacccatccaaagaaaattccgaagaaaatgctatgaattggcgagattgtatgaaacctaagaaaatagcgtttatcttttacctcaatttgattggaacctctgagagagacgacttgggcaatgctctgacattcctcaagcgtgaaatcctggtccgacgccgcttgtttcagattccttcttcctctgttcatctcttctacctcaaattccaaaagtccgaaactttcacaaacaaaattacaaccaaaagatcaaaatcgacagaaaacttgagattagggttttgcagttgtgtgccgttttactggaatcggaatagttccaatagagaagacgaggtagtttcgttattttatttaaaagctgagggtactattgtcattctcaagccacgtcggtgcaaacgaattggcagataaaccggcaatacgttattatatcacgcggcggtctattaatcttctccggcgcttgaaattccactcctccatagtctccgtcgattcgcaatttctgaattttgaacgaattctctttcacttcacaggttcggaatcatgttttcatatcgtaactgagtttgttttcgtatgaattatataactggttcaataactattttgaaattgcataaagtttttgggtttgagctatgaaattgcataaaggtcatagcttgtttgtgtgtttttgaatttttttatcttgtttatgaattcgcagtactgaagtttctattttagcttagtgatgggtaggagaaagcaatccaagccccagcgtgcagtgggtttgatcactccaactggttctgaatccgatagaaatcaattacccggcgacgaagctgagggttcaggggacaagaatgttgaagatatcgataagccgtattatgtgaacatatgtttaagtagtcgagtttcggagcagcagcagaactttgatttagctgaagttgttctaacgaattttagtgtaagagaacgtgtaggaagtagtagtacattcacaaaacctattgaggttgatcatgatctggattgctcgttacggtttcggctttgcaatgtgactaattttgttgatcggattaagcttggtcactggccggttttgtcttcgagtgatataactttggaattggttgataataaggtgtctgatgatgaggttgggtcagtgatttggtctgcaagttttgatggtccaggtgaaggggtttcgggtcttgctcatttggcaagtataaagtttttgactttaaggctcatgcctggtaatgagggattgttgtctcctagagttagagttgagatgcttcagcaggcttttgatgcatgtgattctcttcttgagaatacaaggcagatttggaaaaagagtatgattcatgtcatgtcttggttgaggccagaggtaatgacatcagaggctaggtatgggacaagattcaacgtcaaggatattgagtcatcagttgtgacggaagatgaaactttggactctagtaagcagtctagttttgatgctgctgctttttatgaagccataaagccatcaaagtgagtgaacaactttttttctctctttatgtgccttaatatctgattttatctttccaacttattagcacaatatcgattcaggacggatgcgatgcttggagatgacataactgatttgctcccagaacttaggccgtaccaacgacgggcagcttattggatggttcagcgagagagaggcgatccaataacgttgggagacaaggaagacaaccaattcatttcacctttgtctatctccgtgggattccttgactctgctacaaaaatgttcttgaacccattcaggttagtagaaaagaatctaagtagtcctttttaattttattttgaactataagctcctctcatcgtcaacaaatagtgtatgttctgctcagtgaagttccgccatttacagaagaactaatttgttctggtcaatttgtcatgttttggttgtttttagtgggaatatctcattgacaccagagtatttttcacctcgaattcagggcggtatccttgctggtatgaacaatttgcggcttcattttgcctccatgtactatataatcagaaaattatttacaaggataattttgttttgacttgctttcacaaagaatattttcagaaatatatgttttaagtcgtcttaaatgctagatggtgtatatggctttgtctacctctaatatttctcatgcgtttcgttcttaatgtggtaaagtacgaatgctgcagatgaaatgggattgggaaaaacggtggaactacttgcttgtatcttttctcatcgaaaaccagcggaggatgaaatttctgtgtctaatggttcatcagttactgatgttttgaacgctggcttgagaagattgaaaagagaacgtgttgagtgcatatgtggagctgtcagtgaaagtcacaaatacaaaggagtttgggtannnnnnnnnnnnnnnnnnnnnnngcagcatgccgactgtgtaggttattcacctaaagggaaaggtaagaaggatagtcaacatattgatgaaaaagcatctcaaaagaagagcaaaaaggatgcaacggaaattattgtcagagaaggtgaatatatttgccaaatgtgctctgaacttctacaagtgactgcctctcccatctctacgggtgccactcttattgtctgtccagctcctatattaccgcaatggcattccgagattacacggtatgagattcttctctcccttctgttatgttttgactagaggaacacttaacaagatggctttcactagacgtaattttttgtgtatctccacataatgtaatgagagtcctctttccttctttcatctgtcatgttgtagccatacacgcttgggatctctcatagcatg

SEQ ID NO: 36336 - DNA, 1008 bp, Arabidopsis thaliana landsberg
  unsure (1)..(1008): unsure at all n locations
gtttaacatcaaaaaaatgtggtgatcgtttactgatttgtcttcttttaaatcaggaagcaaggtctgtgaagaagggctacgaaagtggtgaatacacacaacgtcaagcaactacggcaaaggatcgaagcattgtctaagagatttaattacgaaacttcaaactcaaagtaacacgtagttgtaaaaacgtttttttntgttttaattgaataaaatttcatattcatttagaaagaaataacttatcacgttgaagaggaagtgtcttcttggtaagttgggtgggctgtgaacttcggtttcacaaatgacaatttgccaagcgaagatcataagcccttagacataaaagagcactgccagcaaataataagtgacgtaatgttaatgattgaaagttctatttgatcaaaaaacagggagcggccatctatttatttttacttggtttagcattgtaaagatcatttttaaagaatttgatattatttttgattaaaaatcttataccattgggtttgaaatattaacaagactacaagagtctaacacatcccattataaatcaatctttttcttcttcttccaggtattgtacactatagagaacttgttctgtaatcaatattctgaaaatctcttatgtagcatatatagtttctttcgcttccgtaagttcctcttgttaatttggtatggatactatatcctatattttagattttaattctcgctgcaaatgctcaatgaaatgcaggttgatgttaaactgctccaagaatccaatcaaaaaggtattgtaatctagtagctagcaaaagcattaaacgtaactttcccaagttgttgatgacaaagattcccaagtcatcaaccgtattagtttcccataccacatctcatctcaacatcaaggtaatattattatttttattgatttattagtcaaatatgagaaagcaaacaactatgttttatatcattctgtaagtaataatactt

SEQ ID NO: 36337 - DNA, 1464 bp, Arabidopsis thaliana landsberg
tagatttcggacaagacaattggatgatagttattcatagatttggtcgattctgtctcctcttagttcaaaatcttggaacttggtttgccgtagattcagtatatcacaagaacacttgcttagataagtttggtagttgtgattgagtagagtatgaatttgcattccaagttgttgtggttggaatcattcagattcttgagtctttgtattatgctcattcatgttttcaagcatgtataacttatagagcattgtggcctgatgctttagctcttttctgcagactttgagcttgttcattaggggttgggcgtcaaagaagttcatgacaggctggtaaggaagagttgaaattttggcatttgatgaaaacttccacagattagttttaagtctccattgctttttgcagtgttatcctacttcctattgcagttactttctatacaacatggtggtttattcactttgtcgatggattcttctctccaatatatgcacaacttggaatcaacgtatttggtaagaatttgagtggcccttctttatcgaatgaacaatttgatatcgttccgtttcccacaataagtttgattatggttttttgtaggtttcggttttttgacttccattgcattcatcttcttggttggggtgttcatgtcttcgtggttgggggcatcggttctgaacttgggagagtggtttatcaagcggatgccgtttgttcgtcacatctacaacgcctccaagcaaatcagcactgccatatcgcctggtctagcttgcttataaaaatcttgttttgcttctcaacattaagttgatctcctatctcatcttgttcttatccatttctcatcacagatcaaaatacacaagctttcaaggaagttgcaatcatcaggcatccccgtgtaggtgaatacgcatttggcttcattacatcaactgttgttctccaggtgagtgaaattgctttgctcaacgattttggtaaaggatacgaaggcagatacaatctcgaggcatggtttactataattacatcatttgtttatccaatgtaataatgtccttcgtccttgcagaactatccaaccgaggaggaactttgctgtgtatacgttcccacgaaccacctttacattggagatatactacttgtcaacagtaatgacgttatcaggccaaacctctcggtccgggaaggaattggtgagatttcagaatctaattgtctgtattagatacatttatcgtttgttatatagcattcaaattattttgtggaaagatactgaacactgtatactcattcttcatctgcagagattgttgtttcgggtggaatgtcaatgccacagattctgtccactgttgataaacctttggcctaaattaatagagctacaagcttatagtttaaagcagaagaatttgtctttgtgttgaatt

SEQ ID NO: 36338 - DNA, 1577 bp, Arabidopsis thaliana landsberg
ggatagattgcttagctacagaatcatatttgcacacaagtggagaacattaacatcatcattgtagtgacaaaaaccttaatacaaatggattggggtatgtacaattgagaaaataacaactatggaaatcgaatcagatggggaaaaagatgataaaacaaataaattgagatcaccaagagcccagaaatttctaagcaataggaaattcgaaaaataatagctaaagatctctagggagactgatgaatccacttctgcatcattaccttgacaatcggttataagctgcagaagaagtgatgtaatgatgcaactggcgagggagattggggatttcaattggatgttcgtgttcatggccggagctcgtatcccgtactgtcggagtcccaacttgacgatatttctttctttactatttttgtaagatttaacattagtttagttgagaaatatctttaacttttttttttatatcgggagaaatatctttaacttagtacagtattaagatcataagtaatgattaatcaaattcaatctatgaaactaaacaaacaccgtattaaattgaaacagtggaaagaaaaactcgctgatattattagaaaaaaagccaacaaaaatacaacaatttcaataagaaaccaaaataaaaagaaaaaaaaacattcaagaagaaatagctgaaaagaaaacccttttttactgtttgcatcttcatctcttcgcctttaaggcgatcctactaaagcatattttatatatatggtagataatagaagattactcttgcatatagagaaagatctctaatcctggtacttcatctcagacatgaggaatccaggcatttcataagacgcagagaacttctcgacatcagccttgagctgatcgagatctttgttgttcaccaaacccttgttgaagtccttcaacaacttaccgtatgtcttctggatgtccaacgtcagtgtcactgcacggctcaggaattctcctatctgctcaaagtccttctccaccaatcctctcgatgtcatcgcgggtgcacctacacaagaacatatatttatatgttagcaagatcccacaaatgagattcaatggccattgtcaagaacatttcagaatttctctcttaccgattcttacacctccaggagcaagagcactactgtctccaaatactgcgttcttgttcaatgtaatgctgcacagatcgcagagcttctcaaccttgtttcctgacagaagaatatataaacatcaggactagttacagaaaccatagggtcgcaaaggtgggttttttttctctgagatataattcactcaccggtcaatccaagagggcgaagatcccagagaacaaggtggttctcagttccattggtcacaatctggtatcccttgctcattaggtagtttccaagggcaacagcattggctttcacctgttttgcgtagaccttgaacccaggagtattggcctgcttcaacgcaacagctagagcaccaatctggtgattgtgtggaccaccttgaagcgcagggaatacagcgaa

SEQ ID NO: 36339 - DNA, 1243 bp, Arabidopsis thaliana landsberg
gaagagaaagctgacaaaaacacgaagcatgaaaaggtctcattttttgagggtcgaccaatatctgcagcgggtgcagttcgtctcagtgaaatcgcgaagaacatagctcatcttgctgtcattcagaatacagccttatttgatccatatgtgaaggcagttcaatacaaactcatctcctgtgtatacacttaaataacagctgagtttgaacactggggggtttttaaataccattttgtttcctataacccccacaagactgtaatgttaaatgcaggcgtgatgatagtgttttatggacaatgcgtacacaaaaaatttcagattagttaaagaaaaagggatttcagattagttaaagagaaaggcaagttcttttaattaaacatttgcatttttctaattatgatgtcatataaagaaactaaattgttgtgtgctgtattttggatacctctagactcggatgggcatgaagaaacatttaaatggttggcttatggtcctagaagcatcgctaggtcttatactgggtacatagtgaatggactaaggttccacacaaatgttgttgataagctaagtcagaatagcggagtgtattatgaggcaacgacgatgtgtcgttctagtgccaaggacacatcccaagcagttgattgggtatcatactatgggagagttactaagattattcttctcgattacaatgtgttctatgtccctattttcaaatgtcattggtaggcctaggcatttcgtattctgttcaggttcagatcggtaattcggtaatacggatagggatgttaaggaaccgcctggttttcggatctgattcaattcgaattcgatcggttttgggtcggttttccattttgaaatagaatccgatgtagaactgaaccatatttcggtcaggttcagatcggtttatgaacccaaaaaacccggatatttccaggttatttgcagtctatgaatttcttagctaagtctgagactgagttgagcttgttcacctcacatcctcacctatcttagtttttgacactactccattcttcttatggttaactattatctgcttctcatcaaacatttaagaattaataacaagaacgtataaaaggcaaaaatcaaaactaagaagaaactgcatagcataagagtttgagaaattagaacaaccaaaatcaaaaatcaatagattcaaaacagagagaataagagttta

SEQ ID NO: 36340 - DNA, 4569 bp, Arabidopsis thaliana landsberg
tatttttaaaatttgcaaaaaataattagttttgttaaaataataggagatgcaaactaaataaattctggtcttaactaaaaaagcaatagatttgttacattgaatgatggatagatttgtgagttgtgactttgcttaagctaccccaacagataacggatatatcatatagatgttgagtaagaaagaaaaaaaaacatttacgattgcattctcgtaatgggctttatgattttaaggcccaatagatgaagtaaggctaatgcacaactttaagaaacgtaattctagcaagtgtttatcgactgcgttgtaggtttcttgtgttcgtggcactatggattaggttttaatatggtttctaatttcgttgatttcagtggcataagtccagttgttgcttgtggcaaactgtttcatgtacaaaaacacttacatcattactaaattatgtcatgggtttggtttcgttaacaataagtcaatctccttgatgagttttatctatatgattatctatttctctatttgcaacatgtagtagattgaaatggggctgcaaaatatgctcttgcaattcctagttagatctagcttttgataatacgattatctaatttgtcatttcgatatgatagatagattgtttttaaaagagatctcaaccacttttctttaactaaaataaaaaatttagtcactttttattaaaaataactaaaaaattttaaacctatcaggacacttccatcaacagtatttaaaagagatatttattattaaaataatacaaagtggtgaaaagaagagagaagtgagaatcgtctctgttttcagaaactctgaaaaatgtttatggccacgtgtttttccagaaatgattgattttattctttttattaaaatttaatactttatctaaattcaattaaaataagcaatattttattcatgaaaaactcttttttgagaatcaaccgatgtagatggtctcatactctactctgttgattgtgtttaagtttctgaggatttttctactttccgacgttatgccaagaggctggtcttcactagaaaactacttccacccaattcaagcaagtatgacctcttctcccaacaatttattcatgtactgaaaggccattagaagttgactgaagtgtgaaggtggagattatgtattcacttgttgatttggtatacattctatgtaaggttcaattatttacgttatataattataatggagtaatttacagtaattgggttaaaatggtttgattcggtcaggttgatacggtttggaagttaaacccggcctagatatgatgttacaaccagtccacatcttttatgattttagtggaacaaacgaagagttatttagacgatacaaacaaggtccgaataagtgtgagctgtcccaagtaagaccacgtaatactcacctcaacaagatagtgttcttaaagtgtgtcaaacacaatcacacacacacaaatcataaaacacaaagacgataatccatcgatccacagaatagacgccacgtggtagataggattctcactaaaaagttctcaccttttaatctttctccacgccatttccacaagccataatcctcaaaaatctcaactttatctcccaaaacacaaaacaaaaaaaaatggcttccactgctctctcaagcgccatcgtcggaacttcattcatccgtcgttccccagctccaatcagtctccgttcccttccatcagccaacacacaatccctcttcggtctcaaatcaggcaccgctcgtggtggacgtgtcacagccatggctacatacaaggtcaagttcatcacaccagaaggtgagctagaggttgagtgtgacgacgacgtctacgttcttgatgctgctgaggaagctggaatcgatttgccttactcttgccgtgctggttcttgttcgagctgtgctggtaaagttgtgtctggatctgttgatcagtctgaccagagtttccttgatgatgaacagattggtgaagggtttgttctcacttgtgctgcttaccctacctctgatgttaccattgaaacccacaaagaagaagacattgtttaagcctcacctactcaccagcttttgatggtttaaaaatcatgtctttataaatttcacattttgggttgagtttgttgttactaaaaactattgttatctgttgttattgttcctggtttggctcaccatcaatcgatgacattttaaactatgcaactgcaaattctgcaacactttcgatgagaatctaacattatcgtttaaacattggaaatacattttcttgaagtctagctagctttggtttgtagttcttattctgaactcaacaatcatcaaagtatcaagaaaaatccgatttgcgagcaattgtgaaatcttagattgataaattctctagaaagaactatacatgttatttgtagctatagaagaaactatggaatcttatactctaattaagcccaaatggcaagagaagacatgagtccagctcctaggaacaacattacataagatacaatttgaagcctaaagttacacctcatttttgtactcaagaaatcagcagctatgagatccactaaagccatgtacacaagaattccggctgagagcgagtccaagataccttcagtgaccaatgctccgacactgtgagaattgaaagacgacgccactgcggttccaatcccgatccctatcggggttgtgagggcgaaaaaacaagccattatggtcgctgatttgttcctgaattgcgcttgggagatgcatccaccgagcgcaaatccttcaaagaattgatggaaggatagtgctgcgattagaggccggattgtgcaaggagactgagatactccaagggatagaccgatgattatggaatgtgacacaattccaagctccagaacctaacagtattagcacaaattttggagcttttttgaagaaacccaaatagtatttgcaactctgaaagaatcagaaaaaaaaagaacagagctttgtacctgagaaacaacgatatgcctagctccattaacagcatccaaacccccgtgtacgtgtccatgtccgtgtccatgcccgtgcccatgagcatgagcatgaccaatgtcgattttactgtgtccttcacatgaatcatgaccaggaggatgactatgtctatgatgagcagcatgagcatgaatgccaacaatgtgaatcccaccactgtcttcttcaccaaacactttcccatcattcgttccttctccaatcatgggaacaacaatacccggtgattgttcacggccaaacggttcaacagactcactagcttccctctcttgcttccgttcatagtactgagtccccatgaaatccacaaacagagtgatcaaagcagcaatcatcgcaaagaatcccgggaaaggaaacttagaccaagggaaatccggtaagcacgggttcttcaaagcttccgtgccacccgccaacatatgaacaaaacccgtggcgagaatcacaccagctgcaaaagctttagcagtcacaaagagattaccatcagtttgaaggaaacgacggttcctgccaatgagtggtatagttacaccagcagctccagctaagagaatcgaagcaatggctacaaatttaagtagaaatgcagcggaatcatcacgacaaagatctgactcgctagcattgcaaaggacgttagatgaagtagcagccattgcctcaggaactatctgcaaaatggactctgttgctgtttttaaaaaaaacagaggaccatttaacaaatcaagcatatcagagcaaattcaatattacattagtaaataaacctagcaatggataagaaattgcgagactttgaatcaaatcacatgtaaagacatcaaaatatgaacctttaagtcaaatgaaatagttgacgaagtgttcgatgaaatacctgagagagactttgtttctgatccgaacaagtatagaggaaccagtttccaaagaacctaaataagaaaacccagaatcagtttcggtaatcaaaacaacaaacttcaatcgaaacaatcaaaattctgattgattacgaacatcgacgaagaacatttggggtctaagatgtcctcgggatcatgaaaagtgaagaaataacgtaggattctcgcaatccgaaaaaacacgaatgggaattaaatatgagaatcagacagatccatctgatgatgaaatcagacaaaagcaagttggagaaagatacaagtaatgtcgacatcgtgaggaagtttgcagttgagaaacgggttagagtcttggcatagaagatacaattcttccgaatattgtagccacacgccaactaaatgtcgacattttgttgtaatttcattttttattcatcttttttttttgggttaaatacaatactcacccttcatcaatactttttggattgtaaaaaatataaggtttgaatggtaacacaatacacttttgtacagttt

SEQ ID NO: 36341 - DNA, 4860 bp, Arabidopsis thaliana landsberg
agtggtcaaagggagaaagaaagtggtcaaagagatattgaagggaagagtattattggtgggtttatgtgtgtttttcatctcaattctcaccttttagtgcatcaatcaatacaaaagtatctgtcacacaaggaggaccctcccttatgggtattgggtagggtaggctttctctagaatagaacgtgaatgaatcgaacaatgtctctattgctcccgctccgttaccataaccggaaaccaaactgaagatgacttcaaaccaaaaagataaccatgcatgtatttaaatattagatgtaatctaactttctcatttccggcgttattaattagaaactagacattttttatgcaaaaggtttaataagttttctgctcgttcttggcctatctatatatttaaaagaatcggggaaactctatatacgtatcatgattaagagatgatttatctttctagtgatcatgcaggcagatttatccaaagatgaatattaataaatttgttgtgttacatatttttagagaattagaatatagagacttgacttcaatcacatcatgcatggtgtaatcttactatatatatactatgttttctatctctttaatttcagtctgtaaaatttatttatggatttaaaaaaaaagaaattgactgtatagtgttaaacctattatatagcctctctttttctcgagcacagttaaattttgcatgaatgtcatagaaaataatgatagcaaaagctttaattttggatgttttaggagaaatagtcatattttggatgtttacaaaaaacagttgtatttattttattttttgtcaatatctatagtgcatgtcgtttctacagtttctaacgtggttcatgtcaagtagttatcagttttttttttttttttgccataaccataattagatgatggataccaccaacgaatcatttataataataataatttaaatgacaacaaagaatttgaaaaataataaaataaaatagaaatgacaacaaagaaataagccccacttggccgattgaaagaaaatatccagttgactccaaatagactagaaagagaaagaaagagagagagagagagagagaaccagagattatcgaacacgaagcagaagacgattcgtggaagagacttggagagaatatttctcaatgtctcctctcccaatcttccatcgtcttcctcacgccacgttctcttcctttctcctctcactggttcgttccctccattgacgaatgttgcattttgcttgttacctacgactgcttttgattctctttctccatttgggtttcttccgattactttaatacttcttcaatttggacttgtcgtcaacattttcttgctaaagtatggattttttgttgttgggttactgttcagtttgactttgatttcagagaacccattctttgttgttcttgcgtgctacattgcttttagatctgattcactaaatccgttaaaaataccaaatctttatcgtgtttgtctttttgtcctctaagagcattaaaacttggtgtttttcttgtcctctagttctgggttctctaatcgttttctcttttacttgtcattgtagtctcaagctggaagttctaaaacatcagtggcattcctcaatgccttcaaatcagaagatatcattgctcgaattggactatggtggcagcttataagggctgttgtagttgtacctgtcttcaagttcctggtggttctatgtttggtcatgtctgtcatgttcttcgtcgaggttatgtacatgggaatcgttgttttgtatgtcaagctgttcaagaggaagccagagaaattttacaaatgggaagctatggaggatgatgttgagtgtggcagtgcaagctatcctatggttcttgtgcagatacctatgtacaatgaaaaagaggtagagactgaaccagcaactatttttccagtgattggtatgtggttgaacttatttggtgggatgttaatgtatgtggtaggtttgtgagcaatctattgcagctgcttgcaaaatctcatggccatcgaatcgtataataattcaagtgcttgatgattccacggatccagccagtaaggtccttgtttaacctctatagacacttgtccctttctcatctaaatccctctgttttagactcatgattgtgttgtgttaaagtgagttccttaacatttgattatgtggcaatgatggacggaaacaggagttggtgaaaaaggagtgtgacagatggtctaaagaaggtgtcaacataacgtttgagataagggacaacaggaacggatacaaagctggtgcgttgagagaaggaatgaggcatagctatgtgaagcagtgtgattatgttgctatctttgatgctgatttccagcctgatcctgacttcctccaccgcactgttccattcttaattcacaatcccaagttagcacttgtacaaggccggtgggagtttggtaaaattccttagttacctttcttttctttttccatcataagtttatagattgtacatgctttgagatttttctttgcaaacaatctcagtgaacgcgggtcaatgcatgatgacgagattacaggagatgtctctaagttaccactttacaatagagcagcaagttggatcttcaacatttgccttctttgggttcaacggtatagcattctcaattttcttttcttttctctccataaagctttttcttattctctgaaactattgcaggaactgctggcgtctggagaatctcagcattgaatgagtccgggggatggaatgaccagacaacagtagaagacatggatttagctgtacgagctacactgagaggctggaagtttctatatatcgatgatctcaaggtatgtatagaagattcctctcttttcttggaatcttggattgtgcatttgaatcattaatgcgttatctgtaggtaaaaagtgagttaccttgttccttcaaagctctgcgtagccagcagcatcgatggacttgcggccctgccaatcttttaaggaaaatggctggacaaataataagaagcgagaatgtttctctatggaagaagtggtatatgttgtacagcttcttcttcatgcgcaagatcgtggctcacatcctcacattctgcttctactgtgttatcttgccagcaactgtattgttcccagaagtcacagttccgaaatgggctgcattttatctcccttctttgatcactctcttaatcgcaattggtagactaagatcaatccaccttttggctttctgggttctatttgagaatgcaatgtccctgctaagagcaaaggctctggtcatgggcttgttcgaaacaggaagagtacaagaatgggttgtgacggagaagttaggtgatactctcaagacgaagctgattccacaagttcctaacgtcagattcagagagaggtaagttagacatttcgtattacgcctactttacttaaccgagtttgagcttaaaccattgtgttgcaatcagggtgcatttgctggagctattggttggagcgtacctgttattctgcggaatctacgacatcgtctatgggaagaacacactctatgtgtaccttctgtttcagtcagtggccttcttcgttgttggttttggatttgtaggaaaatatgttcctgcttcctcttacttagcataggatagatcatagtgtctcaatatgtttcagaaggttttttgtttgatgtcatattgagaacaatgcctatatactactctccatttgtattaacacttgagtatctgtaaccaacgaagctcagatgtgaccaatattatttttttaacagtataaaaccacttaacacttatttagtttgttgacctcgtggcttcatattgactacagaatgaaataggtaaactataaagtctacactatttatggctgaaatttatttgaatacatatccaccacttgtcttgttcttgaaacacacggtcgtggccatgtctgttctgcttccgatctatcctctccaatccttggccagaagcaagagattgtttccgattcgaaccagatcaaaaccggtttgtttagcactgaccaatgctcaaacaaacggtggtgaccaagaggagaaagtagtgattgttggcgccgggattggcggacttgccactgccgtttcactccacaggtaagtatgaattacaaaaattggttctttgaattttcttgaaactcaagagccactaaaccggattctttggttgactggttaggcttggaatccggtcggtggtgttggagcaggcagagtcgcttcgtactggtggaacatcgctgacgctattcaagaatgggtggcgcgttcttgatgccatctccgtcgggcctcaactccgaaagcagtttcttgaaatcgaagggtacagtttctttctgcccatatcaaaaagatgattcggtcttctaataatgttaggagttttgttatccagaaagtgagaaactttgttattggttttacctgagtgtgttggtatgatcagctgagcaggatggtagtgaagaaggaagatggaagagagcttcgttctttcaaattcaaagacgaagatcaaaggtagctacttcagctttctggttaggagcattccatttgattcatgcgtgtaaccaacaaagtatatgtcttatatagccaagaagttcgggccccggacccgcgagtactcttggaaacacttgaaagcaagcttcctccacaaaccattcggttttcctccaaactggaaagg

SEQ ID NO: 36342 - DNA, 3349 bp, Arabidopsis thaliana landsberg
  unsure (1)..(3349): unsure at all n locations
ttaacatatgtgcagcctaaactgaccaagctcatgtcagagatcacaaagaccatgattttgactaaccttcttaagtctttgcatgttatcttctttaagagtcaagacagtcttagccaaccttgcaagtgtttcattgctaatgctcttggtttgaacaccatttgcctcatctaagctcggatgaacttcggtgacagtgcttaagaaatctaaacgaaggacggcacatagatcatgcaccgtgctcacaaactcgagcaccttctgtaacctatcactctgctcaaacacaaagcagttttannnnnnnnnnnnnnnnnnnnnnnnnnnnnnnnnnnnnnnnnnnatattttaccttctctttctggagctcttggagtttcctctggaagtcatctaatctctttagagacaagtcagtctcatcaaccacatgaggtccattgttcaatccgccagcgatctcctcacatatcttctgaatctgtgattgtacatcagaaaatgcccggaccctttcctctttctgttgccaaagttgttcaagcgcaggtgctattgcagaaagttgttctttgatcgttcctgaagtcttatcaggctgcaatggaaacaaagacattgaatcacactacactgtaaccatctcatctctttaccacttgtaagacgtgagattacttacaatgtcgatatagcttttttccccgagagcagttgtgagattggaaagttcaacagtggcatctgacaaagtctgaagaagctctgcacgagattttgcggctagctcaactttctttttgtaaacattcagacactcttcctcaatctgtagaagcagtttgtctcgttcttcatcactctccccaacctcatcccagatttcctgtaacaagtttgtacattgagtttgtggaaccatatattaaaaggataagtgtgtatgttgcgaaatctacctgcaacttctgtagtaaggtgccacaagtgatttcaccaagaagaggattttctgcttctgtcactgccattcttgtgaagttaaaaggtttcctacaaaagtagaaacaacgaacatatttagtgaagatccaaactaactatacactaaaagaaaccaaagttgcaatcttttttagaaaaccaaattgaatcagaaacaacattttgaacttgggaacaaaaacacatcaaagaacttagtgaagctaagaatgtgaaactaagctcaagaaaagctcgaaaggaacttcaaagaaatcaaacagcattggtgataaaaccaaagccaaagcaagaaatcaacattgaagaagtaaagaggcaatgagctgaaatgaaactaatcgaatccaacaagtagaagatggctttcttaccttaatcgatattgaatccaaatggtttatcttcctctcttttagatctgaagcgacgaatagtcactgtgagagtaagagagagagagagagagcataggaaacagagaaatctccaactttggttatggaggttgggaaatgggaaaagtgggacccattttacggaactcaataattaatgaggaaaaaacaacagcaaaaaggtgagagaccctgtcttttcgcgttatttactgatttgaccactgatctcacagacctcgttgactcctcatgctcatgtctgaatagttaaaaggctttccttaatgggcttaaatatctgacccagcccaaacagatcaagacaacacgtgtcactcattccgggtttaaacatgaagcagcgacatgaatagtttattggttctctcttccgatgatttgatgaaacctcaccgctaagtgctcatccaccaccttcctcctcctccttcttccctcaccttttgagtttctttcttcacgtttcttttcattaattagggtttcgcattttcaatcaccatcatcccaccacgttttcgttaatgtaagttcattctcttttttctacttgtcatgatcccattttgttgcaatgttcacttatgaaatttatcctttgtatgtgaatcatcacgttttgctttgatgaatcatttagatttctaggcttacacattcaaatctaaatcctctattatatgcttgttacacaagctatctctcatcagatatcaatgtgtgtgtttcattaagacgtgtataagctcgagttatggttgacattttgaaattctagatcaaccccagattcatttactcggatgtataaagaaacccagatcctcatgattaactgaatttcaagaactcaatccaggaactgagagcatttcctagggatctcaatggcaatggagaaagatctcagtccatattctccacggattagaaagctaagggatactagttaccctactacaccaacgtctcgaatgaatactaataaccagagagatacccattatcccaacattcctaattcaccaagggattgcaattatactcctagctctccaacagctcgcattcgacaccgcaggcgatcaagcgaggtatctatacaatgtcatactctcttttccggttgaatccaaaatttgattgtctttttcaatattgatcagaatttagctgaggtgaacagaagcaatgtaagcagagtaagcaatttgttacttggtgataagaacaagtacagatcaatgtggataaggacatgctcatctctctggatgctcggtggagttgtgtttataatctacatgggtcatctctacatttgggctatggttgtggttatacagatattcatggccaaagagctcttctttcttcgcagaagagctcatgaagaacgtcgcttacccggtttctggctcttgaattggcacttcttcttcacggctatgttgtttgtctatggacgcatcattcaacagcagctagtcaacacggtttcttcagatagattcatatacaagcttgtgagtggtcttatcaagtaccagatggttatttgctacttcttgtacatcgcaggtttgtctgtttcttttttcttcacaaaaacaatactctctttcttgatttattaacagcttaagttggattcaggtctcatatggtttatccttacattgaagaataagatgtataagtatcagtttgggcaatacgcttggacacatatgatccttatcgttgtctttactcaatcttctttcaccgtcgccaatatttttgaagggatcttctggtacaatggactcttatatatatccactgaagcataatagttttcccgagtgctaatttcttttaaatatgcaggtttcttctaccagcagcactgattgctatgaacgatgtag

SEQ ID NO: 36343 - DNA, 5270 bp, Arabidopsis thaliana landsberg
tgctcatgctttctcggtgggtaagacaaaatgtacaatttcatgattcctcctacaaaatgcagaaacgggttcgcgggcacttaagaagacgacaaaattgcgagaggaccaaagataaatttaaatgtaacgatttggggttgttttgcaatatcagaacaattggtttgacataagcttaaattttgaagttttgagaaaacataaagtatataatattcaacacaaaagtgaaaatgcgtattgaaaaggcgaaagagtaatacacatatattacagaacaaaccccgtttagtagataccgaatagatgattcgtatacacgcagaagttagacctcggggaatatatacacagtgcatttcgacgaggtaactaacatctgaagtttgcttatcacatcttcatcaatttgtgtattgtagtacaaaatcatcttctcaagattcggctttgtctccaagaaatacttgatctgctctctctgcttctccatgtcatcactgttttcaccaaatttcagtatctttattaccttcaccggacttgatgataagcaactgagaatctccttccgaggctttttgcacaagcacacatctccacatcgatatgtggctttgtggatgaggccctgaaacatacataagtgaaatgttatcaaagtttgaaaaatgagacaacaaaatgcttttcaagggtttgtttcttacttggaagataagagtttcaagatttggagaattcttgagcaagcccggtactgactgccatcctactctcggattactctcgatggttaaatgagtcaggttgttgaatattggtatagcatcacaactgtaagtaagtacctgaaacaaaaccataacaactagattcactcaattgcaatcactaactcaaatccttaagcaatgttattacaggttgtttgtcttcttctaagtaacataaatttaaaagcgggatagactgaaaccaaacctgaagagtgttggcagatagataaagagtcttcacattgcatatacgcattataaaatctgtagcattgccaaccatatcattttccccataaccttgatggtaatttatcaatagaggcttcaacaagcgaagatcgatgagcttcaacaagggaatccaaattcactttcggatacttgcctgcaacagtatcagtaaacttcaagtatacaagattcggagtatctaacaacacactctttggaaactcatctcgctcttgccagctaaaccttagcctcttgagagttgggacagacaccgaggcaaaatcccaaatgaaccaagatatatcatcaagaactaaatcctcaagcatgggacaaccagaaagaagcttggtaagcccaacaccatgctcttcaaaatgggttgcctcaatataaagcgtcttaagctttgggagatgaacatcttcaacatcaatcgtgggatatagcccaaaccttagcttcagccaaaccagtgtcttgcacaagtagacttgtgaaggaagcagaaattctgattccaaattcaggtgtagatcaagatcggatacaccccgttccaacacattatttatccaaggaatgatacggactggatcaatgccatctccaatctttagagagaacttgtgtagaggagaattaccttgcaaagccaacactctatccacaaaatccataaaacttgtagaaatctccgtctcattctcaggattcagataaacagagtcatccaaatcaagattagggacaaaagcaaagagataccgccattttttcgaaagaaccgaagtggaagcagcttctttagtggggaggaaggacaagatatgggaactaatgtcatccggtaaactactgattacatctctagaaccactaagatccatccttttcaacaacctgaaaaccaaagacacgagaccgattcaatcttcctctacgtgttccaaccgagaagctaagaatcaaacaaacaaacaaacacgctagcttgaaaaaataagaagatcgatattgaaacttgtatttgtaggctaaagtgaagatagctcaccaaaatgactcaactattgtagaaatttagggtttttggcgattgtatttgtaggcaagagtgaagaagaaagtgtgagttcctacttcctaggctagcctttttttagtgtcttgtcctaaaaggctaaaagattttgtaagattttggaagatattttgagctccattagataaaataatatatttaatcagatatactagcatcttacaaaaacattacttgacataatttgatttagcgataattgttttatttgtttgattagataaaatgttaattcggttttgttgcagatctttacacaaaagggatgtttcagcttttgttgtctgcttactcctaccaattactcttacaagatcattttacacaacagaccaactgtaacaagaaaaaactgaagttaacattgcaagtcaataaggacaaagcccaaataacacgtctttagaacataattaggcagaaacaagagaagattattttagtgacgacaagctagggtactccctgagctttggtaatcatctctgagataaagaggttcatcttcaaaccgaagaggtaccctttagaaacagaggagcccatttgtcgatacagtagatgacaagctgaggttatcagagattagttggacaatgcacgtcgatgaagctaatttagaaactagcctctgaagtcggcttgaaacttcagttacatcttcaacacttgttgtattgtagtacaatatcatcttctcaagattcggcattgtctccaagaaatacttgatctgctctctctgcttctccatgtcatcactgatttcaccaaatttcagtatctttataaccttcaccggacttgatgctaagcaactgcgaatctcctcacgaggtttgcacaagcacacgtctccacatttatcggtggctttgtggatgaggccctgaaacatacatagtgaaatattcttaaactttgaaaaattgagtcaacaaatgctttccaagggttttgtttcttacttggaagataagagtttcaagatttggagaattcttgagcaaacctggcaatgactgccatcctacttcgggattactctcgatggttaaatgagtcaggttgttgaatattggtatagcatcacaactgtaagtaagtacctgaaacacaaccacaacaactagattatcatcactcaattgcaatcactaactcaaatccttgaacaatgttaaaaagattacaagttgtttttcatgatgaaaacaaacctgaagagtgttggaagatagatacagagtcttcacattgcatatacgcattataaaatctgttgcattgccaaccatatcattttcaccataaccttgatggccctgtaacaatctaagatcgatatgagcttcaacaagcgaatcgaaattcactttcggatacttgcctgcaacagtgtcagtaaacttcaagtagacaagattcggagtatcaatagacacactctttggaaactcatctcgcacttgcgtgcttaacgttagtctcttgagagttgggacagacaccgaggcaaaatcccaagtgcaccaaggtatatcatcaagaactaaatcctcaagtatgggacaaccagaaagaagcttggtaagcccaataccatacttttcaaaatagcatgagtcaatataaagcgtcttaagcttcgggagataaacatcttcaaattccaagagaggatatagcattagcttcagcctaaccagtgtcttgctcaagaacatctctgaaggaaacacaaattccgtttccaaatacacgtgtagatcaagatcggatacaccgcgttccaacacattatttatccaaggaatgatacggtctggttcaacgccatctccgatctttagagagaacttatgtaatggagaattgccttgcaatgccaacactctatccacaaaatccataaaacttgaagaaacttccgtctcattctcaggattcagataaacagattcatctaaatcaagattagggacaaaagcaaagagataccgccattttttcgaaagaaccgaagtggaagcagcttctttagtgggaaggaaggataggatatggcaactaatggcttctggtaaactactgattatatctctacaaccactaagatccatctttttcaacttcctgaaaaccaaccgaaaagctaaagatcaaacaacatgctagcttgaacaaataaaaagagcagaagatcaatattgaaacttacttggagataaaagcagtttttagaaatttaggggttttggcgatcgtaattgtagggaagaagagtaaagaagaaagtgtgagttcttaggctagccttctttactttagtgtcatatcctaaaaagcatagcccaccaataactttttgtaagattctttaagaactccactatacatactagcactttattacaaaaacatgacaaaatttgattcatcgataattgttttattttttgattaacagtatgagaatggatggacagtggatgcaacttctcaaatggtcactgtgaagtaacaaactgttaaaagagatcaaattctcagttttgtgtctgtattaaattagcaatcataaaaaaaaaaactaaaataactaatattttttaaaagaaaagacaacaaccatttccttaccatggtggttggttgcggtcttgtggaggttgagaactgatcaaaaacagactgaaatattcctaatcatctttctactcgtggctgttactcgtcggtcgtcacataagacttttctcatccaccggtcttgtaagagacagacagtgcaaagattgacaattattcctaatccatcttttataccattgatacttaaaatggtttagctctatatataaaagcttgagtatgttctttcttttactaaaacttataacatcttcacaacattctaaaatggccacttccttcaatggttcccatagtcgtgcacactacttgcttgtaacattcccagcgcaaggtcacatcatcccggcgcttcaactagccaaccgcctcatccaccacggtgcaaccgtcacatactccaccgcagtctctgctcaccgacgtatgggcgagccacctaccacaaaaggtcatatccttcgcttggttcaccgatggattcgacg

SEQ ID NO: 36344 - DNA, 6923 bp, Arabidopsis thaliana landsberg
ggctgattccttgtcatctgcaccgttgaagcagttctctttacccaaaccttcttttttcaaactaggcattggtgttgttatcaagcagatgcttttatcctcgactatcactttttcttcctcttcttcaacttcttcttcttcaaagacagtgctcaagcatacccggtcaggatacatctgtgtaagcatattctctgaaggcttcggttgcaaaaggttagtgaagttgctactaatagtgttgcttgattggtgtgaaacagctccccacacttgcttgacaggttctggatcacccatgtcaaggtccattgacttcaccataccaggatcatcatcagagtaaagactcctgagtcttttggcaaacccactagtttcatcaacacttcctccatttgagcggcggaactcaacctcgatttcctctaaccgtctcctcatcatctccagttcctcttgctgctgaactatcctttcctccattctccttctctccatctcaacaaattcctcagccattcttcggcattcttcaagtttcttatctagttccgacttcaaaagctgggttctctcgtttactttctcttttatctcctcttcattggtagcacaagcttccctctgtgttaaaagagatcttaaagcagcaacttcctcttccttcttcttcagctgcttttgtgcctcattcctttctttttctttttgcttcttctcagactggagtttgataatgaactcatccatggcagctattcttgatcccaaaatcacagcagaagcagactcatcacccccatacttatctttgtttggagtatgagacccacgaactatgcactttgcttttgccccatactctagagtacagagagtcttgtgcatttcctttggatccgggctcgcacacaggatcattagaatctttgacttgtcatcttcaaaagagtcctgcattcagagaatagaaacaacactaaatatcttcaagaaaaagcaacacgtaaaacattttccagaagataaaacaatggaacaagaatttcacctggagaagcatggtcagcttgctgtctctaaagggtacatgagaatctccatttgctatagattccacaactcgcttcagtgcaatatttccctggttgatcttagcagtctgttgaataatgagagatataagtcagttgatatccataactacaataactttagtagaatcaaacaaattgagagaggaaacattacttgcatcttagcttcaaatccagtctgcccagcttggtctatattttcagaaccagccatgtcaacaagcatcaatcttcccccaacagttggcacatcaagtatgatctacaaaaagaaacaaccacactagtaagttaaaacagagataagctgcataaagctatgcatacacatcaatcaagaagatcgttcttacaatgcagtgactccgagaacttctttcgttacaaagtgtactcttcacaattctccgtttctccactttgacaatttctttagaaatcttcccagcctctgtcccagaaataaaacttgcgtttttcgcctttttccccattacttcaagcctcacctgtaacaaaacaacaaagtacacacctttaaagccaattcaatgtatactaaagttatcaatcaagaaactttaccttagtgcttgctcctttaggccaaccaatacctaaattgttactactattagtcgaaagaagatcataaatctcctcattataaacctcaagaacagtaacttgaacaaaagtaacaccatcttgatcagaatctcccaatatatctctcaaagaacgatacacaatcccaggctctttcccacaaccaaacatagtatgactctttccagcaccagtaggtccatacatcataatcgtgcatttattcccaactttcactcctttaatcctctcttctataaacttcttgtagaactcttcaagaccttcttgctccgagaaagaaacaccgtcgagtgtgaagtctctgtacccaacatcagctctgactcgtaccgtttgattatctgtgttgacttgtaagatcgaaggtgatttctctttccggtcagggtaatctcggatccggccgattacttcaactggatgctccggtggagatggatctttagatccgtctgggtttggggtttttgagtggaaattgagacgttgttttgtttgtggagttctgattaaggtgtattgagtttgatttgatcttgaagaagatggtgtcggtgccattgttgaagaagtttcgaaagagtgaaattgaaattgagattcagagagcgttagagagagagaaaatgaaaaaggggattagggtttgtgagtgattcacgaggtttgaagtttgaaacaaagaaacaaacataaccgttgtgttgtatctctaaacggctagtttttgtccacggcccactgattattaacaatttttattttcggcaactagaatatatttactttcttttaaaaaagggaagtgagatgggcctgactttttgattaagttaatgggctttttgtgtttatagaggcccaatgtttgtagtattagggttttctcaaatgtctctcttataagctctgttactttaggtttttattacaggttttgcggcagtggaagacgacggcacgagcttcaccgaagagcgaaaatggtgactctcttctctttctttatttctgctaaatttctccttggttactattgaagaacgagattattgattatagatctgctgtgtgatttttcttcttctttaagttgtttatttctgattttgcatcttaaatcgagaattattagagtctaattgtgatttttagtatctgttatgttgcattctgtgttgtaaattcgaagattcagttcacttcgtctctgtgaagagttttagctccaatctaccagagattcacccccatatagtgttatgtatcttcatttgtgttgctgcaattctgttctgatttttaggagaattaagaaggatttgtacttcagggacttgtaggattcacaaaatggttatcaatattgactagttgagtagtcagatcgtatggtagcaattaattctgaatgatttaggagaagcaggaaattttattaacaagttttagggtttgttctgaagggcgtatttagattcacttctatgatcgtaattaattctgtatgctgttgaaactgtatcttgtggtagttttaaacttggttttctgtaggtgaacattccgaaaactaagaacacttactgcaagaacaaggagtgcaagaagcataccttgcacaaggtgacgcagtataagaaaggtaaagatagccttgctgcccaaggaaagcgtcgttatgatcgtaaacaatctggttatggaggtcagaccaagcccgtcttccacaagaaggtatactcgcttttccttgtcttgatctctaattactgtcttctatgtgagaaccaatttaggatttcagaattgactctgtgaaatatgtcttataggaatgatttgttaattggaccttgctcattatttgtctttctttggaacaggctaagacaactaagaagattgtgctgaggcttcaatgccaaagctgcaagcatttctcgcaacgcccgattaaggtaatgtctgcgacattctttacctttgttaatcactctttagtctcagttctgtttcttacactttgtgtgtggtttttgcagaggtgcaagcactttgagatcggtggagacaagaagggaaagggaacatctctcttttaagttgttgtttcatctatctacttttttttgttttgtttggtacctgtcctgcttcaatactgtgatatactttgaatctaccagaaatggtcctggtttttaatttaaataggacttggtcttatggatgtcttttaatttggttaaccaatctttcttcattaggctgcccttgagtattctctataacttgcgacaaagtagacataacactctttaagttctaaaaaccactttctattttcggatctcgaaaaatcatttatcgttttgtgctgcaaatcagtgttatatatgagcttggcaaattaaaatgacatatacgtatagaaatgaattgataatactaaatattatttgttttcttcttttaacttcagccatactaactttcactaaatttcttaagagcatacagaagtttctcctcggtatattggtggttctatattccccgcaacgtgaatggaaaatgaaggttctattttggctatatgataatcatgccattagctgacccgaaactaatgtgttacaataaaaccaaattatataaatagaagaacatgtttcctggctccttattgcacaaaagagaacatgaacaactctttttatattaccatgatagtcctatgtgttttggcctttgtgttagtttaaattgagagctgtgcgggcaaaaacatagatgagatgatattctcttgtgtctgctgtggtggtcctggctgctgtggtgatagaggagaaggacctgttggtggtggtattgacaatgaaccggtgaatgtagtagtggtggtggtggagccagggaagccagcggcggaagatgtggtgatggtcaaggatgctacttcagtttttctttttttactttattatacttagattctggtactatatatattatgggtatagataatttacactaaagttttatttccgttatttaaaatccgtgtttgatttaatctctaattttctgtttccaagtcgaattcctctgtactaattatacggccttttaattttacaatatgaaaagccattttctactaacacattcttaccttttagaggtgttaattttaaggtaagttttttctctacaattacgtaatatcattcaaatctgtttatgctgacaaaagttaggtacttttgtgtatatttgtcgatcattgacattgtctactacgctaatatctaagggaagtggcatcgattctacttgcttgtaaaacatacatcgcgatgtaagtcaaattctctaataatgtaagaaacgaagtgagaaagaaagataaatccaaaaaatttacttgcaaatcaatagagatccaaaccaactgcgcatgcgttagtcaattgatatattgtatataatagaacaaatacaatttttgtttttataaatgtataaccaaaaacgtaagagcaatactatcgaaataaatacatactgcatattacacgataataatagaaagagatttgatgtttgatcacttggaagtaaaatggagatagagaaacacaaagagcaatacgaccggaaacatcaagatcattggaagagatggtgcagtcaccggtcccatcatcaacggaataaacagtaacattagtgcaacgacaacaatcgccaaaaccgaacccatcccgaatccatactcattcgccattttcgtctacttttggataggagtagtgatcaattctgtgttagtgtctctaattggagaagttatatatacacagattcagacatcaaatctacggttgtgtcgtttccccgagaagtagaagacaacgtttcgtgtactaatgcatgaaacacaaaaactggcgagacctttcacgttaataaccacctcaaaacgctgcgtttcggtttatttgttgctgccacgtgttttaaaaacagcataccctaaacgcatcgtttcgtgtcgcaatcaactattcaactgttactgtatattttattaaaaacgcagcgtgttagttaacaaaattcgtgtcgctatttctacactgccacgtgtttcaaaatgtcgcgttctgcatttgttgctatcacgtgtttaataaattaacctaaacgctgcgtttcgttaatcaatcgactttttgaacattcgcgatctccaaaaattttgagtttttgttttggaaatcccgcccaaatattttgaaattgaaactctaataattttgtcggcttgtggagttgcggtagtgatatcctccattaatcgttttgtgctttttcttcaaaaatcaaaagcttttatttttcccccaaacttttttttcaaaatcctaaatcattttaccctacgattttgcagatgtcagcttcaacgaatcgccgccggctaaaagatataaacaccggcgccggtgaaaatccatcatctggtaaaaaaccattgaggtctgtaactccacttccgatctcaagcaaaaattcaaatcccgctcttcagaaatcattatccagcaaagagaatccgaatccgaagcttagtcaccgctcatttggatcgactcagaagccagtgctccggcctgtaccgcgcattgataagtccgccgtgagtggcgagggtcgggttacgcgatccacgtcatctggtttgcgaggtaggagttctagtccatctgatttgattagggttttctcggatttgagaaagagaaatgaatctagggttattggggaaaagggtgaatcgggtcaggataagaagtctgggctcaagagttctggattcaaacagggtacgagtgaaattaaggttgagccaagtagtgtttgtgagaaagcagatgaaggaagtagttgtccagtgaattcaagcaaatttgaaggttctagtgtggcgagaaattcaatttctgatccaaaggcacatgctttagttggttctggagagaaatctactgttgctttgaaatctgatagtaagattgaaaagactgggaaagggactagtgtagctttaagaaggaagtctttggataatgttgggaaggcaatggagatgtcaaaggatataagaggaaa

SEQ ID NO: 36345 - DNA, 6563 bp, Arabidopsis thaliana landsberg
attagaaacccaccaatacttcaaagtgggataagcaattcaaccattaacgactcataattcttttgatctatctatagcttccagtgtctctcaacctgtataaatacccttttcttgagttgaggtatgtgaataagtctttccagtgattaggaaactacaaagccatgaaaggcattacattcttcacaccctttttatcatttctatatctcttatgcatcttgtttatgacagaaactgaagctgggtcgagaaatggtgatggggtctacattgtctacatgggatcagcttcctctgctgcaaacgctaatagagctcaaatactcataaacaccatgtttaaaaggttatacactgtttacatgaagtgcaaaatatacatttgttagtgttttgtggatttttgagacctttttatggtttggttttgtaggagagcaaacgatcttctccacacatataagcatggcttctcaggttttgcagctcgtttgacagcagaagaggccaaggtcatagccaagaaaccgggagtggtttcagtttttcctgacccacacttccagcttcatacaactcattcatgggactttctcaagtaccaaacatcagtaaaggtcgattccggtccaccttcatcagcctcagatggatcatatgatagcattgtcggaattcttgacacaggtaaggcctttcactcattggtctcatcatatcctttactttttcctaacttaaaaaaccaaagaaatatgagtttgatattgtgaaaacaaacaaacaaacagggatatggccagagtcagagagtttcaatgacaaagacatgggtccaattccgtctcgatggaaaggtacatgcatggaagcaaaggacttcaactcttctaactgtaacaggttacaattttcacaaccttcaaaaaccaaactggatattactaacttcctttgaagactaaacggttctgtttttatgcagaaagatcattggagcaagatactataaaaatcttgatgatgattcagaatactatacaacaagggatgtgatcggtcacggttctcatgtgtcctccaccatagctggatctgccgtggagaatgcttcctactacggtgtagcttccgggactgcaaagggaggttcacaaaacgctagaatcgctatgtacaaagtatgcaatccagggggatgcactggctcctctatcttagctgctttcgatgatgcaatcgcagatggagttgatgttctatctctgtctcttggagctccagcatacgctcgcatcgacttgaacactgatcctatcgccattggagcgtttcacgcggtggagcaaggaatcttggtgatctgctctgcgggtaatgatggacctgatggcggtacagttactaatactgcaccttggataatgaccgttgctgccaacactattgatagagactttgagtctgatgttgtgctaggcggcaataaagtcgtcaaggtaatgatattattatacacataatagtgatacaccgaaacactaaaattttcaagtttgctaataagaaccttaactgttttcagggtgaaggtatacactttgcaaacgttagtaaatctcctgtgtatcctctgattcatggcaagtctgctaagaacgctgatgcatcagaaggatcagctaggtaagaaaacatcgttggcttcaaatataatcccttgaacatattttagatagtatcaaagggtaaggaaacttatctttctctgttttcattaaacaccggcttttccagggcctgtgactctgattctctagatcaagagaaggtaaaagggaagattgtgttatgcgagaacgtcggaggatcatattatgcatcatctgctaaggacgaggtgaagagcaaaggaggtattggttgcgtctttgtagatgacagaactagagcagttgctagtgcttatggcagctttcctactaccgtaattgactcaaaggaagcagctgagatcttctcctacctcaactcaaccaagtacttaataagctatctcaaaatttctattaactattgtagtcagtaaagacctaatgatcttttgccttgggttgcagagatcctgttgcaacaattcttcctactgcaacagttgcaaagtttacacctgcccctgctgttgcatatttttcttccagaggaccttcaagcctcacaagaagcattctcaaagtaatccataaccttgtgaccttctttagttattacctgattggaagcatctacttacctctatttttaacagcctgacattaccgcaccaggagtctcgatactcgctgcatggactggaaacgactcaagcatttcactggaaggcaagccggcttctcagtataacgtcatatcaggaacttccatggcagctcctcatgtttcagctgttgcatctctgatcaaatcacagcatcccacatggggtccatccgcgatcagatcagcaattatgacaacaggttaggactccttcattgcatattttgtgattatggcaagcaaaattgtatgttctttaacttcaatgtcacattctcagcgactcaaacaaacaacgacaaaggtcttataacaacagaaactggtgcaacagccacaccttatgactctggagcaggagaactaagctcaacagcatcaacgcaaccaggactagtttacgagactactgaaactgactacctgaactttctctgttactatggatataacgtaaccacaataaaggctatgtcaaaagcttttccagagaattttacttgccctgcagattccaacttagacttgatctccaccatcaattacccgtcaattggaatctctggattcaaaggaaatggtagcaagacagttacaagaacagtgaccaatgttggtgaggacggtgaggcggtttacacagtcagcgtggaaacaccaccagggtttaacattcaagtgacgccagaaaaactccaatttacaaaagatggtgagaagttgacataccaggtgatagtgtctgctactgcttcacttaagcaagatgtatttggggctcttacttggtctaatgccaagtacaaggtcagaagcccaattgtaattagtagcgagagtagccgcacaaactgagataaaatggtataaagttcagcatgaatatggaataataaaaattaatgaaccgatgaaagagctcaagtagatcaaactattaagtaggcaacagtccaaaacattcggttttgtgaaatttaaaactaataatggaagttgtctgcaataactactgcatataaagcagaacatcaccaatttttttgatcaaatttaactctaccaatctggagtacaaagttacagttaccaaccttgttaataaccatgcagaaaaagtctccttgaagtcaggcaatcttgctttcacacaaagggcatgcatgactgtgtcaaacgaactatcttcactcctccattataatagcagggcttaaaagctaaccctaacaattcttatgtatgttagtgatagagactattacgatatactcatagaacttttataaggcaaaagttagaggcaaacgggaagtaatcttgttttgtttcaagaagttcagcgatgatgagatgcctcactatcaccatcatgttctttatgtttttttttctgtctgtgatccaaaagtgtaagtctgaaacaagtaaatctggagattatatcatatacatgggagcagcatcctctgatggctcaacagacaatgaccatgttgaacttctgagctcattgttacaacggtgatatctaactccagaactctttagattttctaaccattgattcatgttatgaaaatattaagacagtatcttacttgcatcaggagcggcaaaacccccatgcacagatacaaacatggattctctggattcgcagcccatttatcagaagatgaagctcatctcatagccaagcaaccgggagtactatctgtcttccctgaccagatgttacagctccacaccacacgttcatgggatttcttggtgcaagaaagttatcaaagagatacttacttcaccgaaatgaactatgaacaagaatccgaaatgcatgaaggagacaccattatcggcttccttgattcaggtgagcagtatgaagtgatgaaatatttatatgcgctttttatctacttccagtaaaacaaatactcaatgcagcatatcctgatggagaaaacaggaatatggcccgaggcgcagagctttaacgacaggcacatgggtccagtcccagagaaatggaagggcacttgcatgagagggaagaagacacaacctgattctttccgttgcaataggtaagctgagactgaggaaagtagaacacatgtagagatccgatatatgtttgaatttaccacctcaaacttggataaacaggaaactgataggagcaaggtattacaattcgtcattcttcttagaccccgattatgagacaccacgagactttttggggcacgggacacatgtggcatcaatagcagcagggcaaataatagcaaatgcgtcctactatggcctggcaagtggaatcatgagaggaggttcaccaagttcaagaatagctatgtacagagcgtgctcactcctgggatgtcgtggctcgagcatactagctgcatttgatgatgcaatcgcagatggggttgatgttatatccatatcaatgggcttatggccagacaatttacttgaagatccgctttccatcgggtcatttcatgccgtggaaagagggatcactgttgtttgctctgtaggaaattctggcccatcgagtcaaagtgtgtttaatgctgctccacggatgatcactgttgctgccagcactattgaccgtggctttgagtccaacattcttctgggaggagatgaaaacagattaatcgaggtaagaaggaaaagccaatcaacggacaaatctccattcacataacatcttaaagaatttcttttgcagggttttggaataaatattgccaatatcgataaaacacaggcttacccacttatacacgcacgatcagccaagaagattgatgctaatgaggaagctgctaggtaatagttgcctcttaaaattatagagtaactttgctatacctatactaacaagacaacacaactgcaaaccttcaggaactgcgcacctgatacactggaccaaaccattgttaagggaaagattgttgtgtgtgacagtgatcttgataaccaggtgatccagtggaaaagtgacgaggttaagagacttggaggtatcggtatggtacttgttgatgacgagtcaatggatctgtcttctattgatccctcctttctagtgacaataataaaaccagaggacggcatacaaatcatgtcctacataaattcaacaaggtttaagatgtctcatttcacaagatattgctttcaaacagaactaataataatttttaccaaaaaagaaaaaaaaaacagaactaatatatcataatccacattctagagaaccaattgcaacaatcatgcctacaagatcacgaacaggacacatgttagctccatccataccatccttctcatcaagaggtccttacttgcttaccagaagcatcctcaaggtataagcccttatattcatcataaatatgatctcaacagtattcacagaaacttcaaaaacaaaatattgataaacctgttacagcctgatatggttagtcggtgacagaaatgcagcaccagaaggcaagccaccgccattcttcaccattgaatcagggacttcaatgtcatgtccccatgtctccgggattgctgctcgtctcaaatccagatacccttcatggagtcctgcagcaatcagatctgccatcatgacaacgggtgagaaatcaaaatcaagtagataccagttacggatgattgatcagcacgagttaacccaagtctaactctgtatctgcagccgtgcaaatgaccaacacaggatcccatataactacagaaaaaggagccaaggccacgccttatgactttggtgctgggcaggttactatatttggaccttcatcaccaggactgatttatgaaaccaatcacatggactacctaaacttcctctgctactatggatttacatctgatcagatcaaaaagatatcaaaccgcataccacaaggttttgcttgtcctgaacaaagcaacaggggagacatatctaacatcaactacccatcaatctcgatttctaacttcaatggaaaagaaagcagaaaggtaagcaggacagtgacaaatgtagcatcacgcctcattggagatgaagatacagtctacactgtgagcatcgatgcaccagaaggattactagtcagagttataccaagaaggctacacttcaggaagataggagataaactcagttaccaagtgatcttttcatccacaacatc

SEQ ID NO: 36346 - DNA, 5134 bp, Arabidopsis thaliana landsberg
  unsure (1)..(5134): unsure at all n locations
aaataaaaaagggtcgtctttttttggcgaacctttatgttgtggaatagtttcttcagctctacttttgccataactgagtactcactatcctccacaaccttcacaaggttaacaagacagtaactcagaaggactcaacttcgatgaaaccattaagagaagagatagaaaataattatcaaattccacattagattttacccgttgcttagtgaaccaaaaaagcaacattgtcgaagttcatgggttctcaatttaaaaccaattagtggacttgaccatctcccttctatattactttaggtctcatcttatttcacatgtggaactattaaggaaaaccaaatgacatagcacgatgatcaaccgcatagtcagctttttacgagtataaacatgaaaacagtttgatttttaggtgaaaaatacaccctaaacgttacggtttggttttatgaactaactctatacaactaattgtctggtttcctgacactgcaagatttgggttttctgagtaatacaagtttttctatatctctaattatttgctagtttaatcggcctagtgttaaactacatttccacaaccaaaaagcacatagctataacacattattaacggtggaaacgcatagagaggacaagtaagaacctcgaataagtgagcaagccttagaagaacttccccattttccaactcctgaaaatgtcagaattaatcatagtgtgagtgtggtcaaactaataaaaaaccgtatttgacatgtatacagtacacaatccaactaacctggagggtgagtaatgcgacgttttttggtaatgaatatgacggttcaaacgctgagaatgtcgtcttatgtgaattaatccaactatctccttcctacaaaaaaagtaccttatctcacttcactatcttatagaactggagggaagtaagtatttatttttttaagagcaacctgttctgtgaatgctataagtagtggagaataaatttcttgaccaaatgttcgacgccattttgccccatctccaggtttatctatctgtacataaaacttcccttgtatctgcaaaacaactcagagttaccataacggttataagaccaactataacgatttaataccaccttggaaacaagctctgtcacatgttcccttaaaagctgatacgttgcaacttggacagctaaaaatgagatgagaacttaagcttaccgttaatcctttgcatccttcagggagacagactgtttcattaagaatctcaccaacacctctaatgtcatcatgctgcattctcctacatgaatgaaaaaaaggtgaaatacaagcaaaacaacatatgcttgtcttggttatatagagaaagttagttgacaaaccgatgaagcatcaactcgatctggccgttctttaagctggatccacctacagctcgatccaccaacacggatagctctgaggttttatcttgcatgtatatcccgagatttagctggaagaaaatatatatattagacaaaaggccagatatagtgcagctcagtctagtacaagaccttagtacaccacgagaaggaatctcagatgggtttgatgccttacaggataatagttcccagcaaccggttggtacacttgcacgtcccaatctgttctgaagtcccgaatctgcaagaaaatgtaacaaagtatgttacaataaaaacaaaataccccttgttacaaaaataaaaataaactacttcacatgaattttgcatctaatacccgcttgatgaagtcacggccattcgagtctgtgtaaaatgttccatttgtcttcatggtggttgtaagtttagtgataatctctttgctaataccatcatcagctggtataggcccaatctagaaagtaggaaattaaaatactgaaatttctcttcatcagtttaacatgaagaattgtgaaaagagatcaactcactgtgaactcaatttcagcatggttttttcccttgtacactctggtaatctgcaaattaacagacccatcacaagatggatcaaacagttatagcttctgtgatgtaattaaactgtttaagagcattaactagttgcaaagagtttataacctgtgatatccaggagttaagctcctggtgcacttcatcgaacaaaggtccttgaacaatagtgaattgagcctgagtcaggctagacaattagtttttcttttgtgttttcacatactgtcgggaaataaggttatagatgcagcttatatgtattacctcttctttagatttaattggaagcacaccatctggtcgaaaaacgtaagctccagaagccttataaaagtatatgagaatggttcagacacacatcaaaatgatagctaagtagataaggttgtatctgttaaagagctgagctacctgaggatccttgtcagttccattgcttccaatataataagcatatgactgttctgcagtaaccttaaaatccaccaaaaatcaacatcagatgatgtttacatatccgaatggaaaaataggtaagttaagatataaaaaacacaggcacacctgatttttggtacttaagtgacgagttattttaactccttcttctgaatagcgtaactttagatttccctggccaacttctacattttgattcatgcttccagaagtaacatatgatgcagatagtccacgcgcttaatcaaattagaaaacgaagatgtaattaaatacataacatccgttggtatcagtaaggaagttgcggctagtagagctagaacatatgcaattgtattcaagatcctataactcataataatgttatgacacaatattacatattctgaaacatacctgttcgtccagtgtctgagattacatacgagctgaacccaagaggtggtactgaagctgtaaatgcaagcacgtgttttgcagtatcccgtggtgatcttcccagatacgctttgacatactcatttctaattctcaaagcgatttctgaaagaggtagaagctgaaacacgacttctttcccagatgcatctttcacaataacattttcagacgacacctaaagaagttatcaggtagatttggtaaataatattggataacaaacaaagataaagcgagaactacactggtcaaccaagtagataagaaaatacttacaggaactcggacaacttcttctcgtttccatcctagagaattgtaaacaaccaccacctacaaggagagatcaatgtgaacagaagataaaaactaaccaagaggtccaaggcttcatagactcagaggaagcctgtctgctagacttaccaggcttttcccgctcaacagacgagcttcagatgcaggacagtaactaatattaagcaggggacactgccaatatgaatataatgcacaagataagaatcagcttaacatagattatgataagttttgggaacttaagtcattcaagtcatgaaaatgctacaaagcagcttactaaaacttctttgttgccttaagcaacagcatcatttgcggaagcgatattaataaccactcaaattcgatatcaatgtcttttcaactcttccaacacgaccagtaatattggaatcctgcaaaatcttaaagcacattacctgctgaaattttgtgccaggattcttcttttcagtacttgattttgctgctgatagaaaggaaagggaagaggcaaccaatttctcggcctagtaatgatcatggagaaattcttaaactgctatgccaacaagaaacacaaaaattgcatgaacaacacatgagatgcctaactaaaaatcacctgcaggtagcccattgagagtctaagagcataatctgcagccacatgttgtctttgtgtaccactaactgcatcatggtgttgagcaattgccaaagcatcggctagcatatcagttgttggtcctgaactatcccttcctctcaagaattccaattgtcgagctgcctgtttgaaaacagataaggccgtgtaagaaaagagcaaaatataaaccacaaatctatgaaatttatataaaataattgtaggccataccagatagtaaccacttaaatccctcannnnnnnnnnnnnnnnnngcctgctcgtaaagtaccctgtccagtatgcattaggtttgtccgcatacctgacacaggtacatgtattatttatttgatcaacatgcattttgcatttgtagaaagtaaaacccgagctatcaaactcacgggaagaaatcatcagtctttaggggccaggactcgtttgcagcatattttgcatcggtgtagatagatggtgtcgaatacagaacattgagacgcccatcctggattgtccaaagaacaagagaatcaagattggtatttctcttaccttgagactagtgagattcaattgatatgagtatgctagtatgaaaatccagtgtaccttgttaacataatgaataaacttgtctatctgtctgaaccacgaatatgcatactggtaacggaagtcagttcccattaaccacattatatgatttgtcctggtcacattaaccttgaaaagagaaatccaagtcacatcacagcaaagcttcttttctattagctaatttcaagaaaaaatggatatgatctttacctgtgcgagggctgctgctacaaagtcgttgactctttcttgaacattgtagtcaaaaaggagaggatcatcctatattcaagatgattcatcagtgcacgttcaaacaaagttcaaaaacagcacagccggttcaattgcttttacctggataggagctgatacatcatttatttcaaacgtgaacccttcaggagggtcataatgtcttgggaatacaccagtaaatatctacaagtaacatcaaatagcaatgagacaaagccagctatggaaacagcagaattacaatgtgaggtttaacggtttaaacctgtgaagaagagccaagagacttggaaccttgccaaataacctcaagtgtcttctctcttaacctctttgcacgatcttggtagtcaattctagcgaaaaacagcgaatcaagccaaact

SEQ ID NO: 36347 - DNA, 1020 bp, Arabidopsis thaliana landsberg
acatatatatcatgtctcttaagatttcgaagacaacaaaatgcgcaaagggagagataaaaagaaataccttctcaaatatagtctcagaatgaagttgaatgagattaataaaattgtaagatattggtggcgcatatcgagcaatcatcctaaagagatacatataaaccagctataagcatgtaaattttttatttaagaaaaatgatggatagatattcacttacgagcaaatcattagcagattcacagaacttgtttgtcgaggagtcaaggaataaatcatcagcatcccaattttgaaaagtgaataatatgtacagacacacatatacaccaaaggtacaaaagcaaatgcctgaaagcaaaatgatcaggattgaagaggaatttactggtaaggcgaaacaatttgctactataagataacaagatatcacgccactccattgaagtgagaactgaataaaaatgtaaaagtacacatacctgcactagcagttcatcggatttcacagagcttataagtattgagaagagggacaagtccagtttactaagaaggagagttgcctctgctaaaagaattgcagcagacataatccccataactactgcccacaccatctgaatttgtttcttcaatatacacctccacataaattctgccaatggtagcaatgtacaaaaatattcagggatgttctcgtacagtcatgaaactttccacttcagtaatcccgtacagcaggtcggaagagagaatgagtacaaaagtatataaagagtttacctaatgaatcgagaagattccccattttcccagttcgagtggctctgaagctcgaaatgtatttcctgaaatacggtgcaacaaagattcttcaggcgaaaggtatcataaacttgtttaagttaataacgaaagagataatcgtatattgcatgagagatgaaatgactgaaaaatctgaccatccagttgcatcacgacgttcataattcttcattgtatct

SEQ ID NO: 36348 - DNA, 2283 bp, Arabidopsis thaliana landsberg
gcttgaatcaccaatgacgttgtgactggatatgttacaatataacgtgtagcctgaaataacgttcgttgacgtgagaataacaatcaaagggtactgagcagccaagttctgaaaccattacctctgagtaattattccccgagaatcctcccaacactgcactaggatcaacaggcgcctgaaaagcgctcaaacacgtctctgatgaagtgtaatgctggagggtgaagcgagagggtatcagtaaacagtattcaatcactaatcaagagggcatacattcaacaatgtaattacgaagtcaatgacccaaatccccatcgttgatgaaaaattagctatgtgtaagatactgaacaaaaaataaacctggaaacagtactcagcatgctcaactcctccataatcatcaaaagttccagagtccatcttgaaatactgaaaatgttatccaaaaagagatgtcagtagagaagcgattccatgtgcaagatgaatttttatgttcaagaatttgagataacacatggaagtactctgtgtatctaaaccaggaggagttacacaacatattaaaaccattgaaaatttcacgagatcagaaattatcaacctgcagaatactctgagtggcgcaatcctctcccaaaggcttcaaacatatgtcgggcaaagagacctctgaacctgaataatttccacgaatttgatcaacctgtcatatttggtggaaacaaaatcaatagaaacagaagaaataaacggatgatactggaataacctgatgtattatatcagtagttattgattagaagcatttttttagaataccttctgttgtatgacaaaaagcaaaagaatattttcatctggtacaatactaggcgccctgccacttttgggatcaggaacagtggccaagataagctgccacagaaggaaatcgtgaacaaagattatatatacggttaataataaactggaatatagactgtcgaagcaaaacatagaaactacctgctcgattctgtagaatggcgaaaggtgggtatcatagaactttttctcttctgctgctttgctttcaggaccaacccacaactacaacatgtagaaattcacatgaacaatcataccagtatttgcagttgcttttctgctgaatgatttgtacaattatggtcctggcaaagttaatacataccttttctggtcgtgtttccaccttgaaattatagagacctgaacagagtgcaagaacaatagctactgacatgaagagaacaagagatggatttctagcagtccatgacccatatgatctgagacaaacaattggaaacaattacgaatttcatctcatctaattgtagagataacttgcgagtaagatacagacaacgaaacaaaatcctggagattcacctgtaaaattttgccatatatctctgaacaggagagagttgagcatgtctttgcacctaagaattagaagtcaattgatcaattagttctttcctccaaacagattaaatcttcaaggatagtccagcatttatgtgggtatataaatgtattttatgttatatatacatacacataagaactacaatttctagccaatacattgatataccttgacaccaagtatgttttccttcatttcactattaattccatcttcttccacaggatgcaatagtggctttgagctatcaagaggctgtgtcgtatttcttcttcgatttaaaccagcccatccgaagaagcaagacaccagcaagacgtatacaagtgccattgataactcaatgcatctaacctgaaaatacaaatcaatataatcaaatccaagatcataccaactcaataatgttttcaagcaacaatgggataattcataactcacaccttaagaggaccgattctaattgagcaagaatcttcatcatggggcggcaggggttcgggacttgagcaagctggtgaggaagggcaatcaccacaagagcatccaagggatgtgtcaccacatgaataaacagatacgttcattggtaccatcgcagatgactcagggatgcttgatttgaagttgatcgcatatggtgaaccaggaaagccagatggtgctttctgaccaataaacgtaaaccattctggaaaagcagaagtaaagatgaaacatggaacttttgaaacaagataaagcgtgtatggaacgccttagaacaaaactgcagagcacctctgaagtttttagcaccacaaccagcaaag

SEQ ID NO: 36349 - DNA, 1636 bp, Arabidopsis thaliana landsberg
aagattgccactgcttccatttgttcctcctttggcttttttattatctttgattccaataacgatgtatgggacgggaagaccaccaggcccaccagaagaaaggggagctgaaaactccccaggtactgaaacttcacccgcccatttctgcaaattagtttttgtagtcctttgcgaaagatcatgaacaaaaataactcctgcataatcaaacagtcgcatcagtgacaaaacagggacagagatgacatttgttgagacagaccattgatttgtgaatagaacagtgagcggcaatctttgtatcgttcatgacctgaaacatcccaaagttcgacgaagaaatctctctctgagtcacctttaatgatacttgaagaactagcaggacttgcgtaagttaagtgctgcaccaaagagagttccagaaactaagtagggaaacttatcccatgctctctttaaccatatcgagaattttttttatagaacagcttaagttaccttgacaccaactgtacatccaatagtttgagatgggcgaacaatagaggagcctttgacaatgagatgcacaagagatgattttcccacacctaccaaaaagatttgaaattcagagatgaaaattaactcaattatcatgagcaaaagcaaacacagtacgtgacagactctaaggaaaacactgtcgactaaacaaactagagtctcaggtttgatctaaaagatgtagctcaacgaccacataacaataactcctaaccaaatggtctaattcagtgcagagaatctatcttcctgagtcacacatgatctaggtttagcagaagtaccccgattcagcaaaactacaaaagaatggtaacatttctaacttggtttgataccataaaataggtaatcaaatctaacgatctacatgaaaccagaacttgttatagttacctgagtcaccaactaccaacactcgaacttgcccacataatggcgctaagatctgctccttattttccctttcacgttccctccaaaacttcatttttgcttaacaagaccagattaggtatcaaaataagaaaactaacactgtttcaatcaacttccatagtcccgattctaatcgaataccagaagaagcagcttccacaaacactcttagcaacctccgattcctcacaatggaagacttttatgatctaacattaccgaagcaacaagcacaccaagactaactaaaaatctccggaatctgggcagattcttcaccttcctcgagcgagaaattctatggaatcaatacctacggtatcccaaatcgatcgaaacaagcagcagatctacggctaaaacctaggatttcagatcaattaccaacagaatcaaacttgttcagaaagatctctccacctcctaaatcaatcaagtagggttcgtcttcctcctcgaataaatctgaagatacaaatttctctatcgaagataagagaagtagagagaatctggatcgagatcagagagatccaagactcccttcgaatttacttactagtgtttgagatttgggcggaagaacatatatgaaacgacttcgtttccttgcttaagttgttgaaaggtagaagatgagatc

SEQ ID NO: 36350 - DNA, 1351 bp, Arabidopsis thaliana landsberg
tccggggaatataaaggaaagctcagcaagtggaaagaaacaaacagagaaacttgagaacaagaaacggttacatacctggtcaaaagccgtaatctcttgacttcgctctccatagactaggcaattggtgtaagaacaatatgtgaggcaaaacagagagataaaaagttgaaaacggtattcgtgtacataccagtgcttcatgttcttgtttgtgtggccttagttcgtcgtatctggaaagagattgcaaaccaccagaagaagtcagggttggtttgatgagtaattacgttgcagaggagaatcatgaactaacagatcaaaacttagaagctagagctagatgatctctatagatagattatcggtgcttctacaaagcccagtaatagcttaccaagaaaaaaaaactgcagaatcagattttgcaacggattccataccaattacctaggagctataattcaacaacaaaactctagaaatatacctgcggctgctggataatccgcagaaatcgcagagcaatctcgcatccttggtcaaatctctgcgcctcctcttcagaaatggcgaggaagtgtcatcatctttatcattgtccgatgaatacctctcttgttcagctaaccttgaggttgattccttattgttctggtaaacaaagtacgacacgattagagaataaaagaagtggtttcgatttgctacttggaacatgtatacattgataaatctataccttctcgcgctgccttgcagcaacttgttcctcccttggtctattcatttggacaagcaaacccaacaaagcatttaatatctgattgtcaagtgagagcaggtcacgagatgacataccctcgagctctctaccgttcattctcctgtgaggatgggaaaaaaaaaaaccaaattgaaaagctgagactcttgcacagcaagaagagggaaatgctgatgagttgtattactcgttaacaagcctcaatctctcacactcgctaggcaatgattcagagtatcttctctcggatctcgccttctttaacagctgcaagaacaggagccttttacattctcaagttgaggctaaaaaagagtcaggactatgagagagtgggcccagaccagcagcgctccatcatctcgttgtctttgttcagagctgaagtatgttcataatacatggagagccagtcaggttttcggcttacgcagtaaacaaaaagcgtcatatcatagctcgcgattctgctccaacgtcagtgactgcatcatcgaaaaccaagtggtatctctcaggataaaggattgaagtcacagtgtagagcctcatataagt

SEQ ID NO: 36351 - DNA, 7005 bp, Arabidopsis thaliana landsberg
  unsure (1)..(7005): unsure at all n locations
ttttattgatgcttatctctctctgctttctattctgatagagaaattttgattttggccaagttaaataaggaactcaacgtacaagcgaaaaccattttttctaccggttagaacaaaattatgaataaaatggacttcacaacaatgctaaaaaactggttgtttttggcattggattctttgatacaatatgtgtttctcggtgaaacattcaaaagctgcaatggactaagcatcaaacacaaaggccattggctctaggattacttttgtacttgacctcaaatattttctatgggctgtgttgcagttgccatttgttgaacctctatgcaaataagtttcttttgttgaatcagtgcttgtgtgaaccatatatcaattttgattttctcgttttcttggcttatcacttgtattggactcactcgacagtaggacttgaatcctttatcctgagagatatcacttggttttctatgttgtagctgtcttggtgcagaataacaaattatgatatctcgctttttgtttattgtgtaagatctaaaacctgacttgctctgcatatattacgaatatattcagttctgaacaaagacaacgagatgttgaagcgctgctggtctgtgcacactctcttcttatcctgtcccttttatagcctcagcttgtgtatgtaaaatgctgctggtctgtgcacactctcttcttgtcctgtcccttttacagcctcagcttgtgtatgtaaaatgctcctgttcttgcagctggaaacgaagaggagattcgagagaagatgctctgaatcattgcagagcgagttccagagattgtggctttctaacgagtaatacttctcatcagcatttccctcttcgtactctacaaacatttcatctttcaatttgttttttttatttgaatgtcagatattacgttgctcaatggctttggatgaccaaatgacgagaccaagaagggagcaaattgctgcaaggcagcgcgaagaggtatagattatcaatgtgtttattgctgctctggttactgatttctattttgacataatattaatattcctgcctttagttgtcttagtcttaaatctatctatgcatctcagattgtaaacttattagactcgagtctctttaattagagtttaatatattgtttcaagactcggattttatctatatttagaattttatagaaggtatggcttatgaactatttaatgatcggaagaatttgagactcaataccgaagttcaaagacgagtggacaaaacagcaaagatggttcggatgtattgcttgatgaactcacgagggtaatgatcagagtacatgaagctgcaatgactcatgccctattttttcaaaagcaaaaaccatattcattcagataatcccgctagggactcattgtgcagcatagacatactatggagaacaggtgaagaagttggctacaacgttgtgccgaaagagagcttttcgtatgatgattaaggcaaagatgatcctataatacgagatctggatactctaccctaacaatttacaagggacgacaatttgatgtataataaagtttgtttatcagctcaggagtgacaatatgcaaaacttttggcttgggataaagatgctaaatttgtgttgatgaagagaagtggtaaaattgtagaattttatgtctattagtttgtgttcactttaggtgtttaagtgtgcttattgaggtacgtagaattaaaaaaatgtttcataccagtcaaaaagaaacctatgtgtccgataatttgaaatttgtgattcagttaattaggtaaccaacatggtaactgttacatcattaacgaggaaccatatctcatgttcagaaccgcccgaataccgtaattggatctccctttgtattttatgttatcggtttcaactataacacttttagcttaagatggttatgattaattatagtgaaagcaaggttacgtgcgaatttatgggtactttgtggcctcacacttaatttaaacataggatggttatgattaattctaagaattcttaagttgtggttctctaatagtcgatgtggttcactaataatcgaacacatacactatgttataccttcttcgtcccgatatctctagaattttatttttgaaatacattggtataattagatttggtgtaaatggtgttagaagagttcataatcacatcaaaaacttgtccaatgcaaaacatcaagaagaagaagaaacaatcaaatcttgtaattcttttgacaaaaaaagaaagatttggttgagacttgaaatttgaaaataggtatttgttacacctagcattgttttgacatgcgagaaaagccttatttccaatttccattcacgtattaacttatactataaaagtatcacttgtgcacttatgtatttaccatttaaacttaatcaagaaaaccaactttaatctccgtagtatatatatgttatgtatatcggtaacattatttacacaaacatttgacacatgttttcgatcgttgtggtgttagttaccataaagtagtgctatttaacatcccaatttattttgtatcgttttctttcgtttatgagtcacgtcactacatatacgaccgggacaatatggaaaaggatctctacgacaccgtttaaagccaaaactaacatgtttaacgactccagttgcgttgtcccttgtcatttatctgtgatccaaatgtcaacatattgatcaaaaagagcgtcaacgtaaaacaaaattccaaaatcaaatcaaattaacaatttgttagccgggtccatcgtggacctaccctaatggacggttgggattagagcatggaggcgagactttttttcttttctttttgataataacggaggcgagactttgatgataatgaaagtgaaatctgactctataaaattgtagggacaattaaacccaaactatcatacgtaaggaaaaaacattacatatcgtaaacacactctttgttaacaactgcatatggtatatatatatgcctaattaataatttttgtctccaaaaatgtactttataaaataagctaatgaaaacatatattgcaaaagataatcaatacacatgcgtatggatccaggatgtgcgtattggtaacaagtaatatactgtactaaattactaatacttatattgttaaactaactctatgttttctagctgataatgttatccttaataaactaacaatatatgtttaattttatgggggcctcccaaatgataagcaataaatattgatgcaaaatgtgtataaatacacacacaaatcggccacacctcttgaacactcatcatcactttggtcggccgctttcttccttccttcctcctcaaataatctacacatatataacatccctcttagtttctctgtggatccattgagacatatatcataagtaacaatggtgccataccaagaactcactcttcagagaagcttcagctacaactcaagaaagatcaatccagtgacttctccggcgcgtagctcacacgttcgttctccttcttcctccgccttaatcccaagcatacctgagcacgaactcttcctcgttccttgccggagatgttcctatgtccctctctcctcctcatcgtcggcctctcgcaatatcgggaaatttcacttgaagttttctttgctcttgcgttctttcatcaacatcattaacatccccgcttgcaaaatgctctctcttccctatccgccgtcttcttcttccagcgtctctaaccaactgatctcactcgttaccggtggatcctcttctctcgggagaagagtcaccgggactctgtacggacacaaaagaggccacgtcacgttttcggtccagtacaaccaaagatccgacccggtcttgctcctcgacctggccatgtcaacggcaactctcgtcaaagagatgtcgtcggggctcgtcaggatcgcgttggagtgcgagaagcgtcatcgatcaggtacgaagcttttccaagagcccaaatggacgatgtactgcaacgggaggaagtgcggctacgctgtgtcacgtggcggcgcgtgtactgatacagattggcgcgtgttgaacacggtatctagggttactgttggagccggagttattccgacgccgaaaactattgatgacgtgtccggtgttggtagtggaacggagcttggtgagttgttgtatatgagaggcaaatttgaacgagtcgttgggagccgtgactcggaggcgttttacatgatgaacccggacaaaaacggaggtccagaactcagtatttttcttcttagaatataataaagaataaaatggtttttaaagagaatttgacttcttaaaagtttgaaaatgtctttaaatgacgtattattatgtatatgtaatatgattgcaatgttgtgtcatgagatatatgtaagcgatattgatatgaaagaaagagagaggggcctagagtatgataaggttttgtttttctagttgtttatttgatgtgtggtatttttgtatctttgttattgatcaataagaagaaaagaaggatttgattattattagtttgtggttgcttatatgcaaggcatgaagatccccacatggtccgtcatgattaatgccaaatttaagattcttgttgtcttttattataatctctgtttaatttgagcaatgcgaatttgcttttacttgtaaagcagcgagcggtttagataaaactaaaaaagaagtactaattatatagaaagcgggattgcttttgagtttcgagttgtaatgtgtaacaatcaattcataaccaaacacctttttcatttatttaagatataacatataataataccatcaaattagtcagttacacttgtagttgtaggtaaacaactataacaaaaaattaagggataaaatgtgtacaaatatataacatataaaagaatggggaagaaataagaggaaatggaaaatagagggatggaccgtggaaaaaaagtgggtgggaaagagcggaaaggcccacagggattgattgagaaagtccaaaatctcatcaaaacagccgcaaagctaaaaattccctttttacaaaaattcttttgcattttaggaccacatttgttttgcattcagcagcattccctatatataatcggagaatcgtcaactgaaatccaaactaagttctaaactctgtaaaaaacttaaatattttttgtcatttaaattgtttatattgatcaactatgactagaataacattgggaaaaactcaaattctactattctaactccaaaataaaaatttcaaccccattttagtttatggttgttttacattcgttttcaatctacgtagttttacaactccaaaataaaaactaactccaaaataaaaattgcaaccacattcggatctaagcaaaaaaaaatcagaatagttgtaattattttgttgatttgccggtctacacaatgatcaagtctaagtttttttttttttgagactttggtactttacttgattatttgttaaataaattaatcagtttgtttttttcaagttccaaacaagataaaatataaattctgataaacttcataaatcttaagaacttgtcattgtaaattattcgttaccaagcaaattattagtgggctccgtattataaaacgacgcatgcataccttacatacatggctacatgtgacatataaaacaatttgcatcggttaccaatctgatatatacaaatacgtataaccaagtaaccaacctatacgtatatgcatcatagctagcctagacgatagagagcggatcatatgcagacagaaatgtcaagaccacagttgtgacttttcctatgagagaaaaagagaagcatatttcaaataaaattgtgaaggtataatatttttccaaagagagcaaatatgcatcatgaacacatgccctcgcctttttttttaagtaaacaatttttctttacatcactaaaatgcatgtgctatcgtttttggataaacaaatttcgacactgaacagatcccagcgctctgaagtttaagcgctatgcatatctatcttacggtaacaagtggtcggtcaatgaatatcgtcgatcttccgtttaacaattgaacgttattttccattaatcaacaaggaacacaaaatgaaaaagttatgtctcaaacggaaacactaagttcttcgttgttcataaacgggaaaaaatacaaagaagtatggaactgtacgtgaatcagaaaactaagaaatgagcaatttaaaccaattcatgaggaatcatgaagagtataattaattgagcaatatatacctagctaacccacttactcagttttttttatataaacacttacttactcgtacgtaaaggtggtgacgggaaaaattatcagaaatatatgtggctagcaatagcttagtgctatacaaaaatacttttaataagtcatgctataaatgatagcaatatactcagaaagcacatgtatccatgcatatcatataaggacggtgttgcattattgaatacgcttgcatacctgattccagattagaacacatatgcatcatgaacacatgccatcgcattaaaattttaatacttgcactttttctcttcgggcaagtctaatctgcatcgggtacattttctgtcttcctgattntcttacactagttctgtcttcatatgatcccctctgtctatattctttcattgttaacggatctcttcctccatttttctatatatataaaaagaaatgacttgggtggagtcatggagataacacttttcaatanacatataggggcaaatatttttgcatggaagtatgcatggaagtatctacatgtgacaaaatactaat

SEQ ID NO: 36352 - DNA, 1621 bp, Arabidopsis thaliana landsberg
gccgtgttagaacgcctaagtatctcctcccgaacaggaagagaccggtatatctcatttgagggttcgggactgtgaaggaaaaatcccatccttatccgggtgaaccgccttctcataaaaggtggtaagaccatcacatggttgtcatgaatccagacaaaatcatcatctgggttaataacctcaattactttgtggaagaagagcttggtagtcgctacataagcctcccaaagagacctatcaaatcttccaccatgatcagcggacaacggaagcttgtagggaaaaagcggccatatctgtcttttgcaaaaaccgtctttaaactttgattgcaaatcacgtgggaaaaacgtaggaacacatttaaatttggccaacagtatctgcgccacattgtcttgtttatttgaatcaacatcaacgctcaaagatccgggatatagggtctccatatcctcaggcaacccgtccttgagctgcaaatacagagaatcttgatcccaactaaaactccagcttccatttcgtttctccgccttcaatgggagccggttagccacaatgatcattcgatcagaggaaaccgaagaaggattatcggaagacacactatacgcttgatcttcatcaaactcagagacattaccaggaacagtcattaccctaggaagccgcctacgctctcttcccatgacagggaaattccctgatgccaagtctaacagattcgtgtacgacctagaaatcatcttcgcttgtctccaatcccccaaaagaatccaaaaccaaacactgcttcaataaatctgcatcagaagaaaccacaaaaatgcagtaaggtcaatctccacgaacaaactcaacaagatctacgataccaaaaattattttaagaaatcagtatttccactaatttgaatacccatcaaaccaaatcaaaagcttgagcaatacccagatatccaaaaatcaatgatatttactaatcatcctctatcactaagtaaagaacaaaaataaaaaactgagctttacgacaaaatcgaatgaatgatacattcttatcctctacaagcaagatccatgaaattacaacccaaaagctaatcaaaaacggaagaaagattcacctttcagataaacgaaaatctaaatcggagcgacccgatccctcaattcagtaaaacacaggaacccgaaaacgaaagaaacgaaatttgagccgtgaaaatttttgattggattagtgacgaatcgagactcacctttttgttccttgacaaatgaagaatctgatcttctctatctaacccaaaaaaaaaaatgaaacgtgaaatttaatctagggtttatatggaaaaactcggaaaataaaaattaaaaaatctctgtttccagcctcatatgtgtattttggaataatatcatatatgcccctctactctatagacgaaactactatgaccactatatatttatactccaaaagtcaaaagcttcttaccataaagagataatacccttttcctttttattttaaaacacttataggctggccttcacatacctttctcacaaaagatagcagcaagaacacattcgccatctttca

SEQ ID NO: 36353 - DNA, 1378 bp, Arabidopsis thaliana landsberg
  unsure (1)..(1378): unsure at all n locations
tatactttttacttcttagatacctatattttttttgttaacaatttatataataatttaaatagaaggtatattatttgattatgaaatgaagtaaagtaactttagtcatggaataagtatgaaatctagcactgacagaagactttctctcagaaaatgtagggataaaaggaggacagcaaaatagttacggagaaaatgtaagaggctgcaactttcacatgtatcctatgatgattagtccggtcttgatgataattttggatatgcaaaaagaagaatcagttacgtgtatcgttctagtttaaatcaataaatttgtgaattgtgttctacgaacgttttgatgattttctttataatccaaaatcgtacacccaatatgaacctaaatgccgcaagtgatcacaattcacaaattgctaaccacttttcagaagcacatatcggatcagaggagccacggttctccttctttcagggtggttacgtagaagatcacaaaacaaatggtatcatagaaagctggatacattgttcagtcaacaatagccttttattttgttaattccatgagtttgacaaacagtgtgctacttgatgcagatcaagctaagaatggagaagaagacacaggagagacaatgacattggtacaagctgcagagaaagcattgcagttgagaggcaatgatcataactcattgactaaacaaaccgctgcaaaatcaggacctgagtatttccttaaccgagtttatcgcggtttggagataaatagtgagaatactttgccggagccttatatagttgggagaagcgggaaggcgtctggatacaagcatgagtagcaacaactccaaaaacttcactatcacaaagaaaaattcctgctacnnnnnnnnnnnnnnnnnntgtttttattggcttagtgttattgttcaaagagagaatattactaaacacatgtgagagtgttgttagaaaagaaacaatttttttgtctctgtgtgtgttataacttattggcctcaagtggttatcatcattcatcaacagctctgagctacaagcataattcaattggacagttaaatattggatgtacaagagttgcttcatgaaaatagtatttataatagcaaagtttaacataagatacagcttttataagaaagctctctgttaattcggtttttatgcgaatattctcggaaagtgattagccagtggcatcgcatagcttcgtcatgagtagaaagagcctatggtcaagttcgaagtgagtaatatgagcccgttctccctgaagcaacatcaggagccccccgaacgaaacatataactctctgcaaacacataattgcaagataga

SEQ ID NO: 36354 - DNA, 2601 bp, Arabidopsis thaliana landsberg
ggagtctttgtgcactcagttttgtaaccctctgtattatttcagtgtattttacacggcgtggaaatcgcggggtgcctctggggaatgttctagcaatatctgcaggaattgttgatggaatgaatctcggtaacaactctatggcagctcttgtatcccaaggttgttcaaacataagatggttagccacaaaggtagtaagtttaatttgtgtctataattgcttcatagaaagtggttttttcggtccatgcaactcactacaatgattactaaatcctgtgtttattgcatttctgcgtttttctgtcttgtatgtgagaagatgggtgcaaagccaacaaccattactggtttatcaggaactggggacataatgcttacgtgttttgtaaatctttcaagaaaccgaacagttggagtcaggttagggtcaggggagacactagatgacatactaacctctatgaatcaggtgtgtttctcattggtgtcgctcttcatatggtaaaacaaaaaggattggttgaatctgaaacccatgaatcaaataacaattgctgcgcaggttgcagaaggtgtagcaacagccggggcagtgatagcattagcacagaaatacaatgtgaaactgccggttttgacagccgtagctaagataatagataatgaactgaccccgactaaggctgttcttgagctcatgaaccttcctcaggttgattataggtttcacagattcccatttcgactcggctactcttctggtatttttatttgactctgttctgtataattctggttttgcagattgaagaagtatgaggtagaacaatcgttttgaggaccacatattcaaagagatggctttaaggcggcaagagctttgcattcgtttagagatagctaacgatagagatgattcgaagtgagttttgtaatcgatttttaggcctgaatctcatgaatgtgaattgttcataaacattttacaaaatctctgtaaaaaaatctcttacatcaataaaaatgatgtttcagtatcttgtttagagtggagtgtggaatttggaataggcttcgtatgatcttcagactttcggagccatggatataagtatgggtgtttcaaattcgggtacacccaaccggtttaatccaaacttaaaccgtaaaaagccgatcaaaaaaataaacaatgcgcatgggctttgaagttgagaggcccacaatttttgaaggctcagacgtaaacggtgacgtataggaggcaaaacccttgcaattgcagtgtcgtcgtcgttgagtagtcgaagacggagggaaagaaacagagaacttgtttgtttcgtcgaagaataagatgatgaagagagcccaacaatcggcaagagaaacaaagcaagaagctaaagatgctagcaaagcgaagagcggtttgttcgcttcttgttccttctcttcacttggtttagataccaagctctctgaccagctcaaaggttctcttttttacctctgccgatgttgacatcctttgtttatgcctagtgagcttaaactttgagtttttccgtgtcaatttacacagaaaggatgggttttgaagctcctactcttgtacaagctcaagcaattcctgttattctctctggtcgagatgtgtatccttttcctacaaatttctgtcttctttttgtgtgaactatgattacatttgtagtttggtttgttttcagttaacttgggatatataaatgtatagacttgttaatgctccaaccggtactggaaagactatagcgtatttggcacccctcatccatcacttgcagggtcattctcctaaggttgatcgttctcatggaacttttggtatgtgcttttgttctagctacaatttagtatttctttgctggtaaagtgatgattttgatacttggcacttgtttgtggcagctttggtgattgtgcctacacgggaactatgccttcaggtgtatgaaaccttggagaagttactgcatcggttccattggatagtccctggctatgttatgggaggagagaaaaaggctaaagaaaaggctagattaaggaaaggtacaaatttgtgagaagcgagatggtcacttttgaatccagactaatcgttttatttcaggaatatccattctaattgcaaccccgggacgccttcttgaccatttgaagaacacagcttcatttgtgcacaaaaatctgcgttgggtcatctttgatgaagctgataggtataaatgctgtaccctgaaagttaatatcttccttgatcctgtgcttcctttaattaattcttcctttgcattttggcagcattctcgaattaggttatgggaaggagatagaacagataattaagcttctaggttcagggcaaaacgagcaaggggaagaagatgatattgttccaaagggtattcagaagcagaacttgttattgtcagcaacattgaatgataaagttaacgatcttgcaaacttagtttggacgatccggtaatgattgggtcttgacaacaccaaattgcaacaaaatctatcaatagagtctcctgc

SEQ ID NO: 36355 - DNA, 2011 bp, Arabidopsis thaliana landsberg
  unsure (1)..(2011): unsure at all n locations
ttttccaggatcagtagacataatgattgaaggggaaagctgttaacacatccgagttacttgtcttttctctgaatgctatagccatagctactaatgatttctgcaaagaaaatgagcttggaagaggtggattcggaccagtctacaaggttggttgattactttggttatagacaagagtctttgtgtttaatttttgtgatttttttgttgatgattgtgatatttatcagggtgttctcgaagatggacgtgagatagctgtgaagagattgtctggtaaatcaggacaaggagttgatgaattcaagaatgagattattctcatagcgaagcttcaacatcggaatcttgtgagattacttggatgttgcttcgagggagaagagaaaatgcttgtttatgagtatatgcctaacaagagcttggatttcttcctctttggtatgtttccttttttaaagatccaagaaagaataagcacttcctttcattcttcttagttttgctcttttgaatgtacagatgaaacgaaacaagcgttgatagactggaaactgcggttttcgataattgaagggattgcgagaggattgctttatcttcatagagattcaagattgagaatcattcatagagacttgaaggttagcaatgtgttgttagatacaaatatgaatccaaagatctcagattttggattggctaaatcttttgggggagatcagagtgaatcaagcacaaacagagtcgtgggtacttagtaaggacactccatcaccctatctctatatctatctttgtgtagtaattatcaaaactgtaatgctctaactacttgcagtggttacatgcctccggagtatgcaattgatggacatttctctgtgaaatctgatgtgttcagtttcggtgtattagtacttgagatcataactggcaagacgaatcgagggtttcgtcatgcagatcatgatcttaatcttcttggacacgtaagttatcgctttcaccattttagatcacttttcaaaaatcaaatctcattttaggattggtgaaaattcatggaattaatctctatgtcaaaatcaacgagcactaattaggagttgattcatgccatttatacactaaattaggtcttttacaatattgtgggatcccaaacaaaaccggccatcttgaaacttgtctccttttcactatattaggtgtggaaaatgtgggttgaagacagagaaatagaagtaccagaggaagagtggttggaagagacaagtgttatcccagaggtactaagatgtattcatgttgctttgctttgtgttcaacaaaaaccagaagacagaccaaccatggcttctgttgtcttgatgtttgggagtgatagttctcttcctcaccctacacagcccggttttttcaccaaccggaacgntcctgatatctcttcatctttaagcttacgttcacaaaacgaagtttccatcacaatgttgcagggacggtagaaaaatcaagcttatatataaaactacagttggttaatgtaatgtaatgtgtcaccaaagaagaaacaatcaaacaatagaatatacaaatatcagttacagggtttacctaggatctattacactcatggtttgaaaattattggaaggaatctcgagattaatcgacacagtgtcggaaaacaagagatttcgttcgttaaagaacccgggctgcctcggatcaagaagcaacatttcactactcaacatcaaaaccaccactgacatgtttggtctgtctttaggatcttgttgtacacataacagaccaatgtgtatcactcttaacacttcagagatatcggtacatgactcattgacagcttcatcgattatctcatatgccttatcttctaagaattgcctccaagcctgaaaatttatagtaattagataagattagaagacatgatcgatgggttaatttttctgctgcgctaatgacttacgtg

SEQ ID NO: 36356 - DNA, 3711 bp, Arabidopsis thaliana landsberg
aactgcttgtagttttttcgtttttggtccccgcgtgatgaacttgttaagtgtgtaaaacaaattacacataagacataactcaattaatatacccctactgattcattaaatttaagaatttgccaacattgtatgaattgcgattcaatgctccttcgtgtccatgataagatatattacgaattattatagcaactaatttttcagacaaatctcaaatattatttggatcaatcgaggaattatcaaaaattcaaaattatatattaggattacaaatagggttacagtgttctataagtttttatcagggtaaaaatatgaaataaagaaaatataagggtatgtttaaaattatgaagattgtgtttagataatcaagaacagggcatttccaattagagagaaaaaaaggagatccttttaatgtatcgcagaccatcctcagctatggcctcctgtttttccttttaggtatcttcgtagctcttcaccgtaaataatcccgacccatctagaggacggagccgccggcgaggaaattcaggcagattagatcggcgatttggccttgttttcaacgaagatcgtcttgttagggtttcgtccgcatctatggattctctgtcaaatggggtattgatatgaatttcggctttcgtgatgacggaatctatctggttaaacgatcaatcttctcctcggtcgatgataccttcagcaaaaccagtggctaatgtccatcgccagaggtcaggactagcttattgacttgagtttgaattatggattcttgtagtagaacctttttgatgcctttgaattatagaaactaggaactactttgttcatgtttaggagatccagcgttagatcacgtaattggaaggcttatttaggagatcgtttaaaattcggatgctaatttctgaattttgttttacgatggctatacaaacagtttgaagtgatagatctcatgtaatatagagttttggaaccgtaatcttgttcacaaggacaattatgcggcttttgatgaatctgtgctagtttcagcagttaagacaagtagacaacagaatggcttggaagtgtatcttacttgcagcctataatttcatgttttgcggtgcccagactaattctgtcagctgctgatctggctggatcactcataatatggtttgagtgtgattattcaggtgtaggagtgtcttcaagttactagtccagagggaaatttcaccaaacacaaagtttgttccaagaaaacggtggggtgaaagccgatgtgatgctgattcgtcgtgtggaaccactagcgaaccagtgagagatcagggacttaatcttatttcttggtacctttcgttcgtcacttcttcgcttctctttttgatgtgatccctgcctcctttcgggcatctgaatgtaaactgcattccctacatgtagggttgaggcagagtcattgcagcatttatctgctaaatactgtcctcttgtacctcctccaaggtcaacgattgcagcagcttttagttcagatggaagaactcttgcttctacacagtaagtatcatgagtcgtatttgttggaattttttttttgtttgctaatgagtttttttttgtatttttaatcttgtagtggtgaccacacctgtaaaaattattgattgtgagacaggaaaatgcttaaaaatattgactggccatcgaaggacaccctgggtggtgagttagagaatgctatctcttttctcttaacttcattgactctttgatttatcatggttactaggtagcactaacttgaccagaaccgtctctagattagtcaatcttttctcatgaaaatgatttctggtggctatctttgtcattggtgtcaattttgttatattttttgtttaggtgtaacatgttagtcaatacttgcaatgaattaagttgattttggtatgattaaatagataatttcctttgcgttatatctactgctttaatatctaatgttattaagttctctacaggtcagatttcacccgcgccactcagaaatagttgctagtggaagtttagatcatgaggtgcgcttatggaatgcaaaaactggggagtgtatcagaactcatgatttctgtaagcgccaagcaatattcttttgtctttttcctcttctactttttcatataattaactccgtccctcttcctccttcactaaacagatcgacctattgcttccattgctttccacgctggaggtgaattacttgctgttgcatctggtcataaggtatcttattccctttgaatctctcatgaaacgctagctagttgcaggtggcttatcctctcagaataaagtatctgatctaacggtctcttaaagtttgactaatgcactttttttttccttttgaagttgcacatatggcattataataagggaggggatgactcggcaccagcaattgtgttgaagacaaggcggtccctgagagctgtacactttcatccacatggggttcctcttctcttgactgctgaggtgagctacatattgaggattgagttaatgttctgccactttgtgggcttactctattaactataaatggcaggtgactgacattgattcatcagattccgcaatgacaagatcaacatctccaggttatttgcgatatccgccccctgctattttcttcaccaacacacaaagtggcagtcgtaccagtttggcagccgaactgccacttgtgccattaccgtatttgctcttgccttcatattctgcggatgatccaagaatactatattctagtggtactactggtccaaggaatgcacaaacaaggtttcagagtaatcaaagttctgtagaacatggcagcagaacaatttcgccttctcctcttcccatggctacgtctgctgatctttctggttcctatcatgtcccagacaactctgctagtaatacatttgctacccaagcaggagctagaaattctactactgcagttgatgccatggatgtagatgaagctcaacctgttggaagaaatagagttcccagtcaagtttcaagtcaaccagatttactggagtttggacaacttcagcagttatttcactttagagacagaggttcctgggagctaccttttctacaagggtggttgatggctcaaagccaagctggtgctaattcagtggctcttcctactggtagtagtggtcacgtcaactcaactccttatatgggttcttcttcagcatctcattcatccacagccagtctagaggctggagtagcgtcattagaaattcctggtggtgttaacttatatggggtttctgcaagaggtgactcccgggaccgaattctacagtaccgcttcgcaggatctggtttagcagaaggtcgttcctctcgtaacactcaacatgaaggagctgatgctcaacctgtggtaaacagaatcccttctgaactggctagttcaattgctgctgcagagttgccttgtactgtcaaactgagagtgtggtcacatgacatcaaagacccatgttcaatactgaagtctgacaaatgtcgattaacaatacatcatgctgttctttgcaggtaaaatttctccttatatcggtgtacgatcttaacatgatcgctaatgcttttataaatatt

SEQ ID NO: 36357 - DNA, 4556 bp, Arabidopsis thaliana landsberg
ttttgccggagactacttacccttctctttcttcttcttcgaaacgggtttttaaagctcagctcttggtgacgccgtcgtgagagagagagattgaagtagaagaagaagaaattgaggttgagagatgtatgtagtgcctccgcctcagcgatctgattctggatccaatggtgatttaagggtttaccaaacttggaaaggcagcaatgtgagttttttttttctcttttttgttcttctttgagctatagatgcttcattactcttccttcccatttttttagtttttgctaagtctattaaatgggactttagattagctgctatgttttcaatttcaacctagttcaaaattggaactttattaagtctttaggagaatctagctattgcgtttttgtgaatcctaggttttggtgtcgttttcataggttgcttttgtggtgaataccctttggatcgttttaagctggacaaggcattttaactttatctaaatatagctcaatgatagattgagttactttggacagaaaggttttgtaatttgagattacacatatatatatagttgatacttgtgtataaggaggttttcaaaaaccttctctctgtgttgccttaagacatcagctagagaatctgaatacttcttcaatgattacttactctgagtactgattaagacatgtgttgtgtgatgtactgaattcatcgctggtgtattgttttcctggatgattcttgtttttggggaatactttgttctcgaaagtttctctaccgggctgtttattttcgcgttttattttgcagatattctttcttcagggaaggtttgtatttgggccagatgttagatcactggcgctgaccatttgtctcattgctgtccctgttacaattttctgcatctttgtcgcaaggaagctaattgatgacttctccgatagctggggagtctcaatagtagctgtcgccgtcgtgttcaccatttatgtatgtatagttctttctcgcattgcatagcagatggtctctataatattctgtagctgatgcttttattttgtattcccttatgattccggttctttcttcaggatttaattcttctgctgcttacatccggaagagatccaggtattatcccaagaaatgctcatcctccagagcctgaaacccttgatggaaacatggatgcaggggctggccagactccgcagctgcgattgcctcgcattaaggaagtacagcttaatggaatcacatttaaggtcaagtactgtgacacttgcatgctctataggccgcctcgctgctcgcattgctcaatttgcaacaactgcgtagaaaggtttgaccatcactgcccttgggtcggccaatgtattgggatggtaagtcaaaatccaactgatcccgtctttaagctatccacataaaccatagtttcctaaatatcatctcatattctgatggttgttgcagaggaactaccgattcttcttcatgttcgtcttctccacgacccttctatgtatatatgtgtttgccttctgctgggtctatataagaaagattatggaatcagagcacacaaccacttggaaggcaatgcttaaaactcctgcctccattgttctaataatatacacattcatatcaatgtggtttgttggtggcttaacagttttccatttatatctcatcagcacgaaccaggtatgttgcgaccatccaatccccaccctctcttaaggaatcacgggatctctgtaaccattgatttatctttgttcttgcagactacatacgagaatttccgatacagatatgatcggcgaagcaacccacataacaagggagtggttaataacttcaaagaaacatttttttccacaatccctccttcaaagaacgactttagagctatggtccagcgtgaacctccattacctcctagatctgtagcaggtggttttatgagtccaaacatgggtaaagccaatgatgagattgaaatgggaaggaaggctgtttgggcagacatgggtccagcaatgtcagatcatggtgacggtaaacatggtaacaatgagcggttacatgttaaggacggtgagttaggcgagctatctccagacattagggcaacagttgatgaacagagtgataggccaagtatgcacccgagacgctcaagctggggaaggaaaagcggaagctgggacatgtcaccagaagttatggccttagcagccagagtaggagaacaaaaccagaacggcggaggtagcagcagcggaagcggtttagtgacggagaaccggcctacataattgattacatggtttagcaccgaaggaagaaagaacatagccgaagttcggtatggtgaatacaggtttagagaaaatctgaggggagtttctttttcttttctttttcaaatgtgtattttttttctgggattattcagcttataatcagtcttgtggtttgtggtttatggagggaaagcagaacttgctaatgttcttaatgtggaaagtgtttgtgttgggctttgttgtggtaaagcaaaggttgaattggtgtgttgtttgtatgagtgagctttcttctggatttgttttcttcttcttttcttttagttgtgttaatacatttaaccagagatttctgttttttttaaggtagaggagaaaaaagttgatatataaacaaaaaagtttctgtgttattttatcaagaagctgaaacagaattatcaagacatgtggaccaaaagacagaacatttatatagttgttcattgaagcatggctctgcacttaatgcagaagagccctaatgtttaatttattttgcctctaaattaatttaaatttgtttttgtttgataggacaaggttacagaagatgagtgtgttaaggtctctgctgagtcaaagatatagtcaagaaaaatgtccaaatcaataattaaagccttgaattatagagtttaagttaaattttctgaaaatctaagcttgtcacacaaacatcagatcataaagacaggatcttaaagagagtcgataagattttcatcagtgttatatataaaactaatatatttatataacatggaccatagttcaattgaaatgtcactattatcatttagtagcctctgctcctctttattaggaaccttacttgtgatagaaccaccatgtgagagagctctaaaccctctgaaactattcttttcatctttatctttctgtcttctaaattcactttcaacatcagagagccctaagcttttttttttactcattacaccaaaaaccttcaacggcaatttaaccaagtgagtttcttgtagttttgctacttctctctctttcttgaacactgtagagtcttaaggtccatatcacatgatggagacaagctcctctgtttatatataaagagacaccaaatcttaaataccaatttaagcaggtgggtttcctttgtcttctctttaaaccctcaacagcttttcagttttaggataaagttggagtttcaaattctgctgcctttactcttttcctcaatctctctgctttttgtcacataccaaaagatgtataagaatcagttgcaagagcttgcacagaggagttgtttcagtctcccatcatatacatgcacaagagaaggaccagatcatgctccaagattcaaagctagtgtaaacttcaatggtgagatatttgaaagcccaacttactgttctactctcagacaagctgagcattcagctgctgaagttgctcttagtgctctctcttccaaaggtccttcaaagtctctaactgctagagttctagtaagtcttaatctcctctaaagcatgcaaagttctttctcatgtttgaatcattttttttgcgaagtctaataatgtttggttgtttctctgaggatgagactgggatctacaagaatctgcttcaagagacagcacacagagctggtcttgatctaccggtttacacaagtgtgagatcaggacctggtcacatcccaacattctcttgtactgtggagcttgctggaatgagttttaatggagaatcagcaaagactaagaaacaagctgagaagaatgcagccattgcagcttggttctccttgagaaaaagtacctccaaactccaaactttttactcaaatcttattggtttgttatctctctcattcaccctttgctacatacacagtgccaagattggacccattgagaggtgaagagaaggaacaagagatagttgcaagagtcctctcaagatttagacccaaagaagtgaaaagaagagaaccaaaccagtcaagaagaagaacagtcatcagaacaattcgccaaaacacaacaacaacaacaacaaccacaagagacttgttgtgtgagaaactcagatccatgaatctatataccaatgaaacttcatcgtcatcaccaccaccacagagattctggccttcaagaacatatctcacacaagaac

SEQ ID NO: 36358 - DNA, 2034 bp, Arabidopsis thaliana landsberg
agtctagcagatgagagttcaatatatattattttgtgtctcttcatcatacacattaaaaagtaggggggcggttttcttaaaaatctatatcattctaatattgaatgaaattgcagcatgaaacgatatcatcaattatcgtaaaaagaaaaacaaaaacctagtggtaacacaccgaatcaaataatggagaacacacaacacgtccacaactccaaagtatattttttttttataactttgaacacttaaattttaaaactgaatacaataaaaacactctaataaaacccttaaaatagccaatgaaaatctccaaagtgcatataaaaaaaaaagatctttatattgcgactctctcataatatttctctccttttatgtgcctcattctcctctcgaagacttcgtgttgaaagagcgaccagtgctctttctctctatccacaaacacgaacaattcttcgttgtctttgttcctgttgccaactccagattctcaaagtgccacaatctctaacattgcaaagttgagacatctcataaactaactcaggttatcaaatctatctccttttgccgtatttggcaattcatgttttcgggtttgctttcctctttctggggtttcttgtctcgcaacgctactgctctatgtctagatatcgagagaactaacaatcggggatgcttttgttttagaatttgtgtttccacgtttttgtctcttgcgtaaagatttcgacttttccgcttttcttgcataccattgtcataagatagaaatttgggttaatcctgtacgagatcattgagaattacatacaacctgttcatgtttgggatcgatgcttatgggctttgctttgatcaggtctgattatgaatctgggtcagtggttctacggaatttggctctgaaaacactagattttatctttgtcctcgtcttcgtgcttttgtggactctgctttaattcccgtgtctgtgtttgtttcaatgatcaagtcttttgattgaatcgaatgtatttggtattatccctcaacaacttctttcacgatctgaggtagttgaatcttcagtttggtaccgtggtcttaaatatctgagctttatactttagcccgtcgtgttgctctggacaatgtatttatttgagctccttgcggtttgtttgtatctttcatacttagggtagtgaatttcgaagttgggtcttttatctttgtgtttttgcttcttagtagttagatcttgtttgccaggaaagtaggactgatttgcctttgctgtttgatttattacattctgagtttaccacatttttgggttcttgaaagtttacattttcaggtttgagatccaatgatgttgaaaatgcagttcttttttgcttgttcaggtttcactacgttgaggatggttcttctgatggatggggaaaataatcttatggaagaaacaacagctgttatcgaagaagactcctatgatgacgagtttccctgcggagatccacaagttgagcctcgtgttggagatgaatttcaggtcgacattcctcttatgatgtctgcatccaagcgcgctgtgtttctttccaatcctgttgctttggatgattctacatgttcttttctcgtcggtctacctgtccaagtaatgtggatagacaaagttggaataggacaaggaaatggagatggcaatgttgacatgaaccaatctttgaaatctttaagagctaaaaaaggccgttgctctgccaagatcagaggaaagagtgacaagaattcggaaaccaagaagcaaagactgaatcttgaggctgttcctgcgataccttccagttcttgggacgatttggaggttgctagctttgttcttggtctgtacacatttgggaagaactttactcagatgaataatttcatggagaacaacccaataggagagatcatgttgttttactatgggaagttctacaattctgcaaagaaccacacttggtctgaatcccgaaagaa

SEQ ID NO: 36359 - DNA, 5532 bp, Arabidopsis thaliana landsberg
  unsure (1)..(5532): unsure at all n locations
ggcctgcacttctaacttgattctgatctccccaaaccagtacatttgtcggaaaactcagtggttctgtcgaaaactcatgaacagagctctgatcttgagatggattatgctgattagtcgagtgccctgattcaaagttttgattttgaggtaaaccctcacttgctccatgtgtggtatcttccacggaaccaacggtgtttctacagagaggacaagtggaatgagactgaaaccacatatcgatgcaatccacatgaaacccatgattacaccttggcaaaaccctagctttgtcgccatcaacgagatcagagagacaaacggcgcattctaacccgtctttgaagtccgtacacttgaaaacaacaacatggatagattggagaattttagaatcaagtccagcgttgtgaagaggatcttcttgactttgagcgaagacaaaacgacgtcgtcgaggattacgtccgatgactgtggagccaggatcgtcggattggattaggtttaggttgaaatgttgttccacacgccaccaaaagagtcttgcgtagagatgaagcaagaggaggaatagaatccctgtgaaaatcgatacgattgagaatagaagaacttttcccatcgtctcttctccttcgaatttgctgaaaagagaaccattagaaacagattcttcgtccatgtcgctgaaaaatagtgaaaaccctaattaatgaatttggatcaagactttttgcgtgggaagaaaggaaaacgaaaaagattctcacatcaagacaaagattgtgaagagtagaagaactgatcaaaaccgggaaaatcgatgctttatttaaaggaatgagttgagataaagagaggtttttgatgttgagttctgattggaggtccattagttttgaagaatttgtcactcgcacacgacacaatgtcgattagaagcaagactggttcaagattttttaaaaagttgggacacaagttagtagaacacgcttttggggttttgacttggtttagtcaatttctccaaatcatattagtgtcaaaatcagctttgataaaaaaatgtttactaacctttaaactcaaggtattgggccttaaaaaagtctatcttatggggtaaggttgaagcatatagggtaagccatatttaactgatagagtcgcgtactttggtcacacaattagggattcgtccatcgcaatgacaaaacagaagcagtacgtctccgacgtaaacttaacagtatgtggatccaataaaccgtcttcaacacctggaaaagacatagaatactttggtctgatccctgttgatctcttcatcagtaatatcttatcgagattgccgctgaagtctaaagctaagtgtcgttgcgtatcgaagctctggtcgtccataattcgccgtccaaattacaaccagttgttcccgatcaagtccccagctccgcggatccttttcaccatcgaatatgcaggaatcttgttcttttactcttcacctcagcctcacaatccggatgagaactcgtctcttgtagccacccttcatcagaacactggtaacaccaagttctatgagatatgtggtcctgtctgcggacgggtactgtgtcgtcagtataattcagttggggtgatttataatcccatcacaggagagtcttcaaacttgccgaaactaagtttaaaggggattaataagtcagagtggttatgtgataaagcaagatattcttttgggtatgatccaatcgagaaacagctcaaagtgttgtgtatcacctggttgcgtactggctcagagcacttgtccaatgagtatcaagttctcacattagggactgaaaataaaaaaactcttttggagaaagattcaaggttgtgcaattcattttttttgggacaatactgcgatatgcatcgatggtgttttgtattatccagcaatgatctataagggggaaggtaccatcgtttgctttgatgttaggtctgagaaatttagttttaccaacattgatcaagatgacatagcagtaaagatagattcttgcactttaacgttgatcgactacaagggtaaattaggtgcttgtagttttaatattaacactaatcttttggagttgtgggttttggaggatgccaagaaaaataaatggggtcaaagtatatctacgcaatatcttatccgtggctcgtgaaacccagtcatgtacgtcctgccggaatgactggtagttgcgaacttgtgttatacccaatctttataggaggtcgtcatcctttcttcattttgtactacaatctcgagagcaaaatcatcaccattgtaaaacttgaagatcaactttttagaaattttcgtgggtgtaggattcaggcttttacaaactatgtagaggatgtgaagcttatctaagcgtttacttcttccaaacagaactcacatgatctttgtcgatctttgtcttcttctttttnnnnnnnnnnnnnnnnnnnnnnnnnnnnnnnnnnnnnnntctttgctttatttctttggttaattctttaataatcggaaagctatgaagaattgtttactaagctgaaactctgacatacaattgagttatagatacaattggcacatcacaaactggaaactgcttctctcaagcataagagataagaccaatatataagccaaaattttgaattactaattgaaaaatatgacttttctctgctaaattgctacaacattaggctgcttctgtgacttcgacgagccttccacgaacccacttcttcgttacgtttcctgattccaaagatgcagccttttcgtcaatcccgtggtaaccatttggaagaggatgattctcagcaagactgatagctccatcagactctgctggtggatggactctcgttccgtttggttgcccaactatcccgagtttgatatcttctctacctccttgggatgtgttggattccatatcagaaacaaactggtttgtagtaccttctatatatctaaagtcggtaaatcgttagatctcatgttcatgtgaagactctctccgttgatctgcaatgtgtgtgttccattaatctctcctggtcgttcttgatcgtttgtatctttggtttcagattcactgtcattaggctgaggtgaaagaagaaatgggtaagtcccatcttcatctgaagctatctgcctcatctctaaagatttaatcagttgtgttgcttctgctatgagctttttactctctaacaacgatgcttgagcaaccgggcttttcaaagcagcaatctcgaggactttcgcagctttctcagcttccgagatcaaaagcctgaggcaagaaaaggttaattcttgttaacttctgctcacagttgcaaacagagaaatattaacaattctgttttaagtgtactgaccttgctcgttccacagcatccatcttctttgattcttccgccactcgttttgctctgatgcttttgatcatttccagttttgaacttgccaaaggatctttatacgcaggtgttttgcgcttccttactttcaccacttgaacttggctttgacgttcaaactctgaatcccttgtacttttctttgtaggagtcttctttctaggttctgcatcgctccttggtcttctacgacgcctctcgacaccaacaggtataccgtgatattttgccaagccggagcaaactctttcacggtaagactgataagagaaagcaaactgagttaaatatgaccaagaacaaaacatcaaacaagtttgatttgatcaagtgactagacaacttactggatcagcccatttagcagctattgcttctgcaattctccttctttgttcaggagattttggcgctcttctgttacttttagctcctttaatggctttcctctgctcaacactttccagccattccagttgattctgttgatccaagatgttgtaagaatcccactgaagctcttcttcgtctgtatatccttgtttagcagcctccgctaacaagttttgccactcaaaatgacatgtctcctgcacttttctcctctccttcctccttgcccatcgcatccgcactccctctccaatcttcatccgtgtctccttgctgtaaaaatcatgcaaatttgggaagatagtattatgataacaaaaaccaaaagctccaacaggtttaaaagcaaacgaaaaaccggtactgacttttgtgcgtgcccaagattcgctaatttcatcttgatctgcacaaggacaaagacacaaaggttctatgaggggttgaaaattctgatgcatagagcaaacatatagaaccattcttacatgacatcacctttgggtcttgcattgcaatctttgtcctttctctaatcttctgtagggtctctgcataaacgcaaaagaaaaaagattatgaaatgtttccaattagaagcaactgaagatagattgctgaagatacgaataagcaaaaactactcacctggactatgcttcctgcctttgttccaaggagtgttccctctatttgccttagaaatcctcatccttctcaacttttctctgtcatccacttgttcttcgccatcatcagcacttccatttgaggatttcgaagaagcagaagacaaagaagagctccgttcgttttctttttgagccggatacttggtttcaagagtggccactgcagtaataagaacttttcctcttcggacatgactatgacccgtgtaaaatttcaaattcttggagaaacaagactgtctccatggattaggtagacttttagcatggataatactctgagcccccaatggaacaagatgagcttgaaatgaaggttggatagtagcaatatctgcaaagattaaaccaaagagtcatctccattagctagtaaacattctctagatactgtgcgaatcactagtcttttcttatacgcatttagaccaagattgcaaatgcaaataattgatactcaagaatgatgaaatccaatagaaaagaaacaaaattgagaagaaagagagtctcaatactgaagtagaattctaaacagtaaccaaacacaaacccagaaaattaagaggtaaatatctggaaactttaccagaaaaggtacctaaagaaggcattgggagctcattcagaccaggaaaacgaaaaaggaagaaactttgaaacactcttctctgcaacaccaaccaggatgtcttgtaagattatacggaacaatacattaaggaaatatgttcctcttactgtctgagagaggcgagggtttttgcaggaatttgacagacaaggataagccacacaaaaagcaaatttcaacgaagatacttgtgtctggctttgacgcagcaaccagggaggcgatggataacgagacccggctaaactaatgacccgacccggatcactccatattgggctaatgggctgcgtttcatagcccaattcacac

SEQ ID NO: 36360 - DNA, 4567 bp, Arabidopsis thaliana landsberg
  unsure (1)..(4567): unsure at all n locations
aaactaaaagcgagatcatcctcgtctagatcgtcattagtgttcatttgaattgtcagtaacatctccagtgggtagctggctagcggacttgataatctgcagacaaaatacttatccgtataagattccagtagtttaatgaaacattctgtgatcatatggtgtcacaataaccagcataatgcagaacaaatacattcagaaacacagaaagacataattaggattaggattcgacagatcatttaagtgaattaccatatgatccaaattcgagacagtgcttgcactcgccaccttcttgatttcttcaatgtcaccttcattataggcggtgagaagtctactagcacttcggctctgatcactcttcagaaaggcatcaatcctaaccatgagaagaaaaatattcagacactaatttggtatcacaattcctaaagagttcatgttttcttggtcgtagtaacatatatgatccatataaaaagacaaaagtgtactcactgagaacagtcattgtagcatttttctgcctgctgcaggtcgtgagcatacagatataagatgattgcactgagataggcctgaaataacattcagaaaacagttaaatcacaagtcataacaataacattcagagatacaagggaatcggcctgagctaagcagaaagcagcaaggtcgaacagagatggttaggagcacatatactcataccttacactggctatttgtcgcatcacactgatcagcagctacacccaatcttaagaaaaaggttgcagcatctgtgaacctacaaattttaatatttgtgccaatcaattactatatcagatagacggataaaatgttccatgatactaactgatcatatattcatatatctgcaatgtgaaactttaaacacggatgtgtttctaagtaaataataacttacttctcaagcttaatgtagacattagcacaagcacggtacagatcaaaggccatttggtccctcccatcctcttcaagaatttcacaagcatcagtgtatagttggatggcgtcatctggtttgacatcttccaaagcactgcaacacaaaattattggagatgaaacaaagaaaaacggaggaagccacactgactattatcgcatttagataatagatagtaagatacaaatcatgaaatccaatttcttgattattaaagatgtcaacacaaaattaccgggcagcctttccaagagcatctgatgcgggttgtgcccttccacactcaacatacagctccgacgcctttctataaaaatcagcaacttcattccaaatacttagcttctgtgctaaggcagcagcagactccatatgctttgcagcatcccaaggactatttactatcaaggataacattaaagaggatgctatgtcgatgcgacaaaaataaacagcaacaaattataatctttaacggaaagtttggatacgaagcttgcatctcttgtccttttgaagctttctcgagagccactttagctttctcatatttgtttgatgctctaaacccatttgctgtcattcatcaatgaataggagtaaaaggaaagaatcaaaatcagttatcatttatgcatgaaaagaatcaaaccatgcttttatagtctccaagcttttagagaatagcatttggattctgccatagagcaaaatacactgtgttacccacctgcttgctcatacaactcagtagcacctctccaatcagcactccatctagtaagcgtgagctttgtcctgtaaaaaatgaagaaccaaagatgcttaaaaggatggttaataacagaagcagatcactgaaatgtaggaatgtgaaaacagaacaacacaatttatataagcaagcaaagacgatgttccttatcaaaccaatccaaaatgatttctcaatccttgtcaaactggtaatatattacattgcatactcattattaactcttatttccaattcacaaaaattgcagagaatctcacaactcacaaatttttgaattgaaaatcagactcaaaagaagtgttcttaaactttaagcaaactctcatattaaaatgttcctatgcaacaatacacaagatcctagatccttcttttctcccaacaaaaacctttgatcgaatctcagaatggatcacgagaagtttctcaatcacagtaacaaaagaaaaccctcatatcttaagagcacagtcatctcgatcaaacccaaaatgccctaaagcccaaatcgaattttaatttccaccgatcattaacctctcaaacagagcattcatataaatgagaagagaaaaagnnnnnnnnnnnnnnnnnnnnnacatcattttgtcaggatccgaagacatgactagctccaaatttcagtaaagttcccggcgatttagcaaacttggagatcgatcggcaatatagagagaatcgttttcactatctgatcaaaggaatttgcaaatcttctatttttagttaattttattattgaaattattggactttatcttccagatatataataaaatcaaatattttattttaactccttgaaacattcttattcaaacaaaccaaaccatacttttgttatgtttcaaattacaccatttccacgattctgttctttgtgagattctaattctcataatttagatgaaagttaacaactttctatataaaaatacaaacgttatactaataagcatgttctggttcatcttcacaagtcaagctcatgacaataagcatgattctgaaactatgattttaggtaagaagtagaaatccaacgttgaatctcctacacattctccaaactctacaatctccactctataaattacaacaccatttgactccaaacatcatcgaacaaacaaacaacttcaaaacaaaaagaagaaccatctcttgttaaacactccaaaatcagctacaatgtcaatttcaagagtttatctctgtctaatctttctcacattcgtcagttccccacttgtgctctgctctcgcagcccgaaactcgcagcagcatcagcagcaatagggaagaagcatgggaaagaacatgttcattctccggcaatgcttttttctgaattcccgaaggttgattcatcatcctccatgacacatattgatgagcctgcaacaaagtctgcaatagccggttttttcaggtatagactaccattccagggatggcctttccacaagtatgctcctttcccaatgggtacacctacgaatccttccgttcctgtaacttcaacaccgtcttctggagctgctgctgctgaggaagaggaaaccgagaaggtgccttctgcgccaagcaaaggaaacagagatggaggcaatgcgtaatgaatcaatatgttttctactagaaccttattgtgttttaatgactgtggaatctttcctctagttttacatattgtatcaaataaaatgtaccatgtattataaatgctatgtgacatttacatggaaaaatgaaatgaatacagtttctcttatctaccaagctctgtgtatatattaccagcttcattgtttcgaggcgattttcactgtgacagacaccggaatacgaacaatgtgtcccgcgtttcctagcagcttgatccctccaaaactagaaatagagctgttcctctttgctgtgaggattacactaagtagctttgtctctccactggctatagagaattgagtaggagatacatttatcaaaacatcaaaaggagtaatcaaactgacagtataggtctcatttccagcaatgtttgtcattagtctttggaccgttcgagtgttgttaagcttcgatacagtgatggatggcaaattaaggtcagatccgctgattgttgcattgttccgcaagcaatttgtgccggtgtagttgaataccactggagctgatccattgatgccacaaagaaatgacatatagtcttcaaaacctgcatagaaagaccgttaaaatggtgtctacatttggtaatttgaaaatgtagaaaactgccaaggttatgttaagtgtttaactcactagtatcaaagattaggccaggatccaaagctgcggttgcattcacaaagccattccccatatcaaatggggtagcaggagatatggtttgatcaggattagcataagcacgttgagccattatcgcctcgcctttattgtcaaatagaacagaggttgttgaaagtgcagatgcaatagctgaaggactaaactttctgaatttctgcttgaccaatgcagccacaccagctacatgaggagcagccatactcgtaccagacatcatcgcaaaactttctcctaaaatgagcaaaaggaacacaacagtttaaatgggaatgtcatcaactatatcaatgtcatgctttgtataccttcaaactcagtggattcagtggcagcggaactccaagcgccccaaatggaatttccaggagctacaagatttggtttcaaaatggggatcctctagagtcgacct

SEQ ID NO: 36361 - DNA, 2360 bp, Arabidopsis thaliana landsberg
taaattaccatcgtccacattaatgcttatgccaaacccgtgaccaatttaacttcatcatagttaccatcattagtcccaataatctcactttttcctcatctcattaaccactttctccaccggcaacgtcaaatcccttttatgcacatccattttaagaccaaacttcatgaacaacgtcaatgacatcttctgctccactcgatgtcccggagccaccgtaagccgatgccggagcaaaatcgaagcagtaattgatttcatctgcaaataagccaagtctttgcctagacaaatccgtggaccggcattgaacgctacaaatttgtattggttacatttttcgtcccggctttcctctaaccatctttccggtttaaactcgagacaatcttcaccccaaatgaatttcatacgcccaaccgaatatatcgaatatgtaaggtttgatcccgatggaacaaatgtcccgtcagtaaaacatcgttggcaacaacaaattttgaatcttctggtaccgatggatatagctcaatgtttcggacaatgccgcttttaagtagaccaactggtcaatttcatcgaaagtcaacggctcgtcggtccacttcgacacattggtgtcacgtgtcttgatcagaatggtgcagatctcgtttatgattttttcttcgactcgtgggttaagactaaccaaccagaagaaccaactcatagcaaccgatgacgtgtcacgtccagctaggatgaaatttaacgccacgtatttaagatatttatccgagtaggattcttttttcttcatgaaccgtgacaatagatcatcatggcgggatccatcttgttgctgacctagcaattcgagcttacgtgtatttatgatctctgctaagtaattatccacgtggctgatgcttcggctcatatcatcttctaagccgagccgaagccattttctgatcttccaaataaactctggcatgataaaccgttgaagagtggcttcggtggctccatcgaaagccaccgcaaatccgttctcaggaaactccggcgatagtgtccgtggatctttaccaaatgttaagccgcaaatgttatcgaaagtgagccgtaaaagaacatcttgaagatcaattggctcggctcgactcatagctgattcaagaatcggcaccagacggttcttgatggctcgatcaacccaacgagccatggcttggcgaagtgtacgtgttgtgaattccaatgcagcggtcttacgctgaaaccgccatgtgtcaccatctgaattaaagattccgtctcctaacagatcgtgaaaaaccgattgccagctaggacctttggggtaattatcgaaccgggtcttcaagatatgctccagattcttcgggtcacacgtgacagtcacgtgaccttgtttcttagccaagaacgggatcgggaatatgcacgtttggtacgtaccgccgcacatgcggaggttatcggcgatgaagtcgtgcatgcggtgagcatttgttatgagtgctggaagactgcccactaagggccagacacgtggacctttatatgaacgacgtaaagaaacgaaccatataatgtaggttacgatgagggtaaggatgatcgcagccgttgatccatccattttttatattttagtctggaggtgagagcagaatctataagaagagaattgaagtgtgagtgtgtgtgtgaaatggaagataatcatattaatgttttatagattaaaaaatgtgaaaatgaaatctaaaaagagaaaagaaaagtttaagcaattaataaggcaactaagcttgttcgtgattattctttccaaccaaaaattggggacgtatagttgcatttgcatgtcatgtgtttgtttgtgtagagttttgtggttgtcattgtgtttataataacctaatattgtatatattaattcacctactatatctcaaccttttatttcctcacttatgagtttgtgcataatcaccttcctaattaaacacatgattttattcaggcgaaaattgtttaaataaaagtttgtagagtcctatcctaaaatcaattggttaattatataatgtcaaatgttttgattgagatgttgatgggacaagttgatatggtcataaccatatatctattgatattgtgtgatacaaaaatatattcatactaaggcaacataatgacagctatatattttggcaacataaattaatggtaacttacagcttaaagtggccaatgccattagtgccacttaagttggtgagccaaaaaactttatttataaaaaatacagtatcggggatcctctagagtcgacctgc

SEQ ID NO: 36362 - DNA, 5698 bp, Arabidopsis thaliana landsberg
  unsure (1)..(5698): unsure at all n locations
aaagttgtagaccgtggacaggtatacacatacgcggatgatccttgtagcgcaacgtacccgttgattcagaagctgagacaagttattgttgaccatgctttgatcaatggtgagagtgagaagaatgcagtgacttcaatcttccataagattggagctttcgaggaggagcttaaggcagtgctaccgaaagaagtggaagcagcaagagcagcctacgataacggaacatcggctatcccgaacaggatcaaggaatgtaggtcgtatccattgtatagattcgtgagggaagagcttggaacagagcttttgaccggagagaaagtgacgtcgcctggagaagagttcgacaaggttttcacggcgatttgtgaaggtaaaatcattgatccgatgatggaatgtctcaacgagtggaacggagctcccattccaatatgttaagagtatagtcctctgtttttttcttaccataaagtctttttttttttacatgtctgaataattttaccaaatgattgtctgtgaagtggttttatgtctgtctaatttaaatttgtgtgtaaaactcattgtaagttctcaaatgaacaatttttcttttacaaattaatgtgtgaatcataccttcttctttttatctcaatatccataacaaacatcggataagaaaatgttatcaactctaactcaatcatctaaacttaattagtcttactctaatggagttatttttcaaaatactagtaagtcacacactttagccatctagggttatagaattctttactaaattatgaaattaaaagtttaaaactattgttatgatagaaaaacataaatacaagttacaaccgaaatcatacattttgttgttattgtttggtagcacttttaggagtttacataaaaatcacctaaaatcactcaaggttagtaaatgaactgaaacaactcgaaatatatttgaactcgaatctaaactctattttcatctaatatgaaattgaaaagtgaaagatcacacaactatagttctgtagtaccagagtagtgagtgcaaccagccaaccagaaaaaaaaaaaagaaaagagaatgagagagtacacaataaaggcccaaattaaagcccataaagcccataagagtaaatacaaacaatacaggttcttcaatacgttaagacaaaatagaattgatctctcttcttcattctctctcttctcgatctacccaaagtagcgggagcgaatagtaaaacaatgaccgatcaccaccaccaccaccataaccaccacgcgcggctgagccgcctccgtacaacaacacagctcctccgtcaaacaacatcttctttctcttcccaccctctcactttcatcttcctcactttcctcctcttctctttccattctctcgtcgatcattgctctctcctcttaacatctttcgtcgacagtgacccttctcttcgctctctcctctctcgactccctcttaactctcgctcccataccccgacgcgcttcaatcatcaccgacgtgctccgtttcttcagctcacgcgccttggtaccctcgacgacgacttcttctccacagacgaacacgatcctcatcgccgatcgcttcaaggctcttcctttcgttcacccatcaacgccaccactgtattcctctccggatttgagagcatttctggcttctctcgtcctatcatcgataacggacttctccttcctcagatcattcgctccggtgtcgttttgcggcagcttgagaaggaagaccatggcggcgatgaagacgagacggaattggatgaatctgagctcgatcgtgaaagtgagaagaaagataaagactttgagagttttgtggatctgaagatgatttttaaaggattggagctaggacgtagtgacgcagcggctctgttcttcttggtgagctttttatcagctgcgtatggatgggtgattctagggtttacaactgtttactcattggtgttggcgattatgtttgttactgtaatcaacgatttgcttggtaggtttccttcgtttcttggggttgtttggagaggttcaagattggggtttaagagagttacaggatttgttttaatgagatgggcagtgagagatgctttgacacagcttcttggtttatggtacttcggagaggttgaagatcagtactcgtttttcaggctctttgtgaggttaaagctgatgcctttcactgttatgccgccatggattagaggttttgagaaggagatatctggtttcttgttcgcttggtttctacttgatacacttgttggtttgatattagctgttgatgcgtttgttgctattgtggattcgagaaggagaggaagggagatagtgaaggaaggtttatatttgatatctcttttgttgcatcaggctgtgcagctgaagtgtcttgaagcgattctttgtgggtctttcttcagatgggttctgattcgaatggtagggaaaagctttgcttcagtgatccaatctgcgttggaagtttacttcatggcggcttggttagtgttctacttagcagctaagtgtaaagatgcacacgcagatggtaggaggtttgggagaagagaaatggagagcttgatcgatgggctgagatgataatgaattgtggatctgtaggatgagctttttgtttccaaaggagcaaaccttggcttcgatgcttaatgccagtggcgacatctctgtgctactagttgtcatgacttaggttcctttggttttagaattacagttgattgataagaattgctagcaattcgatgtatgtacgcacctaggattacttgggagctgtgaaagagggagaatgatacaactactgtgtataatcatttgcaagattttcctttgtatatatcttgctgcagtttttgatatcaataccatgaggtgatcattttttttttttttttttcattttgggaatgatactagatccaaccatttggatatactgctcaccttaaatgtacttatcttgtggccattttaacgtacaacattttatgcatcattttgatttatgcaatggggaacttgttgctcattggatatattgttcggcttaaatgtacttctcttgtggccattttaatcttctttatgtgtatacaacatttttatgcattcttttgattgagacgcaatgtggaactggttgctcaacccgtatggtttggatttcgtggccgatgttagagcctcttgttctaacatacatacgtgaaacatttaactcttggttacaataactccgtggcttttttacttcttcattcttgtagtgataggatataacagcaggcatagaaccgaaagattctagatgttgttcccactaatctctgataacagcttgacgagagaagagttcaagtctgttctatgttttgcaaacatgttgcagaacagaggcatctggtttaaagaaacattgctttcaagatgtcttggcctttgtcttgagatgtctgagaaggtaaagctgttctatgctctctcccttctgcccccactagaaaattttgttagcgtttaattgaaaacaatagagatgttgcatgtttctggagttattttcatgttttagtctcttttagtcagtaactagctctggctttagtggcttcatgtatttctttagagctggagaagtgtgatacataactttactcgtattttattgctttccttgtagctagtagtaatacatttccggctgaattgaaagacacatttaatacaaaaagtcttatattattattagtgtaccccgatagcttagcattaaacaacattctttttgtaaacgtggagccggataaatcaatgaatgtcttgaattccctgtacaagaaccttcctagatacatatgcagttattctgatgctggggtgcaccagcgcaacggacaacatcgaggaaagtactctcattgcatggaatccatagtctggagtcagcactgaaaccgtaagcatcctgtgcttgatccagcaatgcttggaagagtgggtgtttaagcaggttgatatttatcacaaacctcttgtactcttcacccacatagacaaccaaatgtcccttagggacatctcttggaatcacctcagcttccttcttgaatgcccagcaaattctctcgtagcatgactcgcaagacgcacaaggtattatgactttgctcgtcatctttttcagtttcttttcacaggacttaatgaacttgctcttcattttagtaggaggagaagattaatatctaatataaggtagatagatggatagaatgttttgaactttttttgatagaggaatatgtttgtgaatgaatagtacacagtgaaggacaagtctatatatatacgcagaagtagaaatatcagagttccttaataaatgttgggacatgacagttagccaaagagggtgagatgggcaacttttaaatgatacagtactttatacaaccgtgcggttctgttacttttgttgatagagttgaaatactgaaactgtacgaacatacgtctctatggttagatgtgattaaaaaaatgatctctttttttccctagctcacatttggtgtcagagttcttcaagttcacgggggggattaagaccccacaagacaagatgaacagagatagagaggagataagatctgaaaggaacagggtccagggatgggtctaaatcttcttggagatagtgatgatcttggttaatgattcatgcatgggtactttcagtttgatctgcagaaatccagatctcttgacttttcctagagttatgttggtttttaaacagctcaaggctctagctcaggtgacttcttgaannnnnnnnnnnnnnnnnnnnnnnnnnnnnnnnaatgatcagcatttgcagtatagttaggtagcttaacttttacaggtgagtttgtatttaactttttaccgatcaaaagcgtatagtgatagttcagttaaagaaggcggggaagaatgcggttcacaagattgagatagggatggtgaaagggttattgtctctaggaagggtacatagatggagaagtgtcaatattggagggtccattataagagtaaaaccgagtatcattgattagggttcatccccctaaggattcacaaaagatgttcccttcaatagagtaagagatcctcattcttacaacaattctcttcttcgaaaaatgtctctctcagatctatctacctgttatgtttgtgttgtgtgtgtgttttgaagttggttttggtctgtctaagttaattaacaacgactgccattctgaactaagctggcttcttctgactttagaatttattgcgtgcatgtgcaaacactcttatgatgcaatgttatctctatatacatttctctttcatggaaaaaaaagaaaaaaaattaatcatcatcttatcttggccatagtttatgtagaaattgacttctcagagtctggacatttgtttcatgtttgtgctttaattttaatgttttgtattatttgcatcctaaaactaaaaataaaccttttaataatgttctattatgtgtatgtcgataattgtatttttttttgataaaattgtaaaattt

SEQ ID NO: 36363 - DNA, 6416 bp, Arabidopsis thaliana landsberg
  unsure (1)..(6416): unsure at all n locations
gaaagtaggatattgcaatgccaagtaatgatgtctcgtgccaagaaccaccaatccctgatgagaggacagttggggccgcaaatgaaaacggagaacaattggtgatccaaactcagaagcaagatttgatgtcaactgaggaagatgatgcaatctgcaaacggactagagctcgctattcgcttgcgagtttcacccttgatgatcttgaggcttttctccaggagactgatgatgaggatgatattcctaatgtcgatgatgaggaagaataccgcaagtttctcgctgctgttttacatagtggtgatactgaggttcccttggcacagactggaactaatgatgacgatgatgatgatgatgaggataacgatttagacttcgagatagaacttgaggaagcgctggagactgatgacgaggaaataatacctgaaaaggtcactacaggtgacaacataagcactaagcgacgtcctgtgactaggcagaagagacggcaaaatatctccattcatcacaaaaacaattctcctgaacaggctggcagattgttacgccctcttgtacctatcttacccattgcaccacctgagagaagggtttctgctactgaagcagttgcttcgtcagaaaacaggacaataaatggcttcactcaagcccaaatgggagaactgcattctttgattcatgatcaccttcaacttcttatccaagtgtactctctttgtgcacttgatcattcacggcaaagcattggaacccacgtccaaggacttctatctgagatgctcaaacaacaccaaggatatatctcacgccgaagtcatcttcttgtcactggttcagcatcatcggttcttgatgttgtgggtctagctggaagatatctagttgatgtttctgacggtatgttattagtgaaatagggtgctatatctccatgttttcttatctgtttatacaatataattctcttgattattgaatcattgtagctgtgcaagattatcgacggtgtcaagtggaatccggttttgatacttcgtctcaaagagtgccattatttacacttcctcaccaagaagttggcggtgagattgtaaactatcctctttcatcccctagttcaagtaagtcaccatcaggtcagcagcaggctaagaagacgttagctgctacactggttgaatcagcccagaagcaatctgttgccttggtccataaggatattgccaagttagctaaaagatttatgccattgttcaaagtatcgctatatccccacaagccacctcatgcagctgtcgccaatcgggtccttttcactgatgctgaggatgagtaagttccttcctttttcttggtctactctactaattttgtcgaaaatttattcctagtgctgtttgaatgcagattactagctcttggaataatggaatataactcagactggaaggcaataaagcagcggtttcttcctagtaaaggcgagcatcaggtaatcatcactggattcctgcagaactaggaatggtttttcggttactaagtaatcagttggtgttttattggattgctgtcattatcgtagttcgcgtaagggttattctgaccacagtctctgaagtatttagataaaaatatgaagattttaaaattcagctgctatcttgacaaaaacttctcgtccatgcaattcctgttgcagatgatgtagttctttcagttttctgctttcatgccagaaacttatggattggtgtactgatcttttcaatattttaaccatattaagttntatgtagacatgtccaagtgctcatcaaccaggctgatgatcaaggaataaaagacttgtctcttctaatactttcgacttgtatttgtttcagatttatgttaggcaaaaaaaccggagatcatctagagccccagaaaatccaattaaggtctgttatatgcttgagttggtttatcaccttttttatttgtatacttatatttctatctatcagctccataaattcagttgcctgaacttgtttgttgacaaataagcactgtgaaaccattacgtctatatgagctctaccatgcacgcaaaataaatcagtttacgaactcattgtcataaatgataacgttggatgaccatcttgtatgcttttataccgaaaatgcattatgcaaatgaacattacatgtttaaggtggacaccgactgtccccagtaagatgcctcaaccataattttaaggttatgcaggatatttcccctaactcgtgtgtatgtgtatattttgccacacaggcagttctgaggatgaaaagctctcccctgacaccacaagagatactacgtatacaagaggtaatttgacaagcgcacccttttgcaattctgattggaaattgtacttgggtgctcaatataagtttgaatcctcagggacttaagtacttcaaatatgattggacgtctgtgtggaaattcgtcgtgccttaccgagacccatcattactgcctcggcaatggcgcactgcccttggaattcagaaatcatataagctagatgctgtaaaaaaggagaaacggagattatatgatacaaatagaaaattcagagagcagcaggcatctgcaaaagaggtctgtctttcatatctctggttatctctcaaatcatacaactcatccatactgaatatgttagtttttcgctttttcgtaaaaaatgtaatttagctttactcatcttttcatcgcatgttgcaggatcgttatggggcttctaaagccaatgaatatcatgttggtggtgaattggtcgagagttcaggtgaggcatacctacatgaaggatttttagcagactggaggcctggcatgccaacctttttttcttctgcacctatgcactcctttgacaaggcaaaggatgttcccggtgatcgacatgagtcagtgcaaacatgtatcgttgaaggatctaaaaatcctgaactctgtggtgcccaaatcctgacatgtacgcagaggcttgcaccttcattcattcctatgtaccgccacacatctggtacagcacccggtgcctcaaaagcaccgataattgcgcggccatatcgttctcgtaaagtattcaacagaagtgttgtgagactagcccctgatttacctcccgttaaccttccatcgtcggtccgtgttatctcgcagtctgtttttgcgaagaatcagtctgaaacatcctccaaaacttgtatcattaatggtggcatgtcggatgtttctgggaggggaaatttcggtattgaaactccttgtttttcagctgacagagataacaacggtcctcctagcgaaaaagtggtagatttgcaggaagatgtgcctgccgagagctcctctgggatggacaagcggagcaatgactcagatcttcaaatgcatcctttattgttccggacccctgagcatggacagattacatgttaccctgcaaacagagacccagggggttctagttttagtttcttttctgaaaatcgacctcagctgctaagtcttttcaacagtccaaagcaaatcaatcactcagctgatcaattgcacagaaattcatcatcaaacgaatatgagacagcacagggcgacatctgttttcatcctcttcttcaaagaaccgagtatgaaacgagttatgttattagtagacgtgggaacttagacccagatattggtaagaaagacaaattatgtcaacttcaggatacttctggtgctgttgagaagactgcgatccctgttactggtcgtaatgatgtcagcttggaaccttttagttctagcacacctggtaaaaatgtgaacttagatatctatctaagtacaagctcttctaaggtaaataatggtggtagtgtctcagcagcaaatatttcagaagctccagacatctgcatggctcaacttaatgatggctctgaagtacctggatcagctccaccaagtgataatattagtagatgcattgaagagatggctgatcaatctaatctaggtatagtgatggagcaggaggaattaagtgactctgacgatgagatgatggaagaagaacatgttgagtttgagtgtgaagagatggctgattctgaaggagaagaaggctcagaatgcgaagaaaacattgaaatgcaagataaggtaagtttttttttttttccagttatgtacaatacccacagagctgaattatttgtttcgttagtttcgtttgtctcaacttaggctattgtgacaataagcttcaagtatatatggatcctaatttccagtagatatagagatttcctctttcttgtgtagttatgtggcttgtggatgatcttggtgatgcattaacttttccatctacaggataacagaaactctgtggtagaaataacttcaacagatgtcgattctggcaaagaactaggcaaggattctccaaacagtccttggttgagtctggatccgagtagccgtcgcttaagcagtaatgttaaggacagagagaagatagaggcagcaaatgaaacgaccatctcacagtttggtcctagtagatcacgcaaaaaagggacaccagtgaagagcagagatgcagaatcaaaggaagaagcaggagttgctcggttgagactgggtcctctcgccctccccccaatgaagaaacccagaaaatgtggtgggcaggcggaaacaagtccaagtattgagacaacctgagaaacttgttgagccagcaacaaatgattagctcttctccactccaaattacttacaggttcagagatatcatatcatggccaatctggagagctgtgttctttctgtatttcctcttggaggttatggcacccatggagtttgctatgaacgaggtttggtcacttcgattagatacgcgaatatgacgcagggtgcagagatgagtagtgcatgatgcagaaggacgaaaattcggcatgggcagattcaggtcagccatttcttttttgagataccttattgcataaggagggattgtttctacttactattattctgtagatattttgtatcagctgtgtgaaagagctgggaatactaatcaaagagtaaatatttgtattgttaaagaaagataggttagattttgatagtgtataatagcatttatttggcaccatctcggttgcaactaggtgttgttacatttagatttttttcgaactctttattttcgagtcctgagacccattccatctttttgcatataacatttttattggcagggaagagataattatagagtggtcaaagaagagaagaataagctggaaagggaagaaatggtggaatccggccggtgcttctggtgatttggcatatgagcagtgctcgagtgagctgggatgattcgagcttaccagtagagtgatggagactctatgtcaaaatgtaaattaaggaccactttggaatgttattttttggtcaaatagttggcctgatttgtatgcaaatatatggaatacagaaaaaggattacactttgcatgatggcaacatttcaaacacttggtcgtataagaaattttaacacaaaatggaggttaaaaaattccttattttgtgacttgggtttatcccatacaaagcatatacagattacagaatcttaatcagtataagtttgtaaatgcaacaaaattgtgcttatgaaagatacaacaaaatgaacactgcaacctatctatgcgctagatcttcttttcccatcagaccttttaactttcctagagcaaatcaacaaatggctataaagtttgtccagtttcccatcataatcatatcgatgaccttgcttatactgtcataagcatcttcgcagaccgctttactcatgagctgctttgatgagttcagctgataagcttgtgtagtgatctctaagtgtctcatcatatatgcgttcacttggcataaacccatcttctttcattcttctacacagcttgtccgcttcacgccgtaggcctttcctgcacaagcctgatatcattgtaatgtatgctatagcatcaggcttcactcctttgcgagtgaggctacgaaataaacaccaagcctctttcaacttatcagttctacacaacccttgaatgatgatattatatgtaataatatcaacatccatttcactcttttgcagatcctctaccatcactaatgctttctctatcttcccgttattacatagacaatctaacaagatgttgtaggtaacaatatcaggagacacaccacaatcaaccatcctattgaaaaccttttgtgcaacattaagtttgcccgcttgacaattacc

SEQ ID NO: 36364 - DNA, 1406 bp, Arabidopsis thaliana landsberg
atcccaacttctcgtgtatataagttttacagtggcatattagacatccacaccattaacattacaaacgacaaaaccttaagaatgtacacgtacagacataaacataccactcatcctattttctctcattgtctctgagccacaccaccaccattttctcttaaccttcataggcttcctcgatcacttcatctcccaatattggagtaaatagagaatacttcaccttcaatgagattttgcctttctccaccaataatcttgcacccgatacaacccaatacccgggtgattcttgcggccctcttgtcatctcacttgtatccacaaatttcaaaagttttggagcttgcgtgggtactggtggtccaccaggatatatagccgaatttatattcacgtctgcaggtcgtggtggtggtttttgtgctgcagtgaagtgatggcttattagcgttgagatgagtcctgattttggagcaaagcctaccgcttcatcccattcagaattctttaccagtgttgctcccacaactctagagaaacaaaggcgcaagaagagcacgttcttgaatccgtggctctctacatgaagctgcgcacctgttactacagaaagatcatcatctgattcgacaggctctgtgcagacgtgagagtagttcttccagtttactttctcatagtatcgacggtcatgagactcttgccggatacttctatttagatcgtcttcgagctgatatatcttgggaagagaggaaagatgttgcaaatgaattgccaaacggttgcttcttctaccctctaggtagagccgcatgccagtgattggcctcttaccaacattaacctgaaaccagtcaaacgagaacgagcatctcaggactggaggactttaaacaaaatctaaccacacagggttaatgagatcagacttgactgaccaaataaacctgcatgagcaagctacatattcagggatgaaacaaacccataccggagtggtattcacgtatagcttaggtccaaagaaactgaattgcagagacgcacaactttgttgctttcgttgcggaccaagaggaagttcactaaaaacgggagcccactgccttggtagctgaaactcgagaaactgatgcagctcttcaattggtggcttatctacaaatctgagttaatgttggattgttaacccaaggcttttcgtttatagtatgttcatcttacgcggatcatataacagaaggcagaaaaaatcatcttcgacttataaaaatactataaatttcaagttatgctcctatgtatcaacctaactacccagctgaacttggagattacgcaagatttgggatatactattcttattgtactgatataaacttctaatctaaagg

SEQ ID NO: 36365 - DNA, 1795 bp, Arabidopsis thaliana landsberg
aaacccatattcatgagtcacccgttatatgtttgcttatattgtttccatttaattcctttcgttgtgatccatggtgtcaaaacagacatcaatcaatgaaattgtgtgtatttcgcccatgtttactcaaaaaaggtcaatatctttaatgtgatcagcaatgtgacttacgaatcccccgaattccaccaaaacacctgattgcataacttttttaatgtttctgaagcttacaaatatcatgggcaaaactccagcaaagccataaatggctggagaaaaaaatctagttacatctaagggatggtccgataggtacacaaatgcctctatcatagaacttatatcatctctttcactactcttaaataaacatttaagaacaccttgtgaatcaaaaatctgataaatatgacttaaattattgtatggattcaatatatcttctgaatttgcaatctccaaccactctatcatttgtcggaaacaagtagcaagatccaccggaatagatttgagatcagaaaatgttcgatccactttcatcattgagctggcgcaaccttgactataaagcagagaaaatgttttccaaatcttgagcttgccggcaccttaactaaaaccaaagaaatctgttatcttgagatatcaacaaattccaaaaattatggttcagaggttgaataaagatgttaatgaaacattgcattttggttttaaggatcaatatatatttaacccggcaagaagtcttttaaatatataattacttatatttgataataagcaatcacttaaataattaaacaattgattagttatatcatatcattgtacttatattgtactcatgtgaagcaaattgacgcaattgaaatagataagcttttaattatttacctcacatcattgcactcatataaatcaatcttcccgataagtaaatgtgtaaatccttgtgaaactgatttcttgagaagatttgtaaagatcttgaacctttcaacatattacttggtaaagtttcattcacaccgcaatatcagcaaccacataaagatttaccatatattcgatacattcatgagataaagcttcatggaagccaacatccttcaagcctaatcaattaaggccacacaagttgtagttttgtcctccattgacaaaacaaattttatgataataggaataaggtacaaaaatatattttttgatgcaatacatgttgccaaaacgtatatcaaccaacgaaatcttatgtactttgtccattaatcagtatgattcacaacttccttaaattccaccaaaatttcggactttggcctattcaaacccattaatgactgtttaaaagctttggcctaaagattaatgttaagatgttgtcatctttggtttccattgatttaatcatttctttctttattatgcacacttggccaagtgttttcattttgagcaaaaccaactataccggttttctcctaaccggaataaaccgaagttaaccggatatcacatcatccgttcactctctttagctcttaaggcgaaaaaagcttatcttcttcatcatctctttcctcaatcggagcgagcgcaaaaaatcaaaaattcgccgagagcacaaaccctaatggcttctctctcaatggcttacgttaacgttagcttctgtcatcctttacgctcttcttctccaaaggtctcacttcgcagttccgatcatttcgcgacgagtctttcctcaagtcactccatttctgggctttcgcgctgtttg

SEQ ID NO: 36366 - DNA, 678 bp, Arabidopsis thaliana landsberg
ttgcaaatctctattatggtcgcctcgtcgagtccttcctcgctagcttcacgaattagctgatataactcttctgatggaagcaaaatctgtttatgagtaaacaaagacaattaagaaccaaaaaaaaaaacttttgatttgagtatctttgatgacaaatagatcagcttacacaagtgggagattgagatttttgttccggcttggtgttgttgttcttgctttcatctgcatcatcagttgagtctggtttatcaggatttgcctcgtttgagatgagcttaagcagcttctcacttccctgaagtgtcaataaagatgatttcgggtttatataaacctctagataatggaagtatgtatcgagaagttatgacagacctgaagagcccgccagtgagaatatgtgcggaataagacccagaagaatggtatgtttggtaatggcaatacctaattggaaagaacaaaagggtttggtggttatgagattcgatgaaaataaactagttagttgctaaggttcttgagggctagcttcatactatacataccataaatgcactggtcaatggaagctgagtaactgatccaactaggcacttcttgtgcaggattgttccactgcaaatccattagaaaacataagtgttagaaggaacagggattctgatc

SEQ ID NO: 36367 - DNA, 3402 bp, Arabidopsis thaliana landsberg
taaagaagagctctgattgatactccttttgttaatgtgtgtgtgtgtgttttgcagagataaacttagggtttcgaggagcgcaatatcaacagctgatatagcgaatgacttcactcttgggattgaaggagaagtgttttccttttcgcattgccataacaaagtcacggtcgctgaggcgtctggactaacaggagaaacagatcaggtacaagagttcatcagagaacacgtaaagccatgaggattgtgtaagcatctcagagaatgtacttaaatgtcttttcatttgtttgtaaatgaaattataatttgagaacttagatgatattcgttggaaggatttttggatgttgaaaacgtgtttactgcatcgactggatcttttagcgtttcatccaagcaacctcactatcaataaattgtttacaaagacagtttatcatctgttgttgttggcgcttgattttgatccctgcttgttgaatcgaagtgctttcatttgattttagtagatgatctatccgtagaattacttgatttttttggattaatactaatagatttgcgattgtatttcagtttttccgatttatgtagcttagtacaggttaagagtagcaggttgatttgagtattttgttctgtaatcacatgatatcgatatttaacaaaacagtttgcttatagctttgtcctccttcaagaataaagtctgcgcacaacaccagagagagaagaaaatctacatgactaaggcacaaccaaaaatcttctagacatatactttggattaggctgtattctgattgatttgcagagagctgggaatataagagcacccaagtggccaacaagttaggtgcctagaggtgcctagattcgccaagatcaactttcttgaagtagccctcctttccaatgatgtaagctatgttgcgagtcgggtcaaatccaccacctatgtttttatcaagaaccacagccatcttcttctcctcgtcaacaaagaaactcccacccgaataagagaaggaattaccagtgagaggtttcatgtcaacctttaagaacaacttgttccacgacactgcattgggctcaaccttgctgctaatccatatcttcaaggtatacggcgaaaaagaccgctgacacaagaccgcaatctggttatccccaacgctagatagagccacagtatcaccaaagtaaggctgaaatggcagaggcagaggcggtctaaatctctccgttgtgaaatcaaaacacagcaagaaataagaaggatcttgtcctccatatggaacaaccttgtctcgtgcaaaccagtaactgtttccatcgatagacaaaccacggtgaacaaaatctatctcccaatccggattcacatcaagaacctcccatgaatcagactcaaaactgtagatttcaaactcacaaagtaagtgtctccttccatactcaccgtcatccacaaatctcaaaactttatgattcttcatcacatcgtagcccagagcatacctatcccatttgttgaaagagtttctgggtttgatccaaattgtttgcccaacacaagggttccaaacaacaaccctagatatgtctttagtggtgcataacaagaaaccctcgcagtgaaaaatgttagatatgtcgacttgtgcaccaccgtctaagctaacaagttgacctaaacgctctatgggattagggtttagtagattgagactgaataaagaaaccctaaaatcgagcatcatcacaacatgaaactccttactctgcttcttctttgcttcttctttatcgatgtgcttccttgtaaaagacatatctttggataaagtgttcaactttttgcatgtgaatcgtactcttctcagagatgtcactggaaacttcgagagcacctcctccgccgcatcctttggaagatccgagcgcatcgtccttgattgtttttgcatatcgaaaaaattttacataaccttttactctgattacttcaggactgatgttagcactgatacttcataaatgttagatgtttctaaattgggcttgggctttaaagtattacccaaaggctattaaagtcgttttttccaatttgggctcctgatttattagtatgggagggcttagttttgggctttaaagtatgccccaatgcctaataatgtctagctagttcttcgttatactaaagaacgaattttggaaattcttgaattacgattgtacccttatattaatttcatcttttgtcttattcttatttatgcaaaagttatgcaaaagttttaagaaattagcagccaagcctaaagaatcattgagagtttataagggtgatttggtaattgagtagtttattagctaatttgatttcagtggcacgtggtaaattactggtggtttaaaactattgtacgtggacgattcttagccaacgaactagtacactctagtgcgaacaggtacatgattaaattcgtggacatccaatcatatctcgtccaatgataagaccaaaacatatgaggtcattactcactaataaacatttaaacttttgttttgtcaacgaatagtgtgtttttcttttgtcattccaatttttttctgttttcttttcactattcacttttggtccataatattttatgggtatataagataatcgtttttgtcttcatacatggtaacatggatgtttatatatgtaatagtgttaaaaagaaaaagtggtcggttatacttaacttattatgatagagctttgaaaacaaacaacacgagatggagaaattagtcattcaacaaaagaaaaggacgaacgcagtgacttaacatgaaactgtgagcggcccaaaatcatttatgtaatggacccttaacttttcatgcacacgatttttctcatttatatgtttttctgctctctttttttcctctttatcattactttaatttattttatgttcttttttcgaagcaccataattgtatgctttcaccaaataatccaaatttagaatcattaatatgtcaaaaaagaattgcatatattcaataaaacgtaatgctaagtagtacaatgcatgtattatacaaaatgtaatgatatagatccaacgtatatatcaaagtggaccaaaatatatcttatgtattagacgagtttactatgcaaaatttatgattctattccgcatggagcgtgctaatactacttcgaacccctttgagaccaatatgtgattctatattctatctagtacaaattatgagaagtatatacgtacgatgagagtataaaacatttcaatatttgtatagagaggacaccacttggttgacttgacccacgataagatattgaag

SEQ ID NO: 36368 - DNA, 3556 bp, Arabidopsis thaliana landsberg
ttgggctgtgagtttctttgaacatccaatttaatatgtgggccattttgtgttgtagcccatcaaggcctaatgtcttattgcacaacgaaaagggatgttgcaaaagatgataaaccggatatgaattcagtcgcggttaagttaacgcgaagacaaaaccggttggacatgttcggttttcggcgatgattatttcaacgtttttcagtctaatcaaaaccaatacgagcagacacagctccgtacgatcacaaggattcactgatttctaagcttttcatagaaagaagaagaaaaaggcggaattcgatggtggatgcgagtcaagtagctgagctgagaagattcgtcgagcagttgaaattgaatccttcgattctccacgatcctagtctggttttcttcaaagaatatctccgaaggtgattcattcttctgtgacttatctttctttcggtgaatttcatttggcagttgactttttccatggagctgtgagtttctttgtaatcgatgctcgttcccgtcttatcgtgtacagtttaggagctcaagttccgaagattgagagaactgtaagttgtctttcttatgaattatcgatgtttaggtttctcttgtttgtgctacttgggattgcgttcttaatatctttgtgttgaattgatgtacaaaacccttttctaggcttcaacactatctaaatgttgatcgaatagttaactataaattgcaggaaagagattatgaagataaggctgagacaaaacccagtttctctcctaaacatgatgatgatgatgatgatattatggagtctgatgttgaactcgacaactctgatgtagttgaaccagacaatgagccttctcagccggtaggtgttgaagttatcatctttggatattatgtggtgcttgtgtctctatgcatttttttacctgattggatgattttactttcttgtcttagatgggagaccctactgctgaagtgaccgatgaaaatagggatgatgctcagtcagagaagagcaaagctatggaggcaatctctgatggtacataactaccgttgaaattggttttgattatctacttcataagatttctccttaatgcttgattggtatacagggaggtttgacgaagctatagagcatctaacaaaagctgtcatgctaaatcctacttcagcgattctctacgccactagaggtaactttcttttactagttcactctcccttttcggctgaatgtgggtgataatactcaatatttgtgattgttgtcctgcagctagtgtgtttttaaaagttaagaagccaaatgctgcaattcgtgatgccaacgtggcgttacaggtgatcatttctcttgacataaacttgttttgtttgtgctgaaaatggatttggtaaaacaagtttatgtctcaatagttttatggcttgggagagtgattttatatctcaatggttttcttccataaacaagctaaactagtttattttggggtttagttcaactctgattcagctaaggggtacaaatcacgaggtatggctaaggccatgttaggccaatgggaagaggctgcagctgatctacatgtcgcatcaaaattagattacgatgaggagatagggacaatgcttaagaaggtaattgcggaaacctcttgatatcactgtatggtccttgagttttacagtaccaaatatatatgctgaaaatgtgtacttcccaggttgaacccaatgcaaagagaatcgaagaacaccgcaggaaataccaacgcctgaggaaagaaaaggagctccaaagggctgaacgcgagagacggaaacagcaagaagcccaggtcagaccgactcatacccataattaaatgttgtgtagagttacattttttgattatcttcttagcagaaatcacataggcctgattatcttctccctgtgagagttaaaatataacctcttctgatattatcaatatcatatcatatcaaacatctcacgctcattgatttgcttcttgctcgtgaatcctatcaatgcaggagcgagaagctcaggctgcactcaatgacggtaaacattttatccatttctttcaacggttttctacttcatgatatttttgcaaagaactaattaggtgttggaacatttatctgtgagtcttgccccaatgaattgtcttcactcaataagaagcaaagctcaatatgctcttgttagccactaaatccagttgataaggccactaaccagcatgcttatcccgcatgcagtctcatttgcattcacttacctgagaaattctgctaatccagaccagaaccgtaacctcccaacaaaaactaatttaggggatagtttagtggaaactcatggtgtattgacgcctcactagctttctgtttcttgcatgtatcgtagatcccagttattctcacaaagcttcatttacagcttttataaaacttaaaatgaaatttgcatgtcaaaaaggaaatgatcatcttttctccctgatgatacaggagaagtgattagcatccactcaacaagcgagctagaagcaaagacaaaggctgctaagaaggcatcacgtctgctcatcctttacttcacagccacatggtgtgggccatgccgatatatgtctcctctgtactcaaacctggccacacagcactcgagagtcgttttcttgaaagttgatatagacaaggccaatgacgtggctgcttcttggaacattagcagcgtcccgaccttttgcttcatcagagatggcaaagaggtggacaaagttgtcggagctgataaaggttcgcttgagcagaagattgcacagcactcttcttctaagtaatgttttatctcttctctcattacactcctctcgtttgtactgtatctttgcaacacaatgattgtcccgtaatttaaaagtgtagcataacttttaaagtacttgtaattggttagatgaccgatcagatcagttgaataagaagagttaagagagcagagatactttaagtggtagtttgctacgctatcggttggatataacaggatgaacaaaggaaaaaaacagaggccatgttgagaaactaacaattgtcgagacacattaaaaactgaaaatgggaaaagataaaacagtaaagaaacgacaaatacaagttgatagagggtggtgcagcttgcttgatttgtacagagctcggaacataagagcacacaagtggccaacaatctacgtctatagactcgccaagatccacttttttgaaatatcccttctttccaatgataaaagctatgttgcgagtagggcgaggtatatacctgtctttacaagtaccacagcgaccttcttcttctcgtcaacgaagaaactcccacctctaaccagaaactgaaaaccaagaccggtgattgatttcatatcaacctttaagaacaacttgttccacgataccgcattgggctcaatcctgctactaatccataggttctccggataaaccc

SEQ ID NO: 36369 - DNA, 2507 bp, Arabidopsis thaliana landsberg
  unsure (1)..(2507): unsure at all n locations
ctttggattgtgtctgtgggctactgcacaatcttcttcgtttcattgctattgcatattgaccgatgtgctgatgtattgtcttgcgtgtctagagaaaatgctgacgcgattcctcagagatatcgccgcgataggcggcagccattggatttcacgatggctggtagcttaatcaagagaagcatgatgcctactggtgctgtgactcttgacgatgatgatttacatcaagttagtgtggactatgtcatcaactgtgctcagaaaggtactactagcttctctcgtcatttgcattcgtgatcagtctgtgatttttctttcaaaggaataccgactattgggacaatacaggtgggatgctcgaactagctgcagcgattctggactatcatgatcacatcggattgccttatatggtgtgtacatgtaacatattgctttcttaattgatacttctaacttttggtaagcattactaggagttgcttgcaacagtttctaggataatgcctgttcatttctggaaaaccttttgctattaacatataacggactccttctncatcgacttatataagtcattttctaaatgcttgagtcttatgtatatttcagaacagcgtgggtactgcttgatgaattctttttggctacaattcctgaatcttctggctcacctccaaaaagggccccaccgcctattcctgtattaatttcctcatcttctcccatggttacaaatcccgagtggtgtgagtcaccatctgcgccaccattgatgcgatcagaatcttttgattcaccaaaagctcaagagctgactgttgatgacattgatgattttgaagacgatgatgatcttgatgaagttggtaatttcaggatctctaggcggactgcaaatgatgctgctgatcttgtgccaagactgccctcctttgcgactggtaatatttttggaaaatgcatatctttaagaagtaaatttgataaaggaatactattgttactgtcattccattgaaaaacctcatagaattattcagatcatacgtgcatttgtagacttggtaatttattatttatggacagggcattttagttcgagaaactaaaggagtacttgtaaaattatcattgcttataccatccagtagccagagctaactacgactggaccataagtagtacacccacacctatgaaaagtcaaggccctgctgatttattaagaaagttgcaatgtatttctgtttcaggtattaccgatgatgatctccgtgaaactgcatttgaaatacttttggcttgcgctggagcttcagggtatacagaatattgtcttgcttactttttactttctttgttcagttgaggtgtgcttataatattagtcacatccttactgatataatttctctttcatatgttttcaacatgtattttttcatcatgtagaggtctcatagtaccatcaaaagagaaaaagaaggagaaaagcaggtctaggctgattaagaagcttggtcgcaaaagtgagagtgtttctcaatctcagagctcatcaggattggtttctcttttagaaatgatgcggggccaaatggaggtcactccctctctctttctctcttactgttacttttttatctctgttgttgaggcatatatggtttgtcagagcatggaattacatatttactactctatcttttcttgtaaagttgttcttatgtaattaccatgttaagatgccctcatttttgtatgccaaatgtctctgcttcattgattttttagtatgcgcttggacatttttcgcttcgtttgtcagtttactctttccatatgtcaatgtattgtattatgtttttggcgctgttgcctgcactaccatatgattctcagttagcctactttatgtgtttgttctgtatacgacaattaatattttcggctcatacagatttctgaggccatggacatcagaacaagacaagggttgcttaatgccctagcgggaaaagttggcaaaagaatggacagcctcctggtgcctttagaattgctatgttgcgtgtctcgtaccgagttctctgacaagaaagcatacttacgctggcagaaaaggcaggtaaagaccaccttttcacatctgagtgtaatattgagtactttcttttagtatttggtcctatcatctattaatgttttggtatttcagttaaacatgttagcagaggggctcattaacaatccagttgttggatttggagaatcaggtcgtaaggcaactgacctgaagagtcttctgctaaggattgaagaatcagaggtattttttccaccttattatgtttatgtgatctattatattgtgtagacatcagatatcggaagtgggtatttttaggtcttttctttaagggtgtggcataatatcattcaaaggttaagatgggttattctttgtggaaaaaaatggcttaacgtcttttttt

SEQ ID NO: 36370 - DNA, 2548 bp, Arabidopsis thaliana landsberg
aagcttattcacgtaattcaacggtaaatgaaaaatcgtaaaaagaaccagattaaaattggctcattgtaaaattaaccactgaaaatgtaagcaagtttcttaatttctagttagaaaaccagaatcgataaagaagcaatggtttataaattccggactgatgattattctcaaacttttcaaacgacacggcccactggcccattaagagcaatatgaaacgtaaggtaaatatgagcaagagcatttgttaaaaaaaaaacgcaagagattaaaatgtggtcgaaaaacgaaaccgataaagctagaagaaatatatagagttcgacaaaatccagacaaagagcctcagctctagctctaactttaactctagctaaataaacttgaaaattaccaaagtgattaataacttaatcagtcattagaggggtatcacaaaagttattaaaaagcaataaactactccataagtgtgtctggaaactagtagccgttgctaggaacagcttccatgtactgcttctccacgacctccatcaatgtgtctgcaattccacttgcatacacacaagatccttcacaaatctgcctcaaaccaaattgaaaaagattagtttattggtttggagttaataacagaactatattagtgagacattttcattaccttagtgttgaacaagaagctgtaatgttcaccaatctgtccacctgcaacatggtgaagatctagctgaagctgatcaagaactttggtggtgaacaacaaacagttaatcttcttcttctgaacaagcttgatggttacttcatcatcgattatacgtacatcgacctcagtgactttcgatttcctcttaagccatgaacatctcagtgagttgttgttgttcttgttgaagcaagactggtctacttcgctctgtggcttgtaattcacagtgtcttcttcttcttcttgatcttctcctcctcctccttcaccaactctagctctcttcttgctcctgaatctcccacatctcttcttctccacaagcatcttaaactcctctattgtccttaaaagctctttgatgtaatctatcgcctctccaactatcgatgctctatcaatctacattttcaacccaaaattagtgacgcaagaagttattaaggagaacaaagagaaaaaagaaagagtctatttggttactttgctgatcttgggaacaactgatctaagcatgtaaagcctatcattaagcttcttccttcttcttctctcagccataaggttctttgcaggcattcctttcttcttacctttgttgttattagtattatggtcatcagattcgtaattcaatccagagatatcgatgattccggtactagtatcgtcaatctctctctcgtagctcgatttcctcatttcagaagaactctctgatttgctagtcgaactctgacgcattgcagctcgtttctgaaacagagttggctgcgagccagatgaagccattacctgtaacggttttaaaacctttgctctgttcgagaacagaggactcaatccacatgatccagagctgttttccggagctggaagaaaatccggtactgagtggtttaagccagtgaaattcatcgagttcggagattgatgatttccatggaattgttgtcctaagaaaccagagtcaaagccgaagtcatcgaaagtgttgttattgatggttgggacgttgagaagagaaactatacaagcttttgtagctaagaaagactgttcctgttgttgttgttgctgtgaagtagcgttgagtgtgaaaggatgtaataacggagaagaagaagaagaatcaatcgattgctgaagaagaagaagcagattctctgaggggtttaaaggaaacccaccattgaatctgaagtcgttttgattagtgtgttgtggtggtggtgggttattgaaccagtcttcatctgggtttctgacccaagacgcagcttcaccgttattaacctccggagattcaccggagccgtcaagccaaacaccgtcgctgttcatgtcaaactagtagagagagagagagagtgggaaaagtttcgaattttggagagaagtagaaatggaacctcaaaaggagacaaggcgagagaaacgtagataatatagagagagatttttcttgaaaggaggcgtacgttataaagtggaatcacgaggatcttatgaagaagaaaaaagtgagaaatctgaagaagaaagatagagagatttcagagctcgaaaaccctaaaaagttgagatttttggggatttcaatgttgtcaaggccaccatttatttactctgtttggtttcttggtctatcttggtttaagagttggtgttgattctcgtgactattgtttttgctttccgtctctcacctccacttcatctttgccacctctctctcattttttttgtctgcagaattatttcagtgatagagcttaggaagatgatttagttaaagctaaatccgaccgttaataatcgaaataa

SEQ ID NO: 36371 - DNA, 5896 bp, Arabidopsis thaliana landsberg
  unsure (1)..(5896): unsure at all n locations
gtataacgatgcatgaaccaaagagttccgattgttttacttcttcatctataaatatctttgttggcctctttttatatttacacaacatttagattcaatagctacttactcccaacgaatatattcacaatgaaccacaacagcaacctcgttcttccttcccatcaaaccgagacgcagacgcaagatgaaaccgatatcagcgtttggcgtttcaggggaagcgacacagcagccaaagcctccagcgttacgatgagagtcatcgtctacaagctcttcgatgaatgcagcctggatgtgaaaaagcctcttttaccccttgctcacggtgacccttctgtctacccttgctaccgcacctccatcctcgtcgagaacgccgtggtcgacgtccttcgctccggcaagggtaactcttacggccccgccgccggaattctcccagccagacagtaatattttctcttactttactcttaattactttgttccacccactgtaagtctgtaaccattcaaaacctaaaagtgttttcatggaatgttttgttaatcagggcggtcgcagattacgtgaaccgagacttgacgaacaaggtaaagcctaatgatgtattcataactgtcggatgcaaccaagggatagaagtagttcttcagtcactggctcgaccaaacgctaacatccttctcccaaggcctagttaccctcactacgaggctcgtgccgtctacagtggactcgaggtccgcaagttcgatctccttccagagaaagaatgggagattgatctcccaggcatcgaagccatggcagatgagaacacagttgcaatggttatcataaaccctaacaacccctgtggaaatgtttactcttacgatcatcttaagaaggtccctattcatacttttaattagctttgactcgtgagagactccaaatattggtgctgatgaatgaaacctttataggtggcggagacggctaagaagctgggaataatggtaatcgcagacgaagtttattgccaaacaatcttcggagataatccttttgttccaatgggggagttttcttcgataactccggttatcactttgggcggtatatcgaaaggatggattgttcctggttggagaattggctggatcgctttgaatgaccccaaaggaattttcaagtccacaggggtctgttttccttttaccgatcatcatactaacttctgtttttgtagcttgtgttacaagtaatcactctgttttttcctttttccttgtaacagatggtacagtccattcaacagaaccttgacataactccagatgctacaactattgttcaagctgcacttcctgagattttagggaaagcgaataaagagttgtttgcgaagaagaattcgatgctgaaacaaaacgtggaattggtctgtgataggctcaaggagattccttgcttggtctgcaacaagaaacctgagtcatgcacttacttattggtacaaccaccaacatctcttatactcttccgtgattctagatcaatttagatgattcttatttcttaacaaacaacaattaaactgcagacgaagctgaagcttccattgttggaggacatagaagacgacatggatttctgtatgaagctagccaaagaagaaaacctcgtcttactaccaggagtggctttgggattgaagaactggataaggataacaattggagtagaagctcagatgctggaagatgcacttgagaggctcaatggcttctgcaaacgccatctcaagaaaacagaatcttcttttcaagctctgagcaatggcaaaatctaaaccactcatctatagagagactatacacaaccaaataaaaaatctgcaatttttgtggtgtaaaaaacaataatcatgtcattttcatataagaaactctatgtttcttaatcttatttctttgtttgagtcaagtagaaaaagacatgaataatgttgaatcaagactttatctttaccgttaaaagagacggacccactttgccgccgtcaaatttaaaaaatgcaaaagatttgtcttttactttctttcttcatcaacggctctctgatccacagtagccggagaaaaagcagagagctcaaattgtcggaattaagaatccccaaatcacatcttcaagaaccctaataaattcccagagattcctctcatttaatcacttcagattcgaaaaaagttctctctttttcccaaaaaaaactttctcatacaatggactctactaccacaccttcttctctccgttcgaatactagatccgctttgcgtctagctcgaaacaacaaaactctcgtaaaatctcacattccatctctcgatttggttttatcgtctccgaagaacaacaacggtactccttacccatcacctgtttctctcagttcaccatcttctcctgttactcttcgtgagattctccttttatctccttcccctcttcgtaaatcgagaacccgtttaagcaatcggttcgatatggaagctgcggaggctgctgtgacggcacgacggagtaagacgaagggagggcaaaatggtcttttggcctcgccgtcgccgaggaatttccggaggtcgagacttaggtcggaggcgatggtagatacaaaggaaaatacggagccaattgttgtcgtgaccgatgaaaagaaacaaaaacagaggaaacagaagaagttgggtcgatctaagaaggagaagcacagttctgttcctctgttagcttctcctagtccatcttcagatcaacgtatgtccttcctctgtctattagctcattcgatttcactttcgtgctctaataattgctcaatgatttgtgtaattcagctaaagatgtttgtcaaggtgatttagagcggattagagagaatataagcgatttgattatgtggagagatgttgcgaaatcaacactttggtttggttttggctgtatatgtttcctatctacttgctttgctgctaaaggatttaactttaggtaacattgatttctctgtcaaggtttatctttctagctttaatcatttttcacattcatgagttgataatgaaactttgtgtggtttgaagtgttttctcagcgatctcctatcttggacttttgtttcttggggtatcgttcttgtcaaatactcttcgccaaaggtacaaacttttaaggtcccagtacataaatatcagcttgaactgcagttgactgaagttttgatccatttgttaccataaagggttactgaagaagcgtggagagagcttaaattgagtgaagatgatgtattacgaatagctagacgaatgcttcccatcaccaatttnnnnnnnnnnnnnnnnnnnnnnnnnnnnnnnnnnnnnnnnnnaatgacactcaaagtagaatttacaaaactttgccattctcataaaacttctctccaatgaatgtgactctcacgttgattttgtccttacactgtttttactttgatttcaggtggcaccttttgttctaatgggagctgagtatggttacctcataacattgtggagattatgtgctttttgtatgattgttgaaacactatatgtcaacattactccaaagaaagctaaactgttttctttagttgtatctagtagaattgacacagagtatgcattgtttctttaaacaggtttcttccttagcttcactattccaaagctatattcatgttacgcaagtcagcttaaccaaaaaggtaaactctattaacagactgcgtagctctttgatggttccaatgattgacactaaggattctttgatctttgcttatgtgtagttgagtgtgcacaaaggagatttgttgaagcttggggagtttgcacacacaagaaattcgtagcaggctctgcagttactgcattctggaatctaacttctctcaagacccgttttattgcagtgtttatcatagtagtagtaatcagatacagacgacagaatctacagttagattccgaggatgaggaggagaagaagcaacaagaaaaaactcacccggagcaacaagaatcgccggaggataagtcaacttcaccgcggtcagcagaagaagagcaagcgttggtgctagttgcagaaaccaaagcaccaaagaagctttattagtctagtcactagtgtcttttcagtatccacctgtgtaataatatttcacatttacgtaataataaataaagagcagtcattaatatcaaataataaattgacacgtggcaagctcatgaaactgtgagaagcaggtgataaaaactctcgtccgtcttgggagagagcacatcgtcgtcttttctttataaaccctaaattcccatttctcttctccaaaagttttatcgattccaccaaattagggcgaacgcgaaatctgggtattgtaatttgaagcgatggcgacgactggaactgctgcggttgcgacgggaacttcgacggtgaagagaaaaccggtgtttgtgaaggtggaacagctaaagcctggaacgactggtcacacgttgactgttaaagtcattgaggctaatatcgtggttcctgttacccggaagactcgtccagcgagttctctgagtcgtccttctcagcctagtcgaatcgttgagtgtctcatcggtgacgaaactgggtgtatcctcttcactgctcgtaacgatcaaggttattgtttctccacttttctattgctttatggatatagaaatggtgtcttcgtagtttattagagtgataagtcttatcctttgttgttctctcgtttgtcttaatcaatttctattttgagcaaatggtaaatgtgtttctattagtactatttggtaaatgatgtatcagttattgtatgtgtatttagtgatgtctttgtgaaattgaagcttgaaagaatcttggccttgagggtctgtaactctgtatagtcttacctaatgatgaaacttgcttggttagatgttgagttatgttcaattgaatggtctacattatcccaaaactttcatagcttttcataatgtgaagttttgttataccagttttcgtgcaattgatgtggctactgattagctctaatgatgttattggtttttttttttgtgtgtgtgtgtgtatagttgatcttatgaagccgggtgctacggtgatactgcgcaattcaaggatagacatgttcaagggtacaatgaggctaggagttgataaatggggacgcatcgaagccactggagccgcgtctttcactgtcaaggaggataacaatctgtctctcgttgagtatgaactgatcaatgttggtggtgatcagtgatcttttagtatgtttatggaggttaacccctgagagtgttgggttctgatttttctaccgtgaaggtctttgatttagatgatgaagattgtatgactggtccagagttgcttgtaggaatgatgcttgttcttttttaccttaaaatatgcggtcatgatcttgctctggagaagtattgagcctgcggtaatggcgtaatgcaattgttccttttaatttgtgttgatgtaagttaaaggccattgagagcttgcttgtgcactatctaatacagtaaaaataagtttttctttcttacactttactaatgtctttgttttttcattaagtactatttgatgtacacgattgtaccctctcggttacagagagttttgcccaactttttacatagaaagcatctcatccttccccaatgcccttgttaagacaaattgtaagtgaataaaattaaaagacggatcatagaaccattgtctagttaagtcggt

SEQ ID NO: 36372 - DNA, 5588 bp, Arabidopsis thaliana landsberg
  unsure (1)..(5588): unsure at all n locations
agattgtgtatgtgaaagaaagtgtaattcagacacatacgtgaccaactgtcttttgttctatatataataagaatatagattccttctaaatgaaaaagtagagacagaacaagttccttgctacaatctagtgcaaagaaattttgaaaataacatataataacctaaagttcaaactatagattcgtccacgtgaatacagccaactattattattctcatatttttgtgtcaacaacaataaattactagaaactaaccgacctagatcaactatgcttttaacgtctactttgaaatcatttagatataaaatagtccaccaaattcataaccagagactagcaacttttgttagagaaatttagttagttaccgaacacaaattaattgattaatgtacctgagcatcgaacatgttcgtgtatttgattccggttttggagtcgactcgtccggcgttaggctcaaagagacaaaacgccagcgtttcgggtctcgggtcactttggtacgcgaagaacgggtacgggttaatagcaaaaggcgaaccagtgtcgcttagaaattgcaaaattccctttaaaccggtttgataaccggccgcaaatgaaccgctcgatggcgggtctgaactaccgagcaccgtcatcgagttcaccgtcgagaccttgattttcccgccgagagacaccgcctcaagggctttttggacattttgcatcgccggaagtagctggttcaccagatttggatcgttcgacatcagaatctgcaatgatcggagaagaattagagaattttccctaaaggtttaaactttaacaattgaattttgacggacctcgttgccgacggtgatgagcatgattttggaggcgggataaaaaggaaggacattggagttgatccattgagtagcggcgttaggatcggaggcaagagaaggaacgtcgccgttagcagcgccgatgacgataccgacccctgttccggccaaagctttgatgatggcgggatcggcgccgtaaagtcgaactttctgaattgaagtggattggaggagcttgacggtttctgaaggcggagggagattgtcggcgacttggccgtagttaactccgatgaaaggctctgcatctgtcggtaacaaaaaacagaggaagagaggaaaaaggttagatgaagaaagaagaacgacgtcgtagtgaggaactagaagatacttacgtgaggatgggaagtgagagaggaagatgaggaggaaatagatggagatggagagagccattgatggtgagagagagagagatttaggaattgtgttgttgttgctgttgttacttaaagaagaggttttttactgtaacggttatatacaaactccaaagacacgtcttgtgcttgtttttccacactacacgtgttgacttctgttcacaagtcttgagcttaagtcttcgtttcggtctttattttgtaattttatacttttgatttttctcgtcatctaatttggaaactgaaaagtgctatttctggagaggaaatctttaggagaatcgaaaagagagcatttgttttttgagtttgcttttgaagcatgaggtattccataggatgattagtatcgcaaaacacatatttcagtgtgtaaatacaccatttgttcgtttccatgctatttctcagtagtccaagttaaacattcttcaaagtttcacccacaaccaccaataattttagctttcgtgattccacaatgtacaactcacaattattatgttgactgtggtcacatcatatacaaaacaaaaccaaagaaaaaggttaaataaataactgcatattccaaaaacaggattgcaactttttctatccatgataagtatgatttgtgcacaacgtcatcagcaaggactcgggacaagcccacatgttaaaacaaaagaaacgagaacccaaatccaaatccaaaaccccaaggactaacaagacacaagatgatcagatcacacaaaaaaatcaaaaacccacaacctccaaacccaaaattgggggatagagacaaaagaaaaaaccaacaaacaaacaaacagattctttcctctattataatctgaagaaacaaagtatatgagtataaaaaggcctgatattcaagcacaatccagagtgataatagtttctcctttgcttaggcacctgaatgcgagaccggtgttgtctcaaacttcccttcagtaaacacatgattgtactgttgaggcagcgcatgttccacctacaatgttgcaacaaaacaatgttgagaatgattccttccatgaacagtgtcacacacatgactatcttcgttacagtggtgaatgaatctgaagaatataagaaaaccaaaacgttttgatgattacaaagagaggaaagccatacccaatctccatcaggggtagcaccgggcaccattacattgatctcacttgatttggctgttgttatagctgtctctaatgagtctttgtttagatataactgacagccagttgtgttgtccacagaaactgtgggagctgaaccctagatcagccatagatgagtagcaagagcaatcagtgtctcggaaaaatgttgcatatggttagagctatatcatgagcttgagaagcaaaagagatggtccttaagaatatacatctgcaaccattagaacagcttatagaatctagaaaacaaacctgacattgcacttctacgttgttgcaattcacaatctcaaatgcagcaacaacatcctatacagacatgttatattttactttattagaaatcacataactgtatactgtaagaatgtaagaggaaacagtattattccactcaccgtgaaaacaacacccactttcgtgcatttgtcaatggtgatgttattcacttttcctacagattaggcaacaacagtaagggcttcatagacttttgagtagatatccaactttcacagtgagattggaatggcgcaaaattaccttgtatttgcaagacagaatctttgcaaccatatatgtacacagactgtttggaatcacactcgctgataaccaagtccttcttcccaatttggttctcaacagcccacctaataatacagtagaagccaacaatcagtattatagcattttgatcatagttttgaaaaactaaaatatatagtcattgttagtaaaacccacttgcgacccatttgaagttccattttcggtggtccagttttcgaaaaggccggtttactggtacgagtttccttctcaaccgcactaacagctccagatctatcagcacggttctttgtcttcatatcatccgtcacttttctaagacctggaaagcaaagcacaatgattgtaagctactaatgattcacattctaaataaacaccatgccataaatatgaagaggtacagcttcaaacctacctgaggtcacagcacccgagctgagttgctggaaaacagcagacatcccttgtttctggtttgacgatgatgatggctttgaagattcagcactgaagaggggtgctggtggaggagcaggagcaccaggtggaccctttgcaggagcactagcaggtttccctgatgcattccatacaggtcccaaggggtaatgacttttgacatattcccttaaaccaggtaaataaagttcttttaaggctttagcccactccacatgatctgcgtctttgttacgatactccaccagaacctgaagaagaacatggagatcacagaattaccactgtacaaagagcatcaaacagcaatataagcttctgcaacctgaacaagtaactataaagtcctcgttcgctattgttttccataagctcctaacatcataacatattgaagcatagagatatcgaagattagcaccttattgttgtaaaactcagccatttgccaactttcttccacatgagctattggcatgctcataccttgcagacaaaataaccaagaaagaaaatttacatcataaaagtttcataaagtcagaatctttttcaacatgatcgctttttgcttaccacaatctttcccagtgaaagcaatccaagccaatgcagataaactatcgcatgcagccttcaagtgattgaaaaaatccgacctttttccttcagtcattgcattagctttcattgtaacatcattcaacggtttgagaaatccagccaatccagcgaggtcaggcttctgttcaaatccgaataaaatagaaatcaacatccaaaagcacaatgacgaaccaaaacgaattggtcgattacaccatgattcaannnnnnnnnnnnnnnnnnnnnnnncgaacaagcagctccttttgggaagcaaaagcttcggcgactatcttagtcacatctagaacaggtccaccgattttctcagcggcggtcagagccctaccaacacattgagaaatcagatcttcataagccagaatcgatggatcggacgacgcgatatcgattccggcggcggaggagaaatctcctccgcgggaaagagaaactactcctcctccgttgcttgagatcccctcaagcctcgtaaccgcagcttcaaggcgcttaatcaaatcctcttccattttttcgatcaacaaaagctcgagtttagatctggatgaaatcgatttaaggaatggattctgttttccctttttgcgtggggctaatgatgatggcgaagtcaggagaatgtgtgatgacacgtggcctttcttagataattttaccaatcgcaggttagtggtctggtcgtggattgtcggatccaaattccgacacatgtgtttgagctcgacccaaaccggatccaaaataggtttaagaccggattaagtttttaaacccgaactaaaccgtataccaatcaaatttcaaagcagagccgaacagttcttctctataaaccaaattaccaaattccggttaggtccgggtcgatattatttctcaggcctaaattgaatgggaaaattcacaagggaagaaatgttcttagagttcactgttttattatacaatatatgatatatttacaaattacaagcgataaatctgaatttcatcctcatatatctaatttcacttttccaattttctcttttgcatatcaatcctctcaatataagaacaaacatggaaacatctatcaatatatggctgtgtaatgaatagcatcaacgctcaagtgtggtcttccccaagacattattgtttgcccaataatctttcttacttcgatctttcctggtttgatctgtgttcctgtgtgacaacatgaaacttaaaatcagtaaattgcataaaggatcaaatctctttttagcttttgacacacttacaggacggaatggaaaatcttcagcctcaagcatgtgaatgatttgtcccatctttggtcgtttactagagtcaaggtctatgcaacgcaaacaaacaagcaaagctcttttcaaagctcttggaggaggtgatgtcttgatttagggtctatacttcttctcacgttac

SEQ ID NO: 36373 - DNA, 4642 bp, Arabidopsis thaliana landsberg
tgacggcatctacactggctaagctcataacttaataattggaatctgcttcataatctatttaagcgcgacctgcgtctttaagtatagatgtgtgcgaaactccatcaatctctacggtgttcaagctatcgactttcaaagctgataagctcgccaaattaaccgtcccatctccatctccatacttaatctctggttgcttatcgaatcctccttttccatacatcaaaacctccggtgtatcaactcctctcccatatatgcaagtgactggcactcccggagtcatcagctcctctgttaaaggcaacactcttgtcttgtaaggcacaactccttgtgagaatccaatgtctgcaaaaaaccgatccatctcgtaagctgtgtagttaacctggggagttacgacaagcggtttagttctgtcgtgaaacactttggtagatggaagtagccattggttactctcggaggtcctctgatgccgtctgaccagcaaagggttaactaaagggacaccgagtgtgttgccagaagcaaatgtcttcatctgagagatcgtcccaccccatggcgcagcgagtgcaacaaagtgtttgatgtacttgcggcgccatgaaggggtggtacggttgaggaaatggaggacgaaaagtcctcctaggctatgggagaggagtatcactggctttccttcgttctcgctgctagttttttccaccaattgtttgaggtctttgtaggaactgtgaggctacacgggacgggtggcccgaagcagccaggccgtacctgaaatcatatggagctcctaggatggtttggtcgttaacatacccgcattttttctctagagctttcaccaaatgttccatgtaagatgtggcatctctgcaaatcaaaccttattattattaagctacatttacatagtgtccttataattctcatgacatagcaacattattaaacgacaactttctagcttcatttaaaatggaaaatcacataacactcacattaactatactaacataacactcacattaccgactagcatataaatggatattgatataacaataatcccccaaatttatgtctattttgttcattatgcaaatgtcccaaaatgatatatcttggaaagtactaaccggagacgagggtcgaggtatagaagtgatttggtcgaaccgaaatgaggaacccgggtttggacaccaggagcattttggtaatcatccaaatcagggtcatagtacaacatcattcgatcgctgaagcacctggtgaagggagacaataacactgctgcatcgaaccatagcctaaaccatccaccactcttcttatgaatcggatataaccagctgctacaccagacactacttggcttgtattctctgtccagccgtacctctagctggttacctccgtttcctggaaccagaatcaaagggtacacgttgctacccacagcttgacacatcgaggtcatcatcaccacaacgagtatcgctatgactaccgaataatgtgaagatatttttttcattttcgttctaagaaacagactctcatggtcatggatctatgcagaaagctggagatttgaagaaaaaggtccattgaatttgaaaaacagagtagtatcttaaaacgtaaggcttaagataagtagtatatggtggatatggaacccgcgtaatcatctagaggctctacaaatatttattttgtatttccttcttattttgtatttgcctacgtggcattatacaacgtatttaacttgaaaccagatttatggcccaatgggtcgggtcgacccgaccgattttaaactgcgctcctaactaaaaaaaagtcaaaaccctttgaaaaacctaaaaacgcaatttgcttcgtcgtctctcatctctttctctttctccgtcgccaccatgtttgagtaccggtgcagctccatcgattggaagccatctccggtggtagctctggccaccagcgccgacggttctcaggtcgccgcagctcgtgaggatggttctcttgagctctggctcgtctctcccggtgcttcctcttggcactgtcagctcgtacgtgcttttgttttctctcttccaattttgaacattttgagtcggttatattcgtggtaactgatttgagttttattgttcactttcttttgagtatagatcattcatggagatccaaaatcgagaatctcgcaccttgcgtggtttggtactggttctaaaggttcttcttccgctagattgttttcttcgagcattgatggctcaatttcagagtgggatcttttcgacttgaagcagaaggtgaatttcattgaataaaagtttttagcttcttgtaaatgattctagttacttccaaaataagttcattcgctaatttgctcgtatggtatctaattgttcaggtcgtcctagattcaattgggttttcaatctggcaaatagctctggcccctatctctattgaagcagaaagtaaagaagctaagctgattcagaatggatacttgagtgagaaatcagacgacgaggaagaaagtggagttgaagatgattcagagttggacgagcttgatgagaaagtggaggccttggataggcatcttgcagctgcttgtgatgatggctgtgtgaggatatattatatctctgaatctgacaagttaacgtactatagatctttgcctagggtcactggtgagaactctttactcccctttgcatcgttttgatctttcattattgtatttacttagagctttatggaacattattttcataggtcgtgctttaagtgtgacgtggagtgcggacgcacagaggatcttttcaggcagtagcgatgggtgaggataatttattttactttgtatgatatgcaatattattatttactttccttagagatgcatttttggtgtgcaagaagacccctggatgttctttgatttggctaaagttttaatttttttttttgtttttccaacaatatttgtaggctgataagatgctgggatgctaatctatgccatgaggtatatagaataacagttggacttggaggactgggaaatgggtctgagctctgcatctggtcacttctttcattgaggtaaaaattaccgtgctcatatgttagtttatgtttacctttcctattactgattatgtacatcctattttagatatggagttcttgtcagtggagatagtacaggaagtgtccagttttgggatagccagcatggaacccttttgcaggcgcattctaatcacaagggtgatgtcaatgctcttgcagcatccccaagtcataaccgggtgttttctgcaggcgctgatggacaggtaaatgatactgctagtgtgtttactcatgtgaatcccagttaataattggtatataataaagacaggttcttccccatggacgagaaatgggacttatataaagtagaaacaattactattaccgattttaaggtctcgtaagattaaaaagaaacctttctgcattgacataatatgttgtttggctgttattgtgacaactttctaattctccgttcatgcttttgtaggttattttatataagctctctggtggtacatctagatcacaagattttaaaccttcttctgctcagaagtgggattatatcggttgtgtaagggctcatacacatgatatcagggctctaactgttgcagtgccaataagttgggaaggtcagtggcttcttgagctatattcagattttcctgtatggttgataattaagattcaagattgaatgtgtttagagttaaaggatcacaaacacagagaatacccagagggttcaatataataaaatcataagaagccctcattcgactacaaatataaatccgatgtaaaaccagtaacctaattctatcaaactacttagaacttatcacgagaaaccgtagcactgattttggcttgggccatgatgtgtatccgaatgcatatgggatcaatgttttgtatctagaagctacctagtctttttttttttttaaattattcttatgctcccaccttttgcaggttccattccagataggaatgcaaaagtaacaagtcctaaacagcgcaggaaggagccggctggtttcagttaccataaatgggcacatttgggggttccgatgctcatttcagctggtgatgatgccaagctttatgcatactcggttcaagagtttactaagttccctccacatgatatatgtcctgcgcctcagagagtgcccatgcagatggtacataatacagtgttcaatcagacttctcttctcttggttcaggattcttgttctttagatattcttcgtattcacataagcaatgattctagtgggcgtgtctccactaagccattggttcgtgttaaaagtaaagatgctcggaagatcatatgcagtgcaatttctaacacaggatcactttttgcttattctgatcaagttcgcccaagtctgtttgagttgaagaaaaataaaattggaaagaatccaaaaagtgctaatagaaagcgacttcctaatcttccgtttgccca

SEQ ID NO: 36374 - DNA, 1741 bp, Arabidopsis thaliana landsberg
  unsure (1)..(1741): unsure at all n locations
caaccaaccgtgctttatatcgttctatagagtttttctgttttgtactcaatagtatatacccatttacacccaactacattcttatttggtggtaaagaaactacactccaagtcttattaagttccataacaccgagttccacattcatagccatagtccactgaacagatgctatgacttctttaaatgtttttggttctgtctcaaccgaaatagaaagcacaaaattttggtaggtgggctttatctgagcatatgaaaggaaagaagaaagaggataaggagtagtaatgaactttggtgtaggattggtgtgtatgagagaacaatggtaatccgataagtaacttggagctttagatgatcgttttagcctgccattattcaatgaaagaatcaaagaatcgagtaagttcaagaagtaacaaccaaatccagatcgatgaagtgaatgaaagcggaagaagattcaatgtgaatcgcgatgattgtgatgtagagatgaattgaaggaaagatcgaaagcttgatgttgcttatcgattgaagataacagcaaattgagctgcgaaatgatgatggatgaagatgataatgtgagaatcgtcgttgatgatgacgatttgaagacagaagcagaaaaaatggaagaagatgatgaagaagacgatgaatttgatgaatttttcctggaaaattggttgttagaactttctcgagaaagtgaatgagaaaacaatttttctttgctctgataccatattaactttatcaaatgtaaagtatatttctcattaatgaacaaagtaaacattacaagagtatatatagtatgagagtaaagtaacaaactataactaactctcatataggcttaatacacccccctcaagccgaatcctgtatagcttgacctttctgaggaaggaagaggcttgacactgatagacgaccaaggacagaccgaaatggacctggttgaagcgccttagtcagaatatcagtaagttggttctctgtatcaacatgaagaaccttcaagaagccatttttgactctatctcgtgtagtatgacagtcgatttcaacgtgtttagctcgctcatggaacaccgagttatttgcaatatgcatagccgatttattatcgcaaaagagcttaacctgaaactccatctccacatgtaagtctttcagcatttgagctaaccacaacaattccttagtcgctactgccatactcctgtactctgcttctgtgctacttccactggctacttcctgctttttagatttccaagtaatcagagaagtgccaagaaatacacacacaccacttactgatcttctggagtccaagcatgttccccaatcagcatcagcaaagccatttaagtacaattctgttcctgcagaggaaaacaaaccttgacctggattgttctttaggtatttcaaaacctgatgtgccgcatgcaaatgaacattcgttgggcaagataagaattgactgagattatggactgcaagtgtaatgtccggtcttgtaacacaaagatacagtaacctcccaatcaattctctgtaagggtcttccatcttcaagtaaagtacctaaatccttcgtaagaaccaccttcgnatccataggcactgatttaggcttgcatcctaatagaccagaattagccaacaaatccaaacaatactttctctgacatatcgaaataccatcag

SEQ ID NO: 36375 - DNA, 2970 bp, Arabidopsis thaliana landsberg
cagtctacaccgccgaaaaaaccaccagctgtggagaaaaagcttgagtgtacgttagaagaactctgccatggtggagtcaagaacatccagatcaaaagagacattattaccgatgaagggtttgtttcttggctctcacgtgctcttattttactcaatgagtcattcattatgttctgtttcatcgtaacagattgattatgcaacaagaagacatgtgaagagtgaatatccaaccgggatggaagaaagggacgaagatcacattcgaaggagtagggaacgaaaaaccgggctatctacctgaagatattacatttgtggttgaagaaaagagacaccctttgttcaaaagacgtggagacgacttagagattgcggtagagattcctcttttaaaggctttaacaggatgcaaactctcggtgccactattgagcggagagtcaatgtcgataaccgtgggagatgtgatcttccacggatttgagaaggcgataaaaggtcaaggtatgccaaatgctaaagaagaaggtaagcgaggggatttgagaataacgtttttagtgaatttcccggagaagttgagtgaagaacaacgatcaatggcctatgaggtgttgaaagattgttcttgggcataaaggtttataatatgcatatgtgtttcttcatgcctttcacttccttcattgtatatatgtttcctactagtcgagtgggcttgatgcgttaaagttgtgattcgttgacattaggcttatttttatatattttcctttatatatacattttgttttcttagattgagctgttttttctatgattctttcttgctgtgaatgatgcaattgtcttcttgtagttaacattgatcagtatatcgacaaagataactatctgaaaaaattgacaatcaacttagctttagtaatgcttacgacttttacgagttctttggagtgaatccaaaagaaaacgatgacattatatactataatatgcactaacatactaaatgaccgcatagcgcagtggattagcgcgtctgacttcggatcagaaggtcgtgggttcgactcccactgtggtcgttttccttttttaaaggcttttagggtttgaagatatacactaactgaaattgctgtactcagttctttgagtttcttcttctcttggaggaaaatcgagaaagacgaaacatggcttcttcttctacttctctgaaaagaagagagcaaccaatttcgcgagatggagatcaacttatcgttactccgttaggagccggaagtgaagtgggtcgttcctgtgtttacatgtccttccgaggcaaaaatattctggtcagcttctccgttttgttctaatcaagcaaatgtgttttgattttgttgttggggcatgtcttatagttgattttggttgtgttgtgcagttaaattgtggaattcatcccgcgcacacgggcatggctgcgttgccttacatcgataagattgatccttcttccattgatgtcctcttgattactcagtatgtttccttcttcttcctcttttggctaatacccattaagaaaaattgaaactttgaagagaaaatgatagtcttgatttgaatagaatgataatttgagcaaaatcttcgaagtttaagtttgtttatacaaaaacagaaggatgatgtgtagtagagagaccttcttggattaattagttcaagcttgtaggaggctagagtttgttctgtctctgtttgtctacttgaaagagtttgtgttttgtgtaagaggtttattgggttaagataacatataatgtgttgatgcttttggttgcagctttcatatagatcatgcagcatctctaccttattttctggagaaggtttgtttctcttttcaaaatgatttttttttttgggatgtgttaaaacatagctgagaactaattcaggttattgatgttttgatcagacgacattcaatgggcgggttttcatgacacatgcaacaaaggccatctacaagctgttgcttacagattatgtaaaagtgagcaaagtgtctgtggaagatatgttgttcgatgaacaagacatcaacaagtctatggacaaaattgaggttagtactgcattatattctatgactatgtttatactttgactgctccactaggtttgggataagttcaaaagaaattaaatctgcttcaaaactgtgattgttgagttaaggtttatatttgatttcctctataggtaattgacttccatcaaacagttgaagtgaatggcataaagttctggtgttacacggcaggccatgttttgggtgcagccatgtttatggtggatatagctggtgtccgaatcctctatacaggcgactattcccgtgaggaagaccgacatctgagagcagctgagcttcctcaattctcccctgacatatgcatcattgaatccacttctggtgtccagcttcatcaatctcgtcatattcgtgagaaacgcttcactgatgtaatccattcaacggttgctcagggtggacgtgtgctgatcccggcttttgcactgggccgtgctcaggaacttctcttgattcttgatgaatactgggcgaaccacccagatctacacaatatcccaatctactatgcatcaccactcgccaaaaagtgtatggcggtttaccaaacctacatattatctatgaacgacagaatccgcaaccagtttgcaaattctaatccgtttgtgttcaagcacatttctccattaaacagcatcgatgattttaatgatgtcggtccatctgtggtaatggctactcctggaggtcttcaaagcggtctctcaaggcaactctttgacagctggtgttcagataagaagaatgcctgtatcataccaggttatatgctggaaggtacactggcgaagacgataattaag

SEQ ID NO: 36376 - DNA, 1800 bp, Arabidopsis thaliana landsberg
ctccgtttagtatttatatttacatccctacactcttcataaattacaaatagacatataaatttcacttaattacaaacataacccggtactttttcacctagagatattccaaaaagcaaaaagaaacgtcattttcagaaacagaggaccctctgtttcgttcagtgagtgtttgagctgtctctataggcaaagaaacgataattggggaccatatgttcttctttttccagatgaagacgaagccttttagtcgacgaagaagacaatgtcctctaagtggtggaacattttcctttcttcttctttaaatctttctgattgcctcttaaattttctgggtccatggcaagtttgcaccttggaggtgcttcgttgatcaatgaggtcgtttttggctcctccttgattggtttcagaagtaaacggtttaaacgagcttcagaggttaggttacaagcaaagtgcaaagattctaattcctttttgagttttttagtttaattattgttgatttgttgtttggtattgtagagatgtaggttttgtgttcaacaaatgtcagagaatgaacagagaactaaacacgaactggctcgttctgctaaaaggtgatgactttgttctctatgtgtgatttgtgttaaacttcatcactcattagtgagtaatgtacactgaactgtgtagtcgatttgagctagttatgataagatctgtgtggttctggtgatttattttttcatttagtggttgttgctttgaaaacgtttgttacagtttcattagcagctttctcttttgttacatgataagttgtgtaatagaaccgtaccaaatgcataagaataatcaaagtttcaatttttggataagtttggcaaatgtttcatagaaatagtttctctaatgttgcagaagcgagtctttgagacgtattttaaagcaatatggagtatctgtagaaaaccctgtagaaagtaagacaagtagtagacttgatgacctagattgtgaagagaagcacgatgctgttacttcttctgtcatagatgacgactctaagatggtatatatcacagaacttctggatttgtacttgatatatcttgtcacttgaatggtattatatgaaatggggagattctgactctcattagtctttggaaaattgatgagtactgacagaatacaactgaggagttgcctgatttacgccgggtagagaaatacactgagactgttggtactgcagataatctttcaggacaaaatcaccaaattctcccccatgtaagaacatatccctataaatttcatgttcttgtcttattggaacccttttagtatattcagttttcttactgtgtgttttggatccatgtgtttaagtgatgctggatgtgctactataaaccctttcattagattctttgtagatctcaactcaaattagaattgcatattcttagtttgtttttcaactagtaataatgtctctctttagttgaacacaggtgttttgttaacttctctgcttcctgttcttggattctgcatcatatgcataattgggacgttacactcaataatctccagaaagacatcacaaggtcatcatcatggctccgaaaggtggagaaccgcattaatggattggaacgagccgcttgcttctgatggacatgattcgatgtctccagaatacagagtcagttacatacttaagttctgagttgtattcgtttacagatttttttcttcggtttttaaagaagctaactgcatgcaggtcgc

SEQ ID NO: 36377 - DNA, 6430 bp, Arabidopsis thaliana landsberg
acattttcaccatactaacatgatgaaattatgaaatcataatgttctatgcagaattttttaagaatttatagcacccacatagtcgttcgatcatgctcatgctcgagcacgagcacgacataggcaaaatgcgtcacattgcaaaaacaacatggttatgccaaagctatcaataattcaatactataccctttcgactaaaaacacgctagagtcgatcgagccgtcccgttctcagattcacgatcatacaagataaactttggtttgtgcttgaagcacgatcgatagaaacataaactttccatataggacaaattttttgattatgaatttatgattgaaaatgggtcggaaaccggaataataaagtaaggtatgtattaagtgggtccaagtggggggtggatgcgtgagtgaagaagataccactagtaagaagtagttcaactgttcaagtaaccttttaattaaagaaaaaacgttgcgtgaaaaacaatctataaccgtcaattctgactaaaactactccaaaagttggaaagttgcaaactcaaacgtaaaaaggatttcctcctgccaaaagataagaaaacaagtagctaaagaaaccatatacttctctgtataatgatgacaataaggcaaaaacaatattgggctttttaaacgttgagtttttcagatgggttgcctcatcgttttatacacttgggcttttcaagattgaaatttgcttctgattgcaaatatttattcttggacctaataacgtaggtaggatagatgcattttcttaagaaagcctcagaactctctttgacattttagaaagagttggatagtttccttataggtcacacctctcttcaaacaaatcaagtaactagtgatgcaagtgttcacttttaccacgtctgattttgtcatttctccaaacttatcggattagctccaacctaagccaaaaggactagttggtccgttggaatgagtaatgaattagtttcttttaaggtaatgattttgccggaaatagaggttaaatgttgagttcacctaataagtaattttgccggaaacaaaagtttatcaaatgcgaaaatgaagtatgacccttttcttatggacttgtcaccgatataatcatgaatgtttgcggaatcaagatttgaatattgtcaatgatacatgattgtcttatatgttatgttttaaccaccaacattcaattacgctcaaccaataaattggttctgagagcccttgatcatacttgagagttagcgaacaagaacgatggaggattatgtcggtagaaaacttctaaccaagttgtcataaaaagacgatcaagcgagtagaaccacccaattactgtcgtaatcaacaagatgcccataaacacacgaaatatttacaatcaaatatatagcataagaacacagttgtctttcacaacattgacacacaagagtcaaaatgcttactacccgtttcagacattttgattacacaattacatttagcccttagtagcaaacacatacataaactaaatccacgatcaccggcattcccattaccgttgatcgcaaaccttaaaaaacccaaagtgaaatgctgctgagccaaaagagattttcggatacttttggcagcatttttcactgttctacacaacaatggggacattttaggagaaataaatccctcttttttcttcttttttttaatggttttttcaggttcattgatgatatatctcaagaagagcaatcaggacaacgtatcaatccattctcattgcattcaggacatctcttgaccctatcttcatcctcatcaaacagtttcttgctgccactacaattggaacacggaacaaatcgaatgtccccacagcaatggcaaacaaaccctggttgtctcattggaaactctttaagaatcttagcaagctcaccaatctcaaacaaactcttgatcacatcagcaccaccaacatacttgcccataatgaaaacttgaggcaaagacacagacttctctcccattgcaatctgcaactctttcctataagcgatatccatggagacgtcgcgctcatcgatccaaacccgaaaccctctaaatatcattctgacagcatagcaatcctcatacgtccgtctaatccctctcaagctagtaaaatacaccacaatcctgtcctctgtcccgggaagacggatgaccgagttgtttaagctcgaaaaaggcgatatccgcgattcgggtaaaagggatttaccggatttctgcttctgaggaatctcagctaaggcaggtttaacgggtttggaagtctcgaataatctacaaaggtttttgactttgcctttaagagaagttcccatcgattctacgggggtgtagaatttggtaatggaggtggtacgattgagagaaggattgagattgtgggatttggggcccgaatccaccactgttcttccgtgaattgtaagcgacctgttgaagaacgacgtcgttgtagccgatttcgtcgtcttccctgagaaatcagcgtttttctctaatcccgccatcgaaattagatcaaagaagcacccctttcgacggctaatttggtgtaaaacctaaaatagtcaacaaaatcaaaaccctaggatcaaattcaagcaaattgacgaatacagaaagagaaattgaaaaacataaattgaataatcgtcgatcacctcccaaggaagaaatggaaattggaatgattggaaaagaatcagcttctctgatttgagtcgtaaaacgatcgggtgctgcgtttttgagctgatgaattctcacctaagattaaagaagacgagattgatgaaagaatgatctgatttttctggaaatttgggggtttgtttgtgttttggaagaagatgtggaggagagctccgaattagccttttgtctgtctgcctttgttgcaaagcaaagaatttttctgttttttttttaaagatataattattatgtctaagttattaaaggctctttaatgatatatttactcgatgctccttcgaggaaaaacgaatttgaaaaaataacaaaagtgggattaaattgcgaggaaaagtcgtttactggtaaaacgcggttgtcttattaagaaaggttatggttacagcgaaaccagtttctacggtcggtttattgctattgattctacgctcggtttagagatagttgtctgtattctaattgaagagtagtgtatttcgctttctagtcttcgaccattaggatttttagttcacacaagatcaattctctaacatttaaaatcaactagaaaactcaaataacaccgttaaaatagtgattaaaccattcaaaaattaaacgggttttatattgtttgatatgaaaactgcaggtttttcgattgttttttttgttttccgattgttacacaatggaaaagaagatcaaaaatcaattgtttttaaaaaaaatattattctgtcatatttttgcaacaaacatgtgtttttgcaatgttacatcggtgtcaaattagcaatgtcagatccaaaacaaaatgtcatattgtgaaaaaaataaccctacacttaataatacagtatgaattttggatcctttaagaacaaataaaaactcgataaaaacgttcctgtcggtttgcaccgaacgattgaagttaaccaagccagcaagcaacccaattcttctatttcttcttcacctttagatttttcctcgcttaatttctcaataacgctctcagagagaccatttgatgaagcttctcgcttctggaatttgaaaaggtacaagttgcaactctctcttttctttcttttcttcctgggtttattatatagctggagttctttgtcgatgaatcgggtggtgttgttgttgtttggtttcaatttgatagaagattggcttgaccttgatttgctttgttttgattaggatttgataagacgagttcatagaagattaccgcaagttcatcaactttttgtatgtggtttcagcttttgaagcaaaattctgataactatacaaagattccagcttcatatgtgattgtccttgttattcttagctttgctatgaagttgagatatatgagtggaaaattcgtattaaaggatatgccttttggttgttcatttgcaggaacttgttatggagataatctcactgaacgttgtgccccagtgctctgtggttacttggagtagtaaattagcaacgaaaagattggtcccaaatcggtcaagtttgttattctcaggggtcaaaaaatccagacttgtgattcgaagtggaaattccgatggttatgttgttggtgagaatgatgacttgggtcgtatagccagaagaggagaatcaacgtcaaaggttttgattcctggtttgcctgatgaatcaaatggtgaaattgctgctcgaatcagtcattctcactgcgagtggaagcccaagcttagagtacattatgagaaagccggttgtgacaatctcgatgctcctgcggtgttgtttcttcctggctttggcgttggttcatttcactatgagaagcagcttaccgatttgggaagggattatcgagtatgggctattgattttcttggacagggtttatctctccctactgaagatcctactaccatgactgaagaaaccagttcctcggaagataaggaaccattttggggatttggtgacaaaactgaaccgtgggctgatcaacttgtattctctctggatctctggagggatcaagttcagtattttgtagaagaggttagcaatatctgagttcagttgttctattactctttaagctgttgattttgttcttttagtcgtaatttcaaaagcagtgtgttagctttttttttttagtgtagattgttgctatgtgtcgtatactcatggatttcaatagttttcagctcagaacctgaaagtgtgggtatggagtcttctggtgttgctttgggaatgggaaagtttaggatgcactagatattagaattcatctctgttctttgattccgtttgtgttctagtttgagatcacgatctttttcatctgaaataagctgctgagtcggtaagagtatgtggtatttgtgttgtacaggttatcggtgagcctgtgtacattgcagggaactcacttggagggtatgtagctctctactttgcagcaacccatcctcacctggttaagggtgttaccttgcttaatgcaacacctttctggggtttcttccctaatccagtaagatccccaaagctagcacgtctctttccatggcccggagcattccctctgccggaaagagtgaaaaaaatcacagaattggtgtaagggagactttattaacacatctcctcacctgaaaagtatcattttctatttctatctctatcagtctaatatctttacttcccaatgaaactgcaggtggcaaaagataagtgatcctgaaagcatagctgagatacttaaacaggtctacacagaccattctaccaatgtggataaagtattctcacgtattgtggaggtcacacagcatccggctgctgcagcatcgtttgcttcaatcatgcttgctcctggtggagagctatctttctccgaagctttatctaggtataagacagtgtggtttcttgtttttatatgttttttactctgcgtgattggtgttattgcttatgaggaatgctgctatttgatggtttatgctaggtgtaaggaaaacaatgttcagatatgtctcatgtatggaagagaagatccatgggtgagaccgttatggggaaagaagataaagaaggaaatccccaacgctccatactacgagatcagcccagcgggtcactgcccacacgatgaagtccctgaggtataatgaactagtcaataaattcttcaaactctgcaattaggtataatgaacccaccatttgggatatgaaaacgagcaggtggtgaactatctgatgcgcgggtggatcaagcacctggagtctggtggttttgaagcgctcccgcttttggaggacactgaagaagattgggaggagtccaggattggtagagaaattgagttcccgagagatggttggaaaaaagcagtgaatctgtggttatatgggtcaaactatacgtactggagaggagttagagaatctttcagatccagttttataagggtgtttggagggaagtctgcatagaagaagcatggaacagtcgtctagtgtcaattgattgtaatctatgttgcatccgatgctagactatataatgttgtctgtagaatcaagtttgtaaaatgttcaaaaggaaaagttagcaaaaggtcta

SEQ ID NO: 36378 - DNA, 1815 bp, Arabidopsis thaliana landsberg
tttttctcaatctaagctgaggtttgggatctcgtacattgcacgcgatgggagatttcaatctcgctctcgtgattgttgcgatcgtagtttgcgtcattgttttcatctccagtatctacctcctcgtcaactatcagcatccagatgatgcaaaccaggcttatttccccaaattcgttgttgtttttggtttatccattgctatgatctctattctcatgttaccggcggatgtggctaaccggcatgcttgtcgacattcgatttacaacggcgcttgtaatctcaccttacctatgaaggatctttggcttgccgtttacattgttgacgctgtgcttgtcttcttcatcatccccttcgctatgtttttctatgaaggcgaccaggacaagtttgtttctccacgattttttttttttttttttgagttattattagttggtaatgtaaagttgttgatgttgtgggcttgtgttttttactgcagggctcttgggaagaggataaagagtgctttgatttgggtggttactacagctgttgtttgtgctctggttcttggaattttatacggttagttgttactgtttggtttcttttgtagattttgagcttcattttcttcctggtttgaggaaaattactgagattatgttggagtggtgattgaaccaatagtgggattgtgaaaagggtggtcttctgatgttcttcttatttgcattagtgatttataatgtaattctacaaatgtattaggagtcattgggaaggtggacttctctgtaaggcacttgtcttctgccacgactactttccctacttcatggcagttttcaaataatcaaccttgcattggtaacactgctcgtcaggtaatactttaaattttcttgcattcttgttatgagtttttctttcgttagtctctatgcaaaatatatttcagtatgtaaaatatcttctcttctccttggtatattgatcggcagtgctcagcatatacagctaatgctgcgtctgaaaagacatggtccatgcgtactacgtttccagaatatgttgttgctcttgctacaatcgttgggtcagtgctcttcacggtatgtacatctctctattaggtgttttgtgttaaaagttgcacctcattgtcttggaaggcatataatctttctcatattaaggcttggttgtgttctcttgcagttaaaagacttttggtagctgtgattttttgctttcctctaaagattctgagaaactcttttatctcaaatgttgtagatatttggtggtgttggtattgcttgcctacccttgggccttatcactgcattcatcaggcgaccaaaggctgttatcactcggtcacagtatataaaggttcatttgtgctggttattgttgtctacttgtcttcatgcaaagcttttctaaagaatacatgtacacttcgggtagttggcagtgttagtggcctgacaagtcatctaattgtttttcaggaagcaactgaactaggtaaaaaggcaagagatctaaagaaagcagctgatgcacttcaccaggaagaacgaagtggtgctaagggaaggaagtggaggaaaaatgtgaaagcagttgaaaaggtacaccatcatatctaagggtttggggtcttatttcaaatctgttccatgtctacaaaggtggctgatacctctgttgatattggttgctgatgtgtagtggcgaaatttggccgaaagggcagttacttaggtgatcattcatagtaaaaagctcgccaaaaagtagaaaccagtt

SEQ ID NO: 36379 - DNA, 2343 bp, Arabidopsis thaliana landsberg
gcgcgcgtagttaattctaccacaagacgggtacatatccataaaaccagtttcaacaaaagggtcgcacaaagtcgcaatcttgaacgcaacgccgtgaagctccataccctcgaacaaggccgagactttggaaactgctttaagaatcggaaggaagctgaattgatcaagacgaccaccaacatgtctaatcctctgatagaacagaatcgtcgctctaggttcactggaacgagatagatcccggagaaatggattgaagacgatggattcaggcggagagggaatagatgaaaagacattgagagcgtagctgagattgatagaggaagaagagacggagaggttaaagagaaaggagttgagtttgtggttgatcactgtacggaggatgtgagcatggagttgcttgatgtggttgagtgatttgcagaatgagagtttctctagaattgtattcgcggccgttgacgctattggcggcggaagtgtcatcggcgtatacaattgaatttaaaagaatcatcatcacacgtaacacataaatcgatatattattttaaaaaatattgataccaaagaaaataattgaataagtattactgcaaacagtttatatcatatctgatagactgatacagttgaattgctgataccaaacaaaaaaatgtttaaagaatttctataatatctgatacagttgaattttatcaatttctacatccatattccatattactgatatttaaattatcaaattgagtataggatgattttgacatatacaaaaaaaaaattaattttgtcacaagattgctaactttattatatcatacgatttcataagtagttttttttataaagattataaataattcacttttattgtttacatatcatataaaaaagtctaaatttcataataaatcgtcaatacttatattcgaaggtttttgtgcgtagaagtaactattgaagggcaatattcttgcaaatacaacgattatgtttaagaaacataaaagttaggaaagatattgtttagaaatatttaataatgtaaatattaaacggataaataaaagttacgtaaatgtttttttttggaagggagggaggtttccctatgttttgacgaaaaatgtacagtttaaaacctttctctcagtctgttggttggctccattcgcagctcactgttttcgtcaaccaaattttgtttatccatttcttaaatcatcacttaatcattgcctagttctaatcccaaagttggatcagaaatccaaatttcaaagtcgctatacagagccgtagctttctggcaattttgattcccaccaaaaaggtgatcactttatattagattcctcttcttttctcctattaattttgacccgggggggtcttatcactctcacacaaaaaaaaaaaaagacccatgaaaatccacccattacccagaaactaaaataacaacaatctgatccatcacgctcgtgatccgacccgagaacccggaaagaagctccgtcgtctcccacatatcttcagccgtgttctagagctgcccttgaagtcagacgctgacgtggctgttgaagagagtcatgactgcttcaggttcgtcgcggaaacagacgggggaggaggaggaggtgtgagggcttacatggttgagattcatcctggtgtgaccaagattcttgtgagaaccaatggttcatcgtctcttggtttgtcgcttgatgagcttgagcttgacgtgtggcgtttcaggctaccggaatcaactaggcctgagctcgttaccgtggattgcgacggcgatggagaattgattgtcactgtgcctaagattgaagacaatggtagagatttgatagtgcttgtacagtaatctaatgtgtttgtgatcaaatgagaaaaatcttgactttttttatctaatggttatcaaagttaagatctttttgtttctttatgaaaatatggatacagagtaggttatgccttatgtaacgtaacatcaattggttttagttttagagataaaatcctttgagaggggcaaatttattgaggatctctgattcacgtttaagagcattgtctttcttcatttcccattcaggtttcttcaagttagctgcttgagcttcttgaaccactttagggattgagttcgctaccatcttctgaccaaagattagatcaaccttctctttccccttgttactgatgcagcgggtaagctcggttcgtttagcttgaagctgagcgatttgctcgtcaatttgacggattgtctctgagtttctatcgacttccgtttggata

SEQ ID NO: 36380 - DNA, 2901 bp, Arabidopsis thaliana landsberg
cccgttcttgttcgacatacctgataattaatgcaacactcgtcaagacattgttaaagatttcatcactctgatgataacatgggacgagatctcaaataccttccaaactccatcacttgcgaaaaggataaactcagtctcatgatcgatattctcgtctcttatgtctggatctgagctcagatgtatctttaagctcttatctccaaacgccctagcaaccgctagttgtccatcaactcttggaacatcccctgaaaccattcaagaatcgtctataaattcctcttctcatgttttatatgtgatgagcaagtaagtgtctccatctacaaaacttacctggaatatttgatacaaagccaccacggctttctatttccttttgttccttgcttggttcatgatcaacagagagttgagaagcaacaccgttctttgacatcactgcacgtgagtctccaacgttagcaatcactagcgttttcccatctatcagaatgcctgttacagccgttgatccacctttgccaagtttaagtgactgctctaatatcacagcatcggttgatatgtatgcattccttatagcgtttttcgtatcagtccaaaaatccttctgaaataagtgaaacaacaaaaacattttaagtcttatcagagacattatagaaatccataaaaacagattcatgcatgctttaaacatgagttacctctttgagtatgttatcaaagagattggtttgcaagtacttggctacatcatgccctaagtgaccatcaaagatagcaaacaaacccaaatcatggccgtctactttcttgaactcagacacaacatagtcctccatcggatggcccgctttgcctttcacaaagtcataaccgtgtgcgatgttcttccacaccttggttttacctctgcctgtgtcagatccgcataatccaaccttcaaatattcacaccaaaacaacaagaaattatactattagtttcatttttttaaaaaacttttttactactcaatacattataatcattttattcttaagctaaaaacataagttgacaaataacagcaaaatataagaagaaaaaaaaaaagcaaatatgaaaataaatgagaaagataaattataaaatcaattttggtttgataaacaaaaagaaattcaaagtttagacatttaaagaaaaacaaatgattattagatccacataaccctttgtaaagactcaatttcatgaataaaattcagcttgcagaacaaaacaaacaaaaaagatctacataatccaacctttaccaattgacaccaaaacacaatcacattaatccaagttctgtaatttcttcatcaagagcaacatacatacatttcattatcaccaaatctctaaccaaaaagagaatatagaaaatgcacaaattactgaaacaaattcaagagattaacaaaagctctagaagaatcaatatcatcgtttaacatgcgagatgctaacttccttaaacgggctctacgtacaagttatcacaaagaaacaaatatagcttaatgagaaacagaacaagacatacaaggatcagatcacaaaatcaagattcttttagagcccttgaaacgctactaaagaaaaaagaaaaagactagcgttgagctaagcataccttcatcttatggagaatctctctgcctgccattgttacaagaatttgtttctctgcctttgtgtctgaaatatgaatgattctaagaaagaaaaacagagagatgagtttatgtaataaatatgaatgtgaggtaatcaatccacatgtgaacagccggtgattcttatcattattggctactgacttcctccgccgacgacttttcttctttatatttttctcaaggcaaaagtattccctaaacaaattctctctattattatttgctacattctttcacattgccgacaaaataaaacattacttttaaaatacaaaactgttatttcgtgcacatcatctcattcattacattattgatcggaaaaatatttttttgttattacttaaaataacaagacattattttatcagtttttctagttactctgtcatgacaacatgtgcaacaaagaaaggaaactttatcttaaaaatattttcaaacaaattcgaacaaaatgacgtcgacaaaaagaaatacgcgtgtaaaagacaaaccacacgcaacaaaggcgcgtttagcgcgtgagactagaatccgtggacctgaagcgcgtgggccgggattttcatttgtcttaactgaaacagtgggccacataattaacaaaataggcccatttacacatttgggttatatagaatatttgctctggtccaacaaattttgaatttcgaaagttatttttttttgaaaagcttcacttcccactctctctctctctctcttcctacggctgcgaaaatgacaatcggttacagagacgccgccggagacccgctcttcccgtggcttatgtaactcatgctttatccttccttatcatctaactaattgtgctatatgtgttaaaattttttctaatcctccgatgttgtgtttcggggttttcacagggagattaataatttgatggaggatctatacgctggaaaaaatttcggagacgatcacgataagcctctatttgactgactcccaacttataagaaagatccttcggtaccgaaatgacctcagatactctgaagatctggtttctctctgtaactttactataaccctctctccaagtagtaagagctcagaatttgcttatcgtttcctcaaattgctctgttgattctagaatttttagggtctgggattgctctattccgaattatccgatgtata

SEQ ID NO: 36381 - DNA, 1351 bp, Arabidopsis thaliana landsberg
  unsure (1)..(1351): unsure at all n locations
gcatttctctcttctcaattctgggtgtctttctttgatatctcatatgatcagatcgacgaagaggtaaccattttgccgtttgttagttctcaaccattctattctgttaaaaatcagattttttttctgcaatgcttgtagaaaaagattcgatttttgtgtactgattgaatcaaaacatgtggctatggatccatggattgatttnnnnnnnnnnnnnnnnnnnnnnnntgtgaaaagtcaagaatgtgttaatgtagttttctttgttcaacctctgtgtgatgttgggttttgaaatgctgttgttacagagaaagaaggtttcacctgagagatctttggaggtagaaagaaggtctcacaaacgatgtggtttacaggaactcagcagaaaggcagggcgtgcgagaaaacagtgtaccctgtggagcttaaatcaggtgatggaatctcaaatcacaaggcttgcttcaaatgctctcactgcaaaagcagacttcaagtcagttttcctcttttgcctttcctaattgtagttattagtgttttgagagtttcatttagatatttagctagagagatacttgatctgaattggtcttcgttaaagtgataaagttaaaacgtgttgatggtttctgaacagctgagcaattattcatcaatggaaggagtggtgtattgtaggcctcattttgagcagcttttcaaggagtctggtagtttcagcaagaactttcagtcacgtatgtaaaactcttttcttcaccttctggtccagcttttacatgtggtcactttaattttaatcttcaaactttttttttcctttcacagctgcaaagccattgactgataagccaaccccggagctggtaaacgcttcttaacaacgatgtttttatttagttacacgacttgagatacatgactctatttctcttcttggttgttctcagaataggacacctagtcgacttgctggtatgttctctggaacgcaagacaaatgcgctacttgcactaaaaccgtgtatcctatcgaaaaggttagtatacatttaagcttgtatatgtcattaccattgctttccaatacacttttgtgttctctctgtgattgttgtcaagaaaatcacagttaaacttatttggatcatttgcaatatgagttacatggatccgaatcacataaagttgagatctctttaatacagtcaattcttatatctcattgttctgttttctaaaaattgtaggtaactgtggaaagccagtgttaccataaatcttgcgtcacgtgttctcatggaggctgtccgatatctccatcgaactatgcagc

SEQ ID NO: 36382 - DNA, 2898 bp, Arabidopsis thaliana landsberg
  unsure (1)..(2898): unsure at all n locations
tattcattgctttagttatgacattgttgagtggctttataccttagatctttctttctttcttttttgtatccaaagcaacatggtcttaaatcaagcttatcactgcaggcaatagaactttctcaccttggaaagggtcagtagtggattcagtagtgggagttttcctaacccagaatgtcgcagaccattcatcaaggtatatgcattcaagagatttctaataagtagaagatatatgcaacagagtggtttagaaattataacttgttcacttttgcagttctgcatatatggatttagctgctgagtttcctgtcgagtggaacttcaacaagggatcatgtcatgaagagtggngaagttcagtaactcaagaaacaatactgaatttggatccaagaactggagtttcaactccaagaattcgcaatccaactcgcgtcatcatagaggagattgatgatgatgagaacgacattgatgctgtttgtagtcaagaatcctctaaaacaagagacagtttcataacttctgcagaccaatcaaaaacgatgctgctggatccatttaacacagttttgatgaacgagcaagttgattcccaaatgggtaaaataccatacacggatgatcttaatgacttgtcccaggggatttagatggtctcatctgcttctactcattgtgagttgaacctaaatgaagtaccacctgaagtagagttgtgcagccatcaacaagacccggagagtaccattcagacacaagaccagcaagagagcacaagagcggaggatgtgaagaagaataggaaaaatccaactacctccaaaccaaagaaaaagtcaaaggaatcagcaaagagcacgcaaaagaaaagcgttgactgggatagtttgagaaaggaagcagaaagtggtggccgaaagagagagagaacagaaagaacaatggacacagttgattgggatgcacttcgatgtacagacgtacacaagatcgctaatataatcatcaaacgagggatgaacaacatgcttgccgaaagaatcaaggtttgactaatcacagtgctatatatacctcatttatacattctaacaaggtgaatttttttgactctggaaattggacaggccttcttaaacagactagttaaaaaacatggaagcattgacttagagtggctaagagatgttcctcctgacaaagccaagtaagaaaattatttacaaatcttgagattatatgtagcctctggttaaagactatatctcagtaaatggaatcgatagtaattgagatacatataaatgagagatacttgatagtgactactaatggttgcagggagtatctactaagcataaacggattaggattgaagagtgtggagtgtgttagacttttgtcactacatcagattgcattccctgtaagtcaatgaaggatactgaatactcagaccctaatgaatgtggaacagatacattaatagttacgtatttttacaaatgcaggttgacacgaatgtcggacgcatagctgtaagactaggatgggttcccttacagccattgccccccgagctgcaaatgcatcttttagagttgtaagaaaaaaaaattaaagatcattcttcaaccatgaaagggaacatgagaaatttacagtagttccctttaattctattcaggtacccagttctagagtcagttcaaaagtacctctggccacgcctctgcaagcttgaccaaaaaaccttgtaagtaaattacattagcatcaaccattactctagacccttaaacttctctaactaactctaactgtatcatacaattctaggtacgagctgcattaccacatgataacatttggaaaggtacctcaaacaaatttcaagtgtttgtggaatgaaaacatcttaaagtggcttttcctattttgcaggtcttttgcacaaaagtaaaacccaattgcaatgcatgtccaatgaaggcggagtgtcgacattactctagtgcacgtgcaaggttaaaccccacaaaattctttgttattgccattaacatgaaaaaaaaaacactagcttaaagagaaagagatctgctcaaaatagtcattttaatggttgtatgttctaaatgcttgtgttatatcgcagcgcacggcttgctttaccagaaccagaggagagtgacagaacaagtgtaatgatccatgagaggagatctaaacgcaagcctgttgtggttaattttcgaccatccttatttctttatcaagaaaaagagcaagaagcacaaagatcccaaaactgtgaaccaatcattgaggaaccagcatcaccagaaccagagtatatagaacatgatattgaagactatcctcgggacaaaaacaacgttggaacatcagaggatccttgggaaaataaggacgtaattcctaccatcatcctcaacaaggaagctggtacatcacatgatttggtggtcaacaaggaagctggtaaatcacaggatttggtggtactaagcacatatgcagcagcaatacctagacgtaaactcaagatcaaggaaaagctacgcacagagcaccacgtgtgagttgccactttcaattttttcttctattataccctaaaccgtaaaatttgagactttcctcagcatttatctcatactaattctcttttacagatttgagctccctgatcaccattccattctagaaggggttagtaactcttgcaaaatgatttagcaagaatttttctacttattcccgcctttaaactgtttgattatctttttttacagtttgagaggcgagaagctgaggatatagtcccttacttgatagccatcagggcgcagggggtcg

SEQ ID NO: 36383 - DNA, 1195 bp, Arabidopsis thaliana landsberg
cgacggaaatattagtgaacctttgttgaatgttgcatagtctttttttccgtcctggatttccaaatctttgggacgcagtggacataattttaagctctagcacattttgctggccgcttttgtcatcaaggactacaactttggctcgtgttcccggccatcctgcaaatggacgaacctagagaacagttttattttttacgtttatgattattgaaataagtcgtaaagtgttggtagagctttagtaagaatttctgcaacttgttccttagtagaaatgtgttccatggtgatgagtttatcttgaactgcatcacgaacttgatgacaatcggattcaatatgcttagtacgttcatgaaacacaggattagaagcaatgtatatagccgccttactgtcacaaaatagttgaatgggtcgtgtatgttgaaaaccaaaagtttgaagaagttcgcgtagccacttgatttctcgaagagtgtatgccatcacacgatattcagcttcagctgaggagttagaaaccgtgtgttgcttcttagtcttccacgatattggagaagagccaaagaagaccgcatatgcactgagagaccgtcgggtaagaggacacacagaccaatctgaatcacaataagcaataaaagaaatctcactatctgaccgaagaagaattccttgtgcagggcaccctttgagataacgaatcacacggatggcagcttcccaatgtggtagtagaggagtattcatgaactgggacagaatatgaacaatgtaactcagttctggacgagtgatagtaagatatacaagacgaccaacaaggcgacggtactcttctggacgcttgagaatgggacccgtggctaaggctaacttgtgattaagttccaccggagtagcgtacgtcttggcaccatgaagattagcttcggtaataatatcgagtgcatacttgcgttgagagagaaaaatgccgtcgggaccacgagaaacctcaatacccaaaaactacttaagctggccgagatctttcatatgaaaacacttatgcatgtacgccttgaaacgctctatctctgacaaattattgccagcgacaataaagtcatcaacgtaaacaagaacgtgtagaattacgccattttgcacaaatgagaaaagtgaataatctgattacttt

SEQ ID NO: 36384 - DNA, 3419 bp, Arabidopsis thaliana landsberg
atattccaaaatctgaagtcacataaaactcataatttcaaaatcatagtatatctcaggatttgaaagaatcaacaacttaactaattaccacattttcatactgataaaatgactaaaagatatgtatgacctctttcttatgaagtgttctcatcttgtttgttttttctttatcaaggaagttttaaatcattttgggcctgtattttttcccgctaggggccgacatgtaatccatttgtacatttaaatgatagccgtacttataccattttattaatgttaagaaaatgtgagtggaaacaatgagcgtatgaaaacaaacaaaacaaaactgagacgaatattttttttgcggtttttcgtgactgcaattcaatgttcacatttcgtgtggtcctgtgatgcatgacatgtttgtttttaggtggatttgtgtttgtcttccctgatatgtaattatcatttagtggtttcacttctttggttttatatcacttgattagctgccaaaaacaaacccaaataaacatcacatcgttactcgttaaaacaaagatattaacttatagtactaataatatatacaaatttcttaaacatgaaatacaaatttaaacaagctaagtgaagctgccggagtttttatggtttcaattgttgccacgcatataaagaaatgccgtctcgtcgaccacaataaagagatgggccaaagactaataacgttttcccacccgtttaatacacgtgtcaacctataattggccattcttcgatatctatcaccgccatcaaattcacctaccctcttcccttccatataattagtaacaatacaccgatctaacataaaaacgcttcaacgtgtcaaaacattacattttcactctcacattcagacgcaccaatcctctgttttggattttgaagagaaaatggcaagcagcgacgtgaagctgatcggtgcatgggcgagtccctttgtgatgaggccgaggattgctctaaacctcaagtctgtcccctacgagttcctccaagagacgtttgggtctaagagcgagttgcttcttaaatcaaacccggttcacaagaagatcccggttctgcttcatgctgataaaccggtgagtgagtccaacatcatcgttgagtatatcgatgacacttggagctcatctggaccgtccattctcccttccgatccttacgatcgggccatggctcggttctgggctgcttacatcgacgaaaaggtattcttcttttcttctttcacttgctcatcaagattttattaattaaggtttgttcgcaacaaataaatttttatctatagtgcagagtttttgcaaagcaaatagttgtcttaagtgcttttgtggttactagttaatatatatacgcaaaacatagcattttgtggtctaaaataagtatgtgaatggaaacgcaaatgtaaatataaacaactcaggaaaatatgttagtttcattaattacaatgttaagacttaagacataaactgatctttatttttcaatgttggacattgatcaacatgaatgaagtggtttgtcgctctaagaggtttcctaaaagccggaggagaagaagagaagaaagctgtgatagctcaactagaagaagggaatgcgtttctggagaaggcgttcattgattgcagcaaaggaaaaccgttcttcaacggtgacaacatcggttacctcgacattgctctcgggtgcttcttggcttggttgagagtcaccgagttagcagtcagctataaaattcttgatgaggccaagacaccttctttgtccaaatgggctgagaatttctgtaatgatcccgctgtaaaacctgtcatgcccgagactgcaaagcttgctgaattcgcaaagaagatctttcctaagccgcaggcctaagttgttggtggactaggttttgtatttgtgggttgggttcttgcaagaataaattaagagtgttattgtttttagatggctttatctttgtgtgtgagttttaatcaggcgtacgttaaacgttacgtatgtatcaggtttggtgaatgattttatttaggttatgttgattgagaagtatttttttttaattattgtatatatctaactcgctaattcctagaagaatcaacaatcacgtgaattggtcctattgccaggatttaatcgtttcattgttggccacacttcaatttctcaccactcgtttacaaggctgtaccacgtgtcgaaatttaattcgtatatcttcattatccgttacctaaaccctctaatggaaacctaccctcttaagctttcatacgatcttcttaacccgcaagcttccctctctcttcgagtcggttcttaatctccgggataaaatggcgaccgaggacgtgaagctgatcggctcatgggcgagtgtttacgtcatgagggcgaggatcgctctccacctcaaatctattagctacgaattccttcaggagacgtatggttcaaagagcgaattgctcctcaaatcaaacccggttcacaagaagatgccggttctgattcacgctgacaaaccggtgtgcgagtccaacatcatcgttcattatatcgacgaggcttggaactcttctggaccttccattctcccgtcccatccatacgaccgggccattgctcggttttgggctgcctacatagacgatcaggttcatagattgttcttcacttgctcttttcactttgattgcatgtaataaagtataccgggaattaatgagggattgatttggttttgattgctttaattttgatacatccccaaaactttagcggttcttttatgattgttattggtttaatccggttaataatctagaataacacgatatgaccgatttaaaccggatagggtttgactatagtccagcttcaactaactttaatttctagtttatacggatagttaggtaattagtcaacttttatgttgaaagaaattagacattttgtttatcttccttactatatatgacataatcaagtaaatcttaaatcttatatgttctgacttaaatttgatatgaatggaagtggtttatctctgtgagaagtatcctaacagctcaaggagacgaagagaagaaagcagccatagctcaagttgaagaaaggaccaagcttctggagaaagcattcaacgattgtagccaaggaaaaccgttcttcaacggtgaccatatcggttacctcgacattgccttggggagcttcttaggttggtggagagtcgtcgagttggatgccaatcataaatttcttgatgagaccaaaactccctctctagtcaaatgggcaaagcgggttctgtgatgatccccgctgtgaaacctataatg

SEQ ID NO: 36385 - DNA, 1961 bp, Arabidopsis thaliana landsberg
ggccaatgttccattcagcgcttcctcaaaagtttcaacgatgtggactgctgcagccggacctcgttgttgaattgggtaacatgtaatgcgaatagcaactcgtggatgtgggctacccttatctcaaatcagtatggacagatgaagtgggtgcaaaaagattatatgatctataactattgtacggatttcaagaggttccctcaaggtttgcctacggaatgcaatctcaactgatcatgttatcgagaaaattcaagcacttgacacaattttgtttctttctgtgttttccttttcacctcaatatttgttgattcatttcccatattggttaactgattatttgttttgtaatctttataatttggttacgattgattcatagcaaaaactgttggaataaaatgtgatctgaaccactttaaataaacatgagaacagagttttttggccataacacgaaagaaagaaaaacagagttctaggttccgaaaacagagtaaaaaacagagttggttggtttcgcagaaaaagttaaggtgttcatggccagttgctgtgtttgaattctccgccgttttcttgggagaaaagataatggaattaagcttaaataaatagcaattgaaaccgttgaccaaatctctctggaggaaggtgacagtctgacagataccgttatgatgtgtatggatgaatgcaaaataacaacgaaacgcaagaagacagaaacagtagagatagatgtgaatgcatgcatgggaatggacaagatgggaagaacaaagaagcttgtgctttcctgttgtggttgaaagtttttgttgtagatttcggtttttctttagatgttgcaaatttgaaaatggtataaatacttaacaatgatacccaaaaaaacgaaaaaccaaaaaaaaacatggaaggtaggtatctctgatatatgtttagaccctaatttgaagctgaagaaatgtatgaatggctaactctgacccaaatttattcagtaataaacttttgactgttttgactatgattgactgagatttttatccacctgaaatgaatatacatgtttttattttatttttgttatgcaaatgatgggagagattcgaagaataattcatgtagttgccttataaattatacgtgacaattcttatatgtatgtggctaacatgtccgccctcaatttcagaaacatgtcggtccattttaccaaaacctaaacaaatatttcaagtttttttgtttgcaattgtacaagttaacgaaaaatgctacttgatcgcttttataagcatttttaactcaaaattataatctgaaacaatcttataaattgagccaaattgcatgaccaaataaagaagacaaaattttgctgaaacgattaaaagtttctaaaacattacctacatgtataatttatatgtgaatttaacgactttatacataatttatatgtaagctgacataattcatttgtttataataactaaaatcgcctagtgtaacacgaccatgtcgatgatggaactccacgaacctttctaatgcactcactattaaaatatatctctctctatataaacaccaaactccagtcatttcaaacatcagaaaacaattagacaacaacaacaacaacaacgacaacagcaacaacagcaaaaaatggcggcttttgcgaccaaacagtctcccttgttgttggcgtctcttctgatcttgatcggcgtagccaccggaagtttctacgacagtttcgatatcacttggggagctggtcgtgctaatatatttgagagtggacaactcttgacttgcactctcgacaagacatccggttcaggttttcaatccaagaaagagtatttgttcggaaagatcgatatgaagataaaacttgttcccggaaattctgccggaaccgtcacagcttacta

SEQ ID NO: 36386 - DNA, 3101 bp, Arabidopsis thaliana landsberg
ttggactggtagtataaagggaaatagggttacacgcgagtgctttcacatttggcaactttctctgatttttctctacgcgagcggcgattgcgactatcatttccttgtgaattctcgtctgtctccggtaactttctctccattttgctagctctgttgttagcttgttacgcattatgctcgtagtttggcctgtctcagtgcgattagtgaaccagtaatgaactttaagtaacgttttagggttttaatttttccttggttgaatgatctaaacccttctttaggttgaaggagctatcaacgtttgtttggtttatagtctatagcttctcgctcgacctctgcaacttaaaaatggttatgtttatgtcaaaacttgaaaccatgtttatgcttgatacttgggtctttttggctctgctttatatgtgtcttctttcctctatgtgtttttctgcttgattctgctggattatgaatatctttcttctgcttgcttctacttgaaaccagggataagtgattgcagatggctgagcgattattacaatctatgtcaagggtggctggccgatgtcatccagattgcgtaaaagcaagtgatgagcaagaagattaccgtaaattctcaaatccttttgaattgactcgttttcatatgaataggttcagtatatgaattgactacaacattttcatcttttgttgttgttgtttggcagatgcatctcaaaatgcagctttggtagctgtgaatctgattagctctgcaaggttaatactgaaactcgacgctgagtttactgagtactcagctcagtttttgatggacaatgctggaaaggaagacgacccgggagaagtggatcaacaacgcaatcaggtcacgaccgaaaactgccttcgctacttggccgaaaacgtttggaccaagaaggaaaatgggcagggaggaatggatcaacaacgccctgtgctcactgtcaaagactgcttggaacttgcttttaaaaaagggctgccgagaagagaacactgggcacatttgggatgtaccttcaaggctcccccatttgcttgtcagatacctcgcgttcctgtgaaaggagaagtggttgaggttaagacttttgatgaagcattcaagctgttggtgcatcaacccattggagcaaaactgcatttgttcagtccgcagattgataatgttggagaggtaaagtgttggtaagttaaatttcaaaatcttaagagattagtgacaaagttttgttctaatcttgttcatctttttttatgtgtgatagggagtttacaaaggcctcacgacaggtaatgaaacacactatgttggacttagagatgtgctaatagcttcagtgcaggagttcgagggagatactgttgctattgtgaagatctgctacaagaagaagctttcatttatcaaagtgtctttgagcgttaggtttctctcagtagcacatgatggtgatgagtctaagctcatagcgccaacaggtctgcttgttgacttctgtgtcccgcgcttatctatcaactaaaccaaaagctgagatcttggtaagtatctggactatatgctagatgtggaacttgtttgtggtgctaaaataagagttgttttatgagactattttcttgacgttaagaagtcaagtatcttgaaaaccatatcctatttgtggaacttgtttgttgtccgacattatgattgtcttaggatgaacttttatctataagttgaagaagtatttgaacttgtttatcattccaaattactgttgcccaaatttgacgggatcaattcaatcttctgtattcataattggatttgctcatagttaagttagttctatatagattacacaataatgattgtattatccgtgtttaccaatataattttagtgaaaatgcaatgtaaaggtttaccgagaaatgagaattgagtcaccaagctgatgatacataagatagactactaagaattttacattgaccagtagaaatcttcaaatctctataaactggcccaataaaaaaaacgatttaaaattgcataaacgatgttgttgtttaagccttcaacattggcaaatggtgggcaatctatctgagaaaaaagagtcatgataaccaaaaatgacaaaaacggcgtcgtatttaggattaaaagttgaagtccctaaaccgacatgttttggaactacgctgaggggaaaataggctttcgcgaagcttcgagagttacgcgacatttctctgagttttctctacgcgacggcgattgcgacttgtctgattctcgtagatctgtgtctccggtaactttctctccattttttctatctctgttggattttttagcttgctacggattctgctcgtgatttggcctttctcagtgcgattagtgaaaagtgatgaacttttagttacattttagggttttaacttttttttcttggatgaatgatgctggatccttctttaggttagagtttttctttgtttaaagaagttatcaacgttggtttgctttagtttataaagcttctcgttcgacgatttttcctctgcaactagagatggtttatggttatgtcaaaacttgaaaccgtatttatgcttaactaacttaggtcctgttttggttttgcttattttctttctcaatgtgttcttctgcttgattgtgctggatttgtgaatgtctctacttaaaaccaggagttcatcgcagatggagtcatggttagaatcatttgcaatcacggatggcaaatgtcatcccgattgcttaaaagcaaacaatgagcaagaagattacggtaaattatcaaaacttgaatcttaaatttactttctttgcatcattataagaaactgtgatttggttttaactgttagctactctcgttttaatttaacaggttcaatctaaatccttctgaaagaatcatatgaattgacttacaacattttcatctctcttttttttcttgcagatgcatgtcaatctgcagctttggtagctgtgagtttgattagctctgcacgggtgatgttca

SEQ ID NO: 36387 - DNA, 1106 bp, Arabidopsis thaliana landsberg
aaagataggagcttgattgcttggacggcaattataacagcatatgctgttcatggggactctgattctgcttgtagtctttttgaccaaatgcagtgtcttggaactaagccagacgatgtcacactaacagctgttttttcagcttttgcgcactcaggggattcagacatggcgcagcatatatttgattctatgttaactaagtatgacattgagcctggagttgagcactatgcttgtatggtaagtgttcttagccgggctggaaaactttcggatgcaatggaattcatttctaagatgccaattgatccaattgctaaagtttggggtgcattgttgaacggagcctctgttcttggcgatttagagattgctaggttcgcttgtgatcggttgtttgagatggaacctgaaaacacagggaactacactatcatggcgaatttgtacactcaagcagggagatgggaagaagctgaaatggtaaggaataagatgaaaagaatcggattgaagaaaatccccggcaccagctggatcgaaactgagaaaggattacgtagtttcatagcgaaagacagttcgtgtgagaccagcaaagagatgtatgagataatagagggtttggttgagtcaatgagcgacaaagagtatatcaggaaacaagagcttgatgaagcttactgattgtttcttaaacatctcctaagcattgtcttgccatggacttctcaaggagttactactatgggatgatttgtttttttttttgtggagcttccaaagagtatcaattatatgattttgttttcctttttttttgctgttgtgaatgtgattgaacatgacgttgaatagtagttgatagaagcagctagcaaacgctttaacttgagggtaatgaagtgataatgattgaaggggtggggttgctaataagaataagaatattagttttatatgattcattagttttgttcacaaagtaagcattattttgattaatgtggtttctctcgttaagtttggtctgagagtaaagtacacgcaagctcaatatcactaatcagtaatcactcaatgtttctttgcgtaatgct

SEQ ID NO: 36388 - DNA, 1246 bp, Arabidopsis thaliana landsberg
  unsure (1)..(1246): unsure at all n locations
atgagacaagaaggatatgaggaatatattgttcttgcatcaaacatgcttcaaaactcagaggggatcaaatatattcataaagcattccattttacattgtaaaggctagagaatttagtcatagaaaaaattcatagccaataatgtttttggtatagttagagttgaaacatagcttgaatatcggtgccaagggcctatgagattaactttacactagctaagtttcagaccaaccgaacacaaaaccacccactaatcaagtaagagaataaacaaaaggttttaatatttggagcatgggatgctatcagacaacaacatgttaagccatgtgagatgcatagaggaaaagtggtcagcagcaagaatgggcccataaccttagcttcgttttcctccctctctatttgaggaagcgatcgaaaagcttttgtaagtggccgccagttttattttttagtttgattgattccttttttttctagaaagttcactaacaaaaatttaaattaataaaaacttgttggcatgcgaatcaaaagaacaatggatgatgacacacaatcttgatggnnnnnnnnnnnnnnnnnnnnnnnnnnnnnnnnnnntacaacttttcttttgattggctgttgtatatataactttgcacataagatattgagaacagctctctaccttctatgcctcaattcttttttttcttactgtattgcgaatcctggtctctgtccaatgaaaatgggaatgcataagcaaaagaacagtaaggcacaaaaccatatgagaaaatgggttgattctgaataatatccgttagtttgactctgaattttgcatattttcttaagtttaggtatgaagttcaaataaagatacggcttgggtatgaaaataccttacaaattctcattgtcctcttggtaatgcagaagcaagagtacactgaaaaatgacgtcgtattaaacacgtcattatccatgtgttcgctgactcagaatcttcacggtgttgactaactcccatttgtttgactctaaattttgcatattttcttaagtttatgtatgaaattcaaataaagatgtggtttgggtatgcaaataccttacaaattagtttgggtataaaaatacattacgaaaaaaatacagaaaatactattttcccaaaaaaaaatagtccgtaacagcgaggtgggtaatctctcaggtattataggagacctcaaacaataat

SEQ ID NO: 36389 - DNA, 6421 bp, Arabidopsis thaliana landsberg
cacaaatgaaaaggccaacctttcattgcccgttcggctctgtacctagcagctacaagaacatttggcatctgtgcctcgtactgctgtggcaagccagaagatcgatgtgaaaccgctcaatacccacaggctcagtttctctctagaggaagtgggaaaatcccagtgctcgtggtcgtggaagtgatgctatcaaggttaataagatgcttcggaaactctgttaataccatcattgtggacattctcttcaacattcgaccctgaccataatttgaatacagtaagaaattctctttatgataaatcatctcttttattacactgaaacatgactacaaagatctatgccataaattacatgacaagaatgttgaccaaagagggacaaaagtttcttatgcctaagaagtaagaacagtaagtctgcaaccaacgtgggcagatccatacgcgtctctggaactgatcagaccatgtctctgctctgacatcaaatcaatataatagtagatacaatcagtggtccataatcttctctgcggccgtctgtcttaactgcagagacttaatggagccagagagacagatgccttgatgctacttacaatctctcgaacaacaaaacaaacaagaactattgacactccgagaagaagagatttgacaaaggtgaagaactagggctctgttttgcgcctcaagacaaaataggggtcgactcagtagaccacttccatactttaacttgaccacttccatcaccggtgaaaaatatgcccccgggacctatctggattgaccgaatctcttgcttagctaaaattttgcccctttccgtaaaccttacataagaacagaatctaagcttttgaaagtaaaacataattgtatactcatgaaacaaacagcattggaaagacttacgatggcaaatcatagaggtgcaacgaattgtcattgcacgaacatagcaatactggcttggcttctgcatcatggacgccacagagagctagcacgccctatatccaaatagccattgagaacttagttacatatagaatgaatcaagagaaagggtaatatttcaacaaaaatgctaggaactgtacgtattcttctttgtgagtatatgtcacttctaagtttccaccttcagtagcagcccatatctacaacggaaaaaaaaaaaaaaaaaaaaacagggggtaatgtcatattcaggaatcgagccaattatctagcgagttagaaccaaaccttggcggtattgtccaatgaacatgacagaagaaactgatcccagcaaatgagatacataacaactgatgtatgctctgtaagcgtttgaatacactgcagattatccaggctccaaacctattaaaaacagataaggtaggcctatgagcttaaacaaaaaaaaacagaaaggggattttaatttaggtataataggcactggtgactactttttaagtagtgccacactacttacttttatagaattgtccatggcaccagaatagagtctgtttgccccaacatataaagagacaactgcaagcgtgtgacccaatagtgatgcagctggatcaaaacagctagtggtgctattgtatcttcaaaccaaaatagagccatcctgcagaagaatttttatcaaaatccaatagaactgtagatttctattagcagaggtggtttttccaagagatgacgcaaacttgaaatgatattcaagacaaaaaatgattttaagtatatacatgacgctgaagcaaaattctactccaactctccaaggccttagaaactaagtttacagtcagtaaaagtatttacttgtgtgccagcgaacaatagatcagtacccacaaccaatgaatatacttggccaacaggtccagtgaggctcaggtctgcattgttttggatattccacgcctgcatataattcaaaaatgtatatccgtaacaacaataaacctcaacacataggacaacaaaagtgattctcagtatagatgaagagttttaatagtcaaggaaccatgcaaatgaatcatactctgaacttaccttaacaagatttggcatgccaaccaatagccagggaccttcactaatgatgcagccaacttccccaccaagattgagtacacctgtacactacatcgtagaaaaaaaaacaaatactagaatgagaagtacgcctataaagtagtccaaacaaccagccatatcaaaatgatgttttaaactcaatagctaaactaaatatggagcgaaactcaatcaaacaacaataaaagaaataattatcagaggcaaatcaaaacctgtccagaagcacaatcccatattcgcacagtttcatctttactcgccgtgtaaagcttatctgatcctgaaggcagagcaatcccagtaacaacctactcgagaaatcagaaccaaaaaaaaaaaaaaactatcaacatcgccaacaagcacaagaatccagcatcacttataaggacactcaacaacaagataccttctgatgcccgtcaagctgcgtcaacaaggagaaactatctcctttgctccagcaatgcaagtatctacatttatcaccataagggcaatttccatcaacccagaatttgcaaagtttctccgtcttggtcaccgttctgttcccaccaaatcttccccagttattagcagtcccgctgaacccaggccctctccggtgactcggacccgcaaacccagattcatcagcgacccttttatttgaagaagctgctactggacccgaacccggacccggcaattctctatgcaggtaagggcatgggtaacgattgcaccggccagctcgccagtggaaacaaaccttctgatttgagtccgtcgtcggccgattagagccaccgcccagtctttgaaagactctcttgtttcctccgttcatatctaaatccatcgaattggattctctctaaattacgactcagaaaactcggaattggattatcctgtaaacgtcgaatggatcattactgttcaaaataccaaatccgatcataagtaacaaaacccaagcgcgaaaatcgaacgaacccctaacagaatttacctctctgaatcaagagtacataaataatctctcacaaaggagttttctttgataaatcaaaattggaagaagatgtcaagcggcttcggttttttttaatcttcggatcattcttgaagaaaacataagtgaagatccctccacgtcagcttcacatcaatggtcgtttaatttcttcttgttttactataaatttttgaaaatttgatctgtctataaactattgttaatcaaagttgtatataaaaccagattctaccatttgtaattttgtagtaatttgttacaaattacaccgagttaaggtaaattactcaaaggctagtctctgagtgccaacaagtgaagcatatgatcccttttgcgctaccaattcggaatgtgttccaagctctatgatcatcccatcagagcacacagcgatctgattcgcgctctgaactgtgctcagtctgtgagcgatgactaatgttgtcctgtctttcattagacggttcaacgcactctggactaaccgctcgctcactgcatccagcgcacttgtggcctgcaacaaagtaagcaagagagagactaagcagagatgtctcatactaactgtttgtgttcttgtttgatatgctattacttaggtaaaggttctagcaaagcagacagttcatcaaaggcgagattattaaaataagagtctctcacctcatcgagaatcaagatgggggcattcttcagcagagatcgggctatggcaactctctaacacattgataaacaagcacatcaaagcagttgcaaaagtctatcagaaatcaaaaacatgtagctcataatgtttctatacctgtcgttgtcctccgctaagcaagcctcctctttcaccaaccagtgtatcgtatccctataaacaaacaccggtattgctcacaagaattgatgtgcaattgccaggaagaaacaggaaagtataaggcacacgaatctgaacctgaggaagtgagattataaaatcatgagcgttggcagctttggctgccttaatgatgtcgtccttggacacatgctcattggggagaccatatgcaatattctcggccacggagagagaaaagagaacgggttcctgaatcacacagaaagataacctttgaagaagaagagaagaaatgatccaaccatgcctgacacatagatgttacgtatacacacctgattcacaattgagacaaccttagcccattcactcttgtcaaacatcctcacatcttctccacccacagtaatactgtccttgtgttggctgcaagaattgaaaattcaacatatcagcataatgtaaaagtggcagtaaacatagtctcaacagatattaaacttcaaattggaagaggagggtagattaacctcatagaagcgtgccaataactgtacaatagtactttttcccgcaccactagagccaacaagagcagttacagtaccagaattcaacgtcaaactcagcccatcaagaactttcacgtcgggtcgtagaggataagcaaaatgcacatctacactagacaaaatagaacatggaaaagaaaaacagatatgaaaaaggtaaaaagctgtagtaagatatgatgaagagagtttttcttggtctgattttaccatcaagacagacatctccagcccatgttagggtacgtagattgttagttgatttcagatttgacatgtagtacttatcgaggtgacggatattcacatttgggccagcagacaagaacaatttaaggttttcatcttggactttctttgtatgtatatctctttctaacccgtaagcctgagcctcatctatgtgcaccgcgtttaatatggaattgatcctgtctatatcagcgaaagtcccacgtatatctccaaacgtgtttacaagcccttggacctggataacagaatcactggttatggtaaactaaattacatgtatagcatatgtgtgacagtaaatgatgtgtagacagaggtacttacagcaaatgttagagtgaatgtgtatccaatgaacgaaacaactgttccaacagcgagctcaccctgggttggagaaattttaagaataagaaccaagaaaaataaagtgcaaaagagctaaaatgtaacaacataagaaactacacaaaagagagatacagagaaatttgattcttagtttttttttatttaaaaattcagaaggtagtaacttgattctagctagaaacatccagtcatttgttccagaaagtataaacaacgagtaacactatcttctgcaatagaaattcataaaaacacgattctctttatgttttagggggcaagaagcataatttcaacttgaatgatcataatggcaatcaacaagtcttataggcaggtatatcttaccgtcttcaccttgcttcccccaagacagtaaagagccaacagagaaatataaacagcaactcttgttatagattcatttatagacttgaaagtaccaagctttaagccgctaagcttgtaagcaagaatctgtacatcaaacaaaagtttagattaatagattatggatcagttagaaaaaagaacaattgtttagaagaaatcagttttagctagtaagaagtctgaaatatgacctgactaccgaagatagacatctgacgtttttcgccgctgaatgatcttacctataaagagatacaaattacttgagtcttcaagggtaaatcaaagtttcttcagataatttaatctgccctaaaagatacaaatacgatgaagtcaagaacttacagttcggattgcagagaacgtttctgatacacaatcagacattgttgcttgagctaatccatgcgatttataaacaggaacagtcgatctcttgtacacagcttttgagatttgaccgagggagtagatgtagaggtaagcaaagtaagcaaagatgaccaaagtaattaccaaaaataaaaagtttaggagaatgaaaaagacatagacaatttaccaactagaactgacacagctagcatcaatagaccaagtacaggtgcaagttgaggagatagagtaaataggatacatattgttccaaaaacctacaaaagggataacgcataagccatgagaactgggcattcttgagatgcaacaggatagtctttgtcatttatagaactccaaaaatagcagcagacaccaacaccaggctaagattaaatctgtattcattatgaaaaatgtatgtacaaacacaaaaatctcacattt

SEQ ID NO: 36390 - DNA, 4548 bp, Arabidopsis thaliana landsberg
ttagcggtttcgctattaggatgaagctgtacaatgtaagtctgcttttgcaggatctctgacgaagaagaacaaaatagaagaaagataatgcagagaaagaaaggtttgggttccattggagagagttaaaaaaaggagttggtttagtgtagttgaagtgcatggttttagagaagaagaagaatagggtatttaaagaagaatgaagagaattcaaaacctgggatttggagtctaaggaagaagatgatgaagctcgtgaagagtaagagctctgcctcacgagtatcctttgtatgttgcagaggtaggagcttcttctcttttattttttttctaagacatgaactatattaactgaagctgtttaaggtttttcacttgtaaggcttttttgtctgccttgtctctgtgtctctgtttttcctttttttttccttgttcacgagatgttatggttaggttttattgcgtatagtagtttgtgtagcctttttcagcaacaaaagattttgaaatttatttggtttccattgaagttttaccaagccaaggaaaattcatttaacaataacttaataatcaaccattggccaaatatatgtatttttttaaaaacatactattaaacttagttaaagccttgaataggaaaatacgaccgttgagaaaggaattaaatgcagcagcgtggttagtgttcgttcactacgtgcatttatacacgcacgctcaacacgcctcgttttgtcatcgggtactacgtcacaacaaaacgacgtcgtacagatattgttatattgggctctgtacaacttataagcccagtactgattacacttataataagcccaatacagatcacacttgagggatgatgacgaatgattagtagtttctactctaatctttgtttgtttttgcagtttattgataaacatgaaaaccaaagaaactaactgttccatacaaaaaaagtttctcccaatgttcgacagaagagatttaaacccaaagttttttaagcgcggagattttggcatcctttcatgctttttcttttcttaaaccctgtggaaaactctctcttactttagaccttaagcttttgtcacatatcagttcttttatatcctcttgagaaaagaaaccccctaaactgaatttttaacatggaggatcataattcagggattccagtagatcttgaggagtattctgttaccaatttcaagaacatcgatgatttgtcttctaatagccgtgcaggagtatcaaactctgctactctacctgcaacaaaccataaacataaacattgaattctcccaaaagacgacgagtaatatgaagaaagatccatgtttttgatttgtatgagactaaccgtcgctgagaaccaaaactaggtcactgtctataacagttggtatccggtgagcaatggtgcagaccgtgcagtcttcaaactctgttctgattatcttctggatcagattgtctgttgctgtgtcaaccgatgctgttgcttcatcaagaacaagtattttggcttgtttcagtaatgctcgtccaagtgacacaagctgtctctgccctacactccagttatctccattttccagtactactcggttttgagccaaaaaaatcagtagaaagaagcgaaaaagacccgggaaaaagagaggacttttgatgtaaatagttacctggagagtcaagttttaggtcttttcctctaacaacgtctccaagctgggatttatcaagcgcctgtcagcaaagttgggtaaatctctagaatcaaactccaaatctcagagtttagtgtctaaaacataaacaagataagagtatcaaataacatatttatagatacctcccagattttatcatctgaatgttcttcaagtgggtcaagatttgctcggattgttccttcaaataatgtaggatcttgaggtataatcccaaggcgactacgaagatcatgaagaccaatttgagaaatgtcaatgttgtcaatagtaatttttccagcagttggctcaatcaatcgaaacaaagcttgaatcaaagtcgactttccgcttcccgttcgcccaacaatcccaatcttttttccacccggaaacacacagctcaccccatggagtactgttggaagattctcagcataacgaaccttcgaaaagaacgaagcaataagaaagcagggaaaggaagtgcagagaggtaataaaaatagtatttttgaatagtaccttaacatcaactagctcaattgttcccgttgcaggccacgaggaaggcgggcggaaatcttctataattgctggggcctctcctacaatctgactgtactgataaatcctttcgattgagattattttgttttcaagcttacaaaagctaagtatccatcgtgatagacgtccattcaagttaagtccatatgtcacagcaagacctgccatgcctattacaacaggaacatcaatattagaaaaaccggctgctcgttgatgctttttttttgttatagtaactagagatacttacttggatcaatggttccatgtggaaaactgacgagtaaaaccatacagaaagcaaatacaagtgtggaaagtaattccatgcgtaaacaaagccattcgatagcagcgatactgcagaagaaaggtcgaacaaaacaatctagaagataaagattccttttgataaatcttttttcctggccaaatcctcttattgtggcagcaccagcaattgattctccaaaaagatgaattattggagacttctggatactaactatccgaaccaattctcttgaagaagccatgtaatatttctgcattttatttcaatataaactaaattacgaaaacaatctttcacagttattcagaggaaaaatcgaaaatagatttacctgcatccaaaagcaagcaacagctaccggaacaacaagaaggaaaacttgccaggtaacattggtcattacagcgacaatgccacagagttgtattgttgttgaagcaaacccaccgagtctaaaaggaatgtcaagatctacaacactttgatcaatagaaacctgcacatcaataaaatccccaaaatcagaaaagtaacacagaaactgtggaatttggttataataccacatctacatacccgattcaaaattcttcctgcaggagtggaatcaaagaatgacattggcgctcggaacacacttctgagcatatttaagaacagtttctgtgcagctgcaagaccaaaagttgcaaccagagcagctcgaacaaatatgaacacagagctcccgaaagctaaagccgtataaacgatgagaagcagagtaggatccactttagattcgtcaccttcagtttgaggatttgcccaagccatccaccaattactagcaatctgaagaaattggaaagcagcttgtgcgagtataataagaggaatcagagcccctttatatgcagcacccatgtatgacaagtacaccttcatgctgacttttccctttactcgttcctcttcttgaacaagctgctttttgcgggaacgcttagctttcttcttcttctctttgattgcctttagatctgaagcagatcctccctcttgtacttcctttgccaaagtctcgatgtcattttcaaaaacatcagactttggattatgcaagaccaaactatcgcgaataggattttcatcagagtcttctgaggagggacttgggatgtccattgcctcgattgcttcatggtgggcagacactaaggccttaaaatcagtacctgcttgcagcagatcatcatatttacccgattgaataatcctgccttccttcagaacctttgaaacaacacaaataaatatttcagagcttatcataacggaaacagtttggaaactccttcaataattttacctttctgcaacaatagagataagttcatcacaggctggtaagctaaacacctaaaagagaccctttagcaattctaaaaggaccaacagtagccagaattaatgtgtagtaaaaccgagaaaaaagagtttcttaccaatattagatcagctgcagggagaaactcaacttgatgcgttacaaaaaccacagttttctcagccaatgcagatagaatataatcctgtatagccattaataaccgtgttacgtaaacgttcaaactcaaaatatgaaaacatgacttgaatagcttcttaccctaaacaaatcagagccagtgtgtgcatcaagagcactaaaagggtcgtctagtaaataaatgtcagcatcttgatataatgcccttgcaagttgtacacgctgtttctgacctccactgagatttatacctctctccccgataatagtttggtccccatgtgagaaaagctctatatctttctttagggaacatgcttgtatcacattcttgtactttgttttctccattggactgccaaatagaatgttttcttcaatgttaccagactgaatccaagccg

SEQ ID NO: 36391 - DNA, 4244 bp, Arabidopsis thaliana landsberg
  unsure (1)..(4244): unsure at all n locations
tttcataccaaaatatccagagaaagtaatcaaatcagaacttgttatatctcagagatgcttacacagagacagaggagccagcaccagtaccaaacaatcctgatatcagaatcgcaactccctgattcacaaaacaaaacataatcacctcagaattctttcaatatcgattcagcaacattataacttcaagtatagctgagttacctgccagccaataccgcggctgagaatagaaggtggcaacatcgttgcacttgcgtatcttgacaccgcgacaaaagcaccggttgactttaaagatcagccagacacagaataaacaagaaaccaaaatgaataaacagaacaacagagcataatcattatattttgaaagattaaaatgtgaagaagataaccacagacctcaactagagcaacaaaagaagccatcatcattgcaaaagcttctccagcatcaaacgatggggcaccccactggaaaggccatggaactcttatcctaagtacaaagaaactaatgttaacagcgnnnnnnnnnnnnnnnnnnnnnnnnnnnnnnnnnctattcgttcatgttcttttgttctgtttaaactggaaatttttagaggaaatggtattttgggagctacatattttgagctttgttgtaaccacttaccatggggcagcacctatgattccagcacgatctgtccggcaacttgtttgagtagttggtgcagcaccattgtaggccccaccaactgtaagaagatgagcatagatccacacaatcaccaccgcgaatatcacagcaaatcggtcaaacacatttttccctgatttgatcacatgaggcaggtactgtaacaggaaacatgaacacatgaaatcaggtaagttaaaaaaaaaaaaaagattttgggagttagacaggattaatctgtaagtaagttaaaaagattacctgtgaaacgaatactagaataagaagctcaggcagtccaatctctatgcatttagcaacctaaaatgtaaaaaggatatcaacaactaaaagaaataagagtttctggtctgctcgtaagtgctcatatagagtagacttacccccgggaaaccaaactcatacagcccaaaaccaacaagacccaccagtggaacagctgaaataggacttaagaacctgaaaatgaaatacaaaagaaattacatcaccacatcgtcattgtaattctgaagacatgtctgagaaatctattgctgtgtaagcaaatcgaatgtctgagaccattttttcctcgagactaacctaacaacattacgccagagaccactgaaaccaagaatcatctgcagggtagaagcaacaatcaaggcgccttgggttgcccgcattatcctctcaaagcgctaaacaaagcaatttaaacatattctttgttgtcataatagcaccaagtaagggccatagagatgaaatcaaagaaagaaaaaattcccatttcacaatgataaagcaggaagtaatcatacatctatagggttcgaggtatcactgaatctgccagagaggattatggatatcgttgttggcacgaatgtgtaggaagctccaacaacagcaggcaatctagtaccgaacagtgtttggagcaatgtgttgatgccagcaacaaagagaatagtctggatcacctttgccttctcttcctgaaattagaacaatagaaaatcaaaatcattttcagtcactgacatcatttgattcatcttcctctttactacaagttaaatcgttgaggccttacatatccacctcccatctggggaacaagagcagtaggtatgagcaccgttgtcccaagcatcacaaggtaatgttggaatccaagaagaatagcttcagctgaaacacaagcatgaaaaatgtaagtctttatgaaaaactgcagaattccaaaggaactcattgcaaacaccaaaaattgtatgtttcaaaagaagatagaagcacagactaatgtgattgaacatatgtaagagataatggtttccgacattgtaaaaaactggtacatcaaacaaagcttatattcggttcacaagcatcccacccagagattagttaacaacagaagaaaaccacaaatttgccacagatgcaacaaattaggaaagaaaatctccagcttaaaagcaaactgggaatacaaatcttactaaaaataaaggtctaaacgagtaaaacaagagtaaatctcaggtcgagacattgttaagaagaacaaagccgaataaagagaaaaaaacctaacatctacacacaccaccgacagataaagccggaaaaacctcgaaataaaaatcaaagagctttaatttcaaaacttagaatcagaaaacaagtaggaagaaggtctcacgccaaggaggaggactggtgatgcaataagaaatgttgggaagttgatctttaggaggatgaggttgtggttcgtctgctttgggtgctggagctccaccccctgccatgattccttctttaaatctctctctctatctgcacaaacacaaaaaaagcaccaaactttagtatgatgaacacgaataagaaaaaaaccagatcggggaatctactagcaatgtgtaagcgaagcacaaatcagtgcataaaaaggaattgacaaatcggaaaaagaaaagtgataagaaactcacatcaatgggagcttgtgggaaagagaggaagaagacgaatgaagtaaaggagacgatgagagtaaacagcaagccagagagagagagagtgagaggtttaggtacaaaaggtaaagccacacatacacagacacacagagagagagggagaaaataaaaatgtgagcttttatttatttttctgcaaaactcgaggtgtaaaaaaggagtaattaatattggagtcaataatttttatgaatggaacatgtaatgtggacaaaatattgttgttagcaaaattaatgaacaatttattaactaaaggcggttcttgatttggtgattggagttatagatgagaattagatattactaatattcctcctttagtttatcatatgcttaaagctaaccaaatagtatcagatttatattatttttgtttgggggtcaatagtaatcatggattttgaagaaacaattaggaagagcggtggtgaaaataacgccgtatgaaattttttaataaataaaatgtttttgaaagaggagtaataaatgattaattaataaagaaaataaagatgaaagtgatgtgaacaaaggaagagacgagaggaatcttttcttctttaaagtatttttattgcattttgaaaagtcatagtctttttcttgttaagtaaagtttgttaaagttttaacctatctctagacgattgacaaaaacaaagtaaatagtgagatttgttcaaatttcaataattctgttgttgaaacntgtcaaccaataactcatgcatcacctttttcatacacatttctaagtgtcgggttaattatagttaaaaagaattaacaactttcttatttcgattaatacgattttcccaaataatacggtagctgtgggatttttttcccaagtttagtggtaatagtgagattttgatgtttgacttccaaaactcccatcttatactacactttttagttgaagttgcaaaatatatggtactcaaaaattatgttttatacgctttggtctaatttcgaaccatcaatattttactttactctttttaatccttttctattttttttgttcaatgtccagatgattttgatttcaagtcgaatgtacattagtatatataaaattccttgcgatttctattaatgacacggatgttattctttgtaggcatcatttgaaatcatccatctcttttggttttatattaagaataatataaaaacgattggagaatcttattaagaatactttattatagtattgtgctgattgtatacatacgcatcaaacataactagagataccgagaaaaaaactcagaaaagataattgtcacgtctacttttttttcttgtagtcccgtgatctatatataaaaacaatctaacaaaacaattataaagatactttaaccccccagataatttgtaatggaacccagtgggacattatatattctagtggctgaaagagtgataggactaaagatttaatctcgacactaaacttcttt

SEQ ID NO: 36392 - DNA, 1797 bp, Arabidopsis thaliana landsberg
  unsure (1)..(1797): unsure at all n locations
tgtaactcaaaagacgaatctaaacaacaatagagagtatgacaaaaaaacaatcaaccataaagagtttaataacaagcgtctataaggttttcgttctaaataatttagaactctcgatctgttttattccttcttaataacaagagatcacgacatacaaaaaacctttgatcccttaagataatctctatttcgttttcttttgtcctttaggttttgagttgcaatgtcgtcggatatgcgtgacgagcgtttcttttatcatcgttatctttccgttacaaatagaacaactccaactacggcaacaaacgtgccaacatcaacatcgaatatgcgatctacgagtttgatgacaccaagggttgcacatacttcaatgtcatctggaggagattttcccgacgaccgttttttcaatgctcgtcatcagtccgctacggatagagcagcttcaaatagaagcagggcgatcatgcccatatcgacaacaaacgtgccatcatccacatcaaactcacctagggttttgcagacgtcgatgtcgagacgagttacctcaccaatgtcctcgtcgacgaggaggagtgtgcaagcatccatgtcagcacgagaaacggtatcgtcgtcgacatcaacgaggagcatgcaaacgtctacctcaacaccggaaattatgcctacatcaccaagaaatgtgataacaaggagcgaagaaatagcaaatacattcactcaaacttcttacatacaatttgggagcctgtactgggagacgaatacaacttattcaactagaagttggacgaccatgcccacatcgacaacaaacgtgtcatcatcaaactcacctagagttttgcagacgtcaatgtcgagacgaggtacctccccaatgtcctcgtcgacgaggaggaatgtgcaatcatccatgtcaggacgagaaaccgtatcatcgtcgacatcaacgagtagcatgcaaacgtcaacgtcaacaccggaaattatgcctacatcatcaagaaatgtgataataaggagcgaagaagtagcaaatacattcagtactcaaactccttacatacaatttgggaggctgtgggagacgaatacaacttcttcaactaggattaggactaccgtgcccacatcgaccacaaacgtgccttcatcaaactcatctagggttttgcagacgtcaatgtcgagacnnnnnnnnnnnnnnnnnnnnnnnnnnnnnnnnnnnngtgtgcgagcgtcaatgttggcaccaggaaccgtatcatcgtcgacgtcaacactagagattatgcctacatcggcaagaaatatgagtgaagaagtagcaaattcattcactcaaacttcttacatacaatttgggagcttgtgggagacgtttaaaactgtaacaaagttgtcgcgtgtagcgatggtggagaatggagagtgtgtgatatgtctggaggaatggcgcaaaggtgatatggagacggagctaccatgtaaacacaagtatcacttggagtgtgtgaagaaatggttgaagattcacgccacgtgtcctcagtgtagatacaaaatgcctcttgaagctgaagactagtgattatgatttctgaatcttctgactcagtatgagggttttgacatcaacttttgatttttttaggggaaattaatgaattcaattggaatcatgttttgtagaagcatgattaggatctattgttgaattcgtatgtgaagatcatattcccttcgcatttgtcaatattggttacattaccaaat

SEQ ID NO: 36393 - DNA, 2661 bp, Arabidopsis thaliana landsberg
tctaaggataatcttttaacgaagtctctatatatattctcatcctgctgactgattttggcctttgacagttccatcatcacccactgctacatcctcctgatcatctccttcatcattctctacactcttcggcttgcccacatctccactcttcttgatggctgcatcggtggctcgtttcaatccttctttggctgtatccgccgcatgacccaatgtcacattcggagctttaccatctgtagttgtccccatcgcctcttcctctgacttctctccgttgttcccctgcagaatatgtgaaaatattaagtgaaaacagctcaacgatttttgtatgcataattaatctatcttcaacaaatttcaaaaacgtacgtgggatgcgaagtaacgagagttagtgatagtaatgactccatcaacaacagatcgagaactgttgttgtaatctatgtgtaatgaagaagctctatgtatgtttatggctcctctctttgctaaaaacatagccgccattttctacacttttcaattcattatctagctctcgctctcatctatatacacaccgatggaagtactttgaggatcgagttagtgtcgggagaagaacacgtggctaatcactgtgcttctcacgtgtccccagagcaacagaagcaaaggctgattcagagattcttgtgctaaaaaaaagtgactctagtcttcttatcatcatcaactctaagaaagaaaataaagggcccgaaccttataagcccagcccatatgttcaaaatgttgcaagtgttgtatctactatagactacggactaccacctgtaccgctcttccgagttcgcaagtttctttcgtcgaaaatacgtaggagagaccatcagaccaatatgtactaatgtcgatatggttgaagctttttggtattctcatatcaaatggaaaatgaatttgcaattaagacctgatgcaagatttcagacttttcggtattctcatatataatggaagcatatgattcgttgaatccgattctttccacaaaaccaactgttctctaatgcgtttttcccggggataaattcatataacttcaaatcccaaaaagaattaaattaaacacgtcggcagatacgaagaagcaatatcttcttttaatgtgaggaaaacgagtagatacagagattcaatttcgaacacgtattacccataaaaacgacctctctctatcattaagacaaaaaagcttcacactttccttagcccattataaacgcttcatttctatataaacatctcttatcttgttgaaaatctctcgcagcttttgaaaaacatgacctttctaaaaatgaaaagcctttctttcttcttcaccatcctcctctctctctcgaccctcttcaccatctccaacgcacggaagtttaatgtcggaggcagtggcgcgtgggttacaaacccacctgaaaactacgaatcttggtctggcaaaaaccgtttccttgttcacgacactctctgtatatatcatctctctctctcactctcttacccgtttgtgtcatttcgttaacttagagtgtacttttgttttgtctgaaactcaatttcgattcttgcagattttagctacgctaagggagctgactcggtgctagaggtgaacaaggctgattacgacgcttgtaatacaaagaatccgatcaaaagagtggacgatggagattctgagatctctcttgatcgttatggtccgttttacttcatcagtggcaatgaagataactgtaagaagggtcaaaagcttaatgtcgttgtcatatctgctaggattccatcaacggctcagtctcctcacgccgctgcaccgggaagctctacgccgggatcaatgactccgccgggaggagcccactcgcctaaatcttcctcccctgtttctccgacgacttctcctccgggatcgactactccgcctggaggagctcactcgcctaaatcttcatcagctgtctctccggcgacttctcctccaggatcaatggcgcctaaatccggctcccctgtttctccgacgacttcaccaccggcaccacctaaatccacgtcccctgtttccccatcctctgctccgatgacttcaccgccggcaccaatggcacctaaatcatcttcaactattcctccgtcttctgctccgatgacttcaccacctggatcaatggcacctaaatcttcatcccctgtttcaaactcacccaccgtttctccatcgttggctccgggaggctctacttcttcttcaccgtcagattctccgtcaggctcggcgatgggtccttcaggagatggtccatcagccgctggtgatatctctacgccggctggagctccagggcagaaaaaatcgtcggcgaatggtatgaccgttatgtcgattactacggttttaagtttggttttgaccatctttctgtcagcttaagaacacttgtgagacttgtttcatgtcggattcgatttgttcttgtttcggttgagtttccaactttgttttaaattgtttttggatcccagtttgattctgtattattcagtatagttggattgttttgttataaataatagacagttctaaacatgataactcca

SEQ ID NO: 36394 - DNA, 2977 bp, Arabidopsis thaliana landsberg
tattttgattaaaattgaaataggaagaaaataagaagaaagtgacaacaacagacaaacggctccgtcaccaaattgacgagagagactctctcctttcaaactctttttcagtttcaacttcttcgtctccctcccacaccacctctacatatatacattcgattcacagtctatatatcttcttcttctatgcctctggcgtttctctcgcatggcgggtctacactcttcctcctcctcctcgaaacccactctgtcttcttctccttcttcatcatcttcctcgcgtcttttcctgctcgtgacccttcttcctctctctctcgcctgtttcgccttcgttctccaatggcgtggcggtctcgacgaccccgttacgcattggtcaatagatcatcacgagtttcccggaatggttacaacccaagagaaacggtctctgcgtcgttcagtttctgattcgggttgcgttgatcttctaggtcagagtcgttccccttcgtttccttatttccggaattggaaatttgattaccactcggatctgaaacctagggtaagcccttgtgattcaattttgggttttcctgatttaatttgatctaagcgtgttcatatcttctgatttccatatatcgttgatccttggtactttgattatgaaaagattgtgactttgtgcaaaaatggtagatatgtataacgacgagcacttctgctgggttagagcaaacattgccatggatattctatcacaaagttattggagtttcaacattttatctatttgttgaaggcactgctgcttccccaaacgtttctcgagttttggagacaatccctgtgagctctggagcttatgaatgatccctttatttgtttttctgacttagtattttcttactgctaatacgttctgttttgcagggtgtaaaagttatttacaggacaaaggaattagaagaaaaacaggctaaaaggtatttctctggtctgcatctttgtggatattggtaatggatctgctgtgatttcattgtgtcacttatgaaacttgggattttgttcctttacttttagatctataaatccactaacgtgattttttcaacagccggatatggaatgagacttggctgtcgagcttcttctacaaaccgtgtaactatgaattattcgtgaaacagtccttgaacatggaaatggcaatcaccatggctcaggtatctcttactttttaccatatttgttgaatatggtttgtggtaatagcactagataatgtaaaaaagccaacggtctctcagactctcacgccattttatgcggtgtatttaggacgctggtatggaatggatcattcatcttgacactgatgagcttatacatccttctggaacccatgaatattctttacgcaagttgctgggaaatatttctgcagacgtggatgtagttatctttccaaattatgtgagtcttacagttgtttggatttcattttttatcttgcgaaaaaacttcttctggcttcatcagcattgtctgtttttcaggagagcagcgttgagagagatgatatcagggaacctttcagtgaggtataaaatttatcatctgaagctattttgccaacatgagaaattgttcacatgattgtttgtttacccaccataggtacattgctatctttatagatctaaaaactactctatttgttgcacattcattttattgtaggtatcaatgttcaagaagaattttgaccatcttctgagagatgtctactttggaaactataaagatgccactcgtggaaatccaaactatttcttaacctatggaaatgggaaagctgctgcccgtgttcaggaccatcttcgtcccaatggtgctcatcgatggcacaactacagaaagagtccaaagtatgctcttttctcgttaaattgtctatcatttgactctttgtatctggcattgcttccctctgtatataatatgttagattctactgcggtttattcaatagaagcttatagtgggacatggacgagcctaaggctgtcacttacaattgttttaaggtgctaactattttgtggctgattcatggcatcttttctacagtgaggtcaaacttgaagaagctgccgtgctgcactatacttatcccagattttcagatcttacttcaagacgtgatcgttgtggctgtaagcccactaaagtggatgtcaagagatgtttcatgctagagtttgacagagctgtgagtggagatttatagttttttgctttatatttcctgcatcgttttccgaaatatatagtcacagctcttggctatcacatgtaggcatttattattgcttcaacagcgagttcagaggaaatgctgcaatggtattaatatagatttaaatataatcactgctcttcatcccattttcaactgctgcaatctaaccagcttcactaatacaggtacagagagcatgttgtgtggactgatgaaaaattgaagttgaaactccttaggaagggaattctaacccgcatttatgctcccatggttagttccacaaactcaaaccacgctctttatttgacatgaacgatcagtgtttggttttccacaagctatcatctcttacaggttataatccaagagctaagagaagcgggtgtttttagctctgtggtaatcgcagctcacaagtctccttcgaagaactcttcaactgctgattcgacatcaggcattacccgagaatcatctcaggaaactggtaagaggagggtgttggaattccatcttgatgttgacggtgaatcccaagcatcagcggtaccaccacaatcgcctccaggcttggaagcaacccagatggaaccataatatgaaaagtgttaacaaagggtgggattttttagaatgatttatgaacagttttgaacctgagctctggtg

SEQ ID NO: 36395 - DNA, 1564 bp, Arabidopsis thaliana landsberg
atatggttccggaacacaggaagtatgtccgggtttttttcttcccatcaggttggataatcatggggggggtttgtatgcacctaaaaggtctagtcagtgttgtttgaataccatataaccagatattgattgatcatggtgaacacggtccttagtttcttttttcagtttctgttgacagcattctttctacctttgatacttatctgactgatacctttgacacacttgctgcagttcccggtagaaatgcgtgtgagatcaaaatgtttcaccaggagaatgctgggttaaatgttgagatggccaagctcgccttctcaaaaggcatatggagttacgtttgtaagatggaaaacgctctttgtaaatacatagcaaccagtcatagaacccaaggacccattctatctgctgtcaccttaatgaaagaggtgagattcatatgaaaattctgttctgtaaaatggtatttagtgtcctgaaaatatgcttaaagcaaccggttgggttgggtcttcactgacattgattgttgtatcttcaggttccatcagagttagaaactgggacagataatgtcacaggctccatggaaacaagtagtggtgaaggagtgttgagtcatgttgtagccgccaaacagaagaaaaaaatgagaaagccatcaacgaaactgatagcaaaaggtctagtacttgtgggcggtgcgatctgcttgtcccgtggtccctcagccttaggtgctaaagtcgcattggcttacctcttgacgaagctgaacaaacgtggaacttctctgaatcagaccacccagaacaccaccatttaagtaaatttctcctgaactctggtagcttttggtatcaaattgttgtaccacagtagtactaccactagcgtatacataatgcaagtcggtgttgatatgaatgtaaaagcatacattataaacatacaagcctaaaggttatcattcttgtaattgtatgtactatgtaaggtctttatccttaaccaatcaatctttacttgattcttgagtcactacaaattgttcgattgtagttgatattgggacagatgaacattagtgatattaaagttgagactaaagagaaagcttatgaggtctacttttagcccttctttttggaagttgtagcaactatagctcaaccctagatgctaagcggcgagtgaagagtccaacaccacaataaatagaagacctttactatgatattatctcattacaaaactgaaacgtttttttatcttgacaacaaaaggaaaaaaaatgaaaagaataacaaaacttttggcctcccactctctcaaaagtttgatggccaagaaaaacaagcgttcccaacagaagaactagtgtctcaaaccggagtaagatccatcggcggtgaagagattgttggaagatcggtggaggaagataatggtatgtataggcattgaaaaatcccccgacgcaatcttatggtgaggctgagaaaaaagagaaaaaggaagaaggacagaaagatgttggtaagaatcttccggc

SEQ ID NO: 36396 - DNA, 1715 bp, Arabidopsis thaliana landsberg
tcaacaaaacttcaaattgtataaatgaggcagcaaactgggatatttacctgattccaagctgtagattaagcataagctcgtaattccggtggcctttagatatcgtctcgccttgcttcctccctgcccttggcaatctcataggtgcagggctcggtctcaggctctgaatgaacccttcagcctctagtctcatcatttcagcatccaagtccctcctcgtggtggaatcaatatcagcagcaccttctccgctttcggttccccacatattcatcttctcaaacgctctatctacacgcacacttaccctcccgtcaacagacatcctcctcggtttctcgacacgtttggaagagttccaaacagatagctttttctgtgaaggcaacacaggaactctctctccgctgcagatcttgtactcactcagattagtaaacacgtctttaggatcccattcaggactcccgtcgtctcctgatggataataaataccgttcatctcttccggatcattagaccaatgaccaacgtagaaactcccatcagcccatttgaaagtaccgtttcctctaggaaaaccgtcatcccaaaatccgtcgtatctattcccatccgtccaaataaaagtacctttgccacagatcgtagcgttcttccattcccccatgtaatagctcccatctctccactgatactttccttgggcttcttgcaaacccctcctccattcaccatcatacacatctccattcgcgaaacgcttgattccatgtccatgtttcaggttcatcacccactgacctttataagtatctccactaggacctgtgtaaaggccaacaccatccatgtatccacttttgaattcgccttcatatgtggcaccagaaggccacccgaacttccctcttcccatagtcttcccgttgtaccagtcaccaatgtacatgcaaccatctgtccaaagatacttcccatgcccgtgaggaaaactatcataccattgccctgtataatagtctccattaggaagtattctctctgcatggtacaattcccctatgctgcttctgttagtgctggtctcatcatcattctcctcagtcgtagtagtagcatcatcatctgtctgtggagctacagataccgtcccaaaaatgctgtttgcacgcttcttcgcttgttgggtctttcttacggtcacctcccaagcctttagaacacagctttgttccttgctcatcttcttaaactaataaaacttttctctaagatacctatatgtatatcctagaacataaactctgaaaacatatttgttcttgtctaaacaacaatcctatcaatgtacacatacacaagagaaaaccatgaactctgtgcaaaagaaaaaacaaagtgtaaacctaaaaccattaaatcaaaagcagcatgaagaaatctgcaatggtctttactctgtgacttcctgtctctatgccattgaatcacaagaaaaaagaatgttttttggtcttttagaatgcaacattttcggagtgaatgctgatatgaacaatcatggaaacctaacaaagaatcagagagagagaaaaaccaatggccaaaagagttaagggatcaaaaaaattctctccgacatttcattttttgttgtcaattcatctcaactatgtatgtgcgttaaagaagaaaccaaatattct

SEQ ID NO: 36397 - DNA, 5289 bp, Arabidopsis thaliana landsberg
tatgcaaagctcacacaatggtatatgtctccaaaactcttatggtgtttgagtgactttaaaatgtctatcttgtctgattacaccgtttctaactcactttcagctggttgagtgtttgcgttggagggtggataatgaaattgacagtatcctatctgtgagttaaattcattccctctttccttaatctgttcagatttgagagctgaattttgatcttttctgttttttggtttccgtagaaaccaattgttcctactgagttgtatagggatgtacgagattctcaactcataggaatgtcaggttacaccaaagaggtagcttccccataatgattccatttccttttctgtttaaaaacagattctctcttcttgattgcttttgccttgatgtttagggcttgccggtctttgctattggcgtcggcctcagcacatttgacaaagcttctgtaagatgcttcattgttttctcgtacttttgataatcagatgagaaacaaaaaatgaatgtgattctcttcttccacatataggttcactactatgtccaatctcacatacaaatcaatgaatatagagaccgtgttttactggtgagtaaatggcagatggctagttacactctctctttttgaggttctgtctctttatgtaatgagtaaacactgttacagccttctatttctaagaagaatgggaggccaatcaccacctgcgtcaaggttctagacatgacggggttgaagctttcagctctaagccaaatcaaggtatgatgatagtcaatgtctgcggacaaagttgcttcgtgaataatgatactgcaagatgttgatcaattcattgacatagttttttattaacaacttttagtgttaacacattaatgcagttagtgactatcatatcgaccattgatgatctcaactatccagagaagacaaacacgtactatgttgtgaacgctccatatatattttccgcatgttggaaggtaagcctctttgattctcttttgttagtaactcatggtgtttagctacttagcacgtatgtgtatctcattgagctccttacaggttgtaaaacctcttttacaagagaggacaaggaaaaaagttcatgtcttatccggttgcggaagggatgaattattgaaggtatatacatatatgcatctgatttcttatgatcttgctgtgtaatgcaaacttgtctaaaaatcttgtggttcttgtagattatggacttcacatccctgccacatttctgtagaagtggaagctctgggtcatctcaccacactcagagcgcaaattgtttttctatcaatcatcccttccatcaacagctatacaactatgtgaagcaccattatgaaacccaaggacaagcagaacctgcaaagcaaggatcattccacgtgggttttcctgagcctgaagctgaacgttgtgtgatagccaaaaccatagaatcggagctgcacaagtttgagaaccgcaacggtctggccgtgtccattgatgacagaaaatccagtcatgaaacactggcaaatggtgacctctgaatgcttctgagggaattccttcagtgcctccacaactgagatatatattttacaggtgagctagcaattcaaatgagtaagggagtactgagctgtgtccgctccctagccatgcaaatgtaaagcgaaaagaagagaataaatcttgaactgaatgcacttctggttttatgtatagtattatttgatcctctaatgtagcaaatttatttgtgggaaatctacctctcatttccctaagcatctgtgtttttggtgtttgatctgctctttggctgaacaacaacagtttaggaaacagctattgcacacttgtcttgggaaatctaccgctcattttctaacacacttttattgcatctctctcaagtacaaagttacagtcttgtgacacacacatgaaccatatacataagctttgcgttataaaacaacagctcttagcttcagagtgccgaatatccgattgtcttctccgacctgtcaacaagttgaaggtaaaagtattgtgttggaagcattaattgacatgtaatctcttgcttgtgctaaggctacgcttaccagagttaaagagggggcttacatgaactcaaggacaagtgctgatgctcctcctcctccgttgcatattgatgccactccatactttcccttctttgctctcaacacctgaatcagaagtattcaaccacattttcagtgtggattaatttcaacactattgtcgcttgatcttacgacttacccccaataatgtgaccaagatacgagcaccgctacagcccaatggatgtcccagtgaaacagcccctccatgcgcattgagccgttcctgtttatgtatacatacataatcagagactgaaaattaagatctgctacatccacaactgtacttgtttcatgacttacaggatctaatcccagtagtttctgattggctagagctaccacctgtagggaaacaagccagaacagtcaagacctctttatacataccgaacaactatagaacactgagagctcagcatgtgcgattacagaaaatgcttcgtttatttcataataatccacttgagatgcatccaaaccagcccgctttatagctttaggaatagcaagagctggcgtggttgtgaataactctggtgcctgagcagcatcagcgtatcctctaatcttagcgataacatgcagtccaagctcaagagccttctctccactcactagcactaacgctgccgcaccatcactgtccaccaacgtaaaccagagccaataagtggctgttggaagtaaaccagacaaaatgcatgcagagttacagataaagaaacaaaattgagagataaaagatgaccttatgcttgatgcatttccagcagtgactgatcccccatcctccttgaaacttggtctaagcttttttaacttggctgcatcaaactggttcatgccaaacaaagttaagatcaatcaaggctatcccaagagaagcagtggttcctaaactatttaccttccccaatccttcatccttgtcaataacaactgaaggcctccctcttccagtggaaacttcgacctatcaatatgagtttatgaacaatattccattacaatgccataaagtgaattcctggaatgcaaggaaaggagaggtgtaccggaacaatttcccaagcgaacaactgagtgttttgcgcagcaataccacgctcaaagctctggatagcataagcatcctacaaagagaaaaattttgtacgtcaaggaatagagaatcagcgagacagtctcatcatcacatcagtcatgagtccatgggaacaaactggaaagacagatcaagtttgaacatgagtgacctgttcttctcttgtaatacggtactggtcagcgcatatttctccacaaactcccattccaaagtcattatagacatcccaaagtccatctttcatcataccatcaacaacagtatcatgacctaatcgagaaccccttctgctaacagaaatcagagtaaagaataaacgagatgataaaaacagatggaatatgcctctcttgggtttgtttctacaagtttgagttaggaaactcaaaaagcaccttgcgtccgggaggtacttaggtacgtttgacatgctctccatcccaccagcaacaacaatatcattcaagccgagctggatactttgagacgctagcattacagctgaggttacaagtgaagtaaaagcagtgatatatacaccgttcgaatgatcatctggagtagaagaagagtaataaaaggttattacatttcattcctgcagcacaaactttgttgatagtggtgcagatcacagaatagggaatcccagcaccaagtgcagcctgtcttgctggtgcttgcccaagattggcagttaagacattgccaaagaagacctcttccacaagggccggatcaacatgtgctctcttaagtgcggctatgagaagaaacagtaagagaatgaaaacttggccgaagcagagagagagacagagagtagtcgtataactaaactaccttggatggctatggacccaagtcttgtagcagtcaaagacgagagggagccaaggaagtcccctataggcgttcgcgccactcccacaacacaaacatctgcacacaccggaactgaactgtaagtagccattactgctggatcaaaggataaatacatgatccaaccagaaaacagtagaaactgaaacagaacaagaagaagaaggagaaacagaaagaacctcgaggctgtagggaatcatcagagacaggcggagccatggaagtcaccgaagaaattatgtctgagccaattcagaaaatgcagagatgatgagaatcaaaagaaatatcacaagtttgagttcttggctaagaaaacgcatcacctttggtttggtggcagatgaggacgatcaagcttgtgttaagattacgaggaaacgagaaagagagagatcataattgagccaaaaagaaaaaggtggatatagagataacaacaaagtgtgtgtgtgacgtaagataccaatatcagtgtcggttccaccaccaccttggtatgcgtgatagctttgttgccagataatttcttccaggtgttttattattaagaaggtagagagttatgagaatctgccattgatggtagtttacctggagtttccatcaaaatgtacacacaagaagaaaaataaggaagagctaagtgatgagagcagaacaatgtatctcaaagattcctaataaattggtgagtagtcacaaaggcacacttggaaacaagacaagaccatactgatgttgcaattatactagtcacaaacgggtctcgtgttacaaactaacataaaataccctattgctacttgtttgttccaggaggatcaatcaactttatcttcaactcaatctcacccgattcaacagcacacagcctcagccacacactctgcaccacctctccgtctatgcaactgattgtgctctctcgagatacgcagttctctggatccggtaatactttcctaagcgttgtctcaccagaggacacgcggactacgtgtcttagtctggcaactgagataagaggttgaagaaatgagagaggcatggcccatcttgtcatctgccttgaacctatcttatcaaacact

SEQ ID NO: 36398 - DNA, 1276 bp, Arabidopsis thaliana landsberg
tatgatagtagatgttcttgatcctagtcttcccgaatttcctacaataaaggaactcaaacggattgtgttgatttccctgcgttgtgttgatcccgagctaaaagagagacctaaaatgggagatgtgattcacatgctccaaccacatgacttgctgctgaataacaatgtaaaaaaactttttgacattcagtttcttgttccccaagctaaatagttatccttactttgttctttctctgtttccaggcaatacagaaggctcagaagattacccggtcacatgaggtttctgcaataagtatcagacaatgagtcctaagcaagcaataaaatgattgctaatataggatcttctgctttgtattaactaaattaagggttccttttaatttaggtcacagcaggctcagctgtattgattgtgttttgcatcctttccaactttgttatatgacttccctatatatcacatgtgttgctattgatgcaggatagtaatcaggaagataaatttcttgaaccaaatctgtataggaacactgataaaatagaaacaacgattttcacaatcttggtttccaaggtacttgaataacaataaaaactagggatagtataatgaagttacaaatttattactttgacccttcttttacttaaatttccactgttgtttttctttttggaaaattatcttttacaagtttttttgcgtttcattaattctatgttacgaacacaactttttgaccaatttataaaatcggtgagttacaataaccggtagacgagtaaaccgggattttataattgctctgaagatcaccaaacaatctctcctcacgaagatcttcagcttcaaggacttttaaatcatcgaatctctctgtaagttacgatctccgactgactcttactgggtaaatttcgaaaacttgaaactgggtgtttccgaccgtcgaatcggattcgactagatatgaactgggttcaacgcaaaatctacctttataatgtcacattcgggctctacatgcttgattggtgggaacgatacctcttcagtatccttttttcctcactctatccctccatgcttcattcgttctctccatcgattttggtttatctgtgctccaatttcgatttaccctttcattagaaagatgcaagttttgatttttacatctttggtgatatatggtggcattgtgttctgttctcttgtgttgtcgtcttaagcattgtgtctgttcaattttagaatttt

SEQ ID NO: 36399 - DNA, 4300 bp, Arabidopsis thaliana landsberg
tttcgtcattgtatcataatttaaatagcttattgacatttaattaaaactatgccttacaaaataattgtaaagtcacacacacaaacaacgcaataatgatatattctgtttttatcaataataaaaccaattaaaatgataaaatgtacgtgttttctattttgagtacgcaaattttccacgtgccttactaatttctcatggcccaaaatgaaaccattccataaacgacattgaagtcattcgttgatttaattttgatgtgtacgtatatatatgagaatcgcctcttcaaaccaaatctcctatacgaatgttgtatttatggattaatgaatatatatgagacattgataaaactaaaaagaaaacccttttttaaaaaaaaacaaaattaaaggatggttcttttctttcttttttaataaatacgcctggtttaattagtgggccttactatcgaaaagaagatttcaaattgcataagcctattattgggcctaattatttcttgctaatatatgcccatttttgtaaaacggtgtgcatcgaatgggagtgagtgatccatggagttggagaaaaccaaattttccaatctccaccaaccataatttgcttacaatattttagaagtttagaataatttattctttacaatattttattcgcttgtttcggctcacccacaagaaatgtaaataaacgcataatcagaagtgattccacttatatacaaccgtacattttccttcattagacacgtgtcatgatctcctcggccgtcgtcaggctctcgtttaatccacgtcctgctgatgtcagcacgggccaaacactcctcctttgtatcctggctttcctaactatgagcttcgtgtgctgcctgagaactccgttcacggccttaacgtagttcttggagtcgtggtccctcaagactgaaccttccgagccataagctgcgcgttgactcagcgtttcgagcgggtgagggcggtttaaaaatgctcgtaacgccgtaggagagtaaccttcgttgctattttctaaaatgtacagagcgtttcccggtggaagccatgggtgcgtcggcgagacgctctcactcggctgtagaatatatactttccccatcggtgaatacaacagtttctgtcaaaacgcaaaaacacaaccaaaaaacttcaacatccgtatttttaatttaagatgttcaaaacgttaagccaaaaaggaaattatagtaagacttacatttttgttgagacaaggatgtgtacggaaggagccattcaaacgcttgagaacgagagcaacatggtcaggataattacacgaaaaggctcgtgggacgatatctctatgcatcatcacacagtgaacatgactctcgtcaagaccaagctccgctagaatcttctcaccaccacaaaacacaaacggtgaaccgaacgtgacaacggatttcatagcttcagagctaacgagtcctctagagataagcatcaaattcactattaatgagagactgcctccaagagaatgacccgtgaactgaaacttagctctatctccatgtctagacaaatgctctgttatttctggtaagaactgttcgtatattccttttgctgcctcgtagattcctctgtggactaatacatctgtgtcctgcgacattcatatcaatatcttaaggtctctaggataaacacaaaccaaaataattgtaatgtaacctaagcgattggataaaccgagttaaataaccgaatcaaaaaccaaatgtacatccctagccaagatcaagatctttacctcaaacttagttggctcgaagaaaaggtttgctttccaagaagctaaagaatcagatccctgcaacgacataacactaattagctagcagattcaaggatcatgatgtgaggaaacagaggatttgcttgaaagtagtaactttgaacacatattacctgaatcacaaagcacctagtgtatgtgtttggatcatcacaaacaaaccactcacaaggagatgattgtagcgactgtaactcccttgccgcttctagcttctcctcctcacccgcagcaaccaccgcggtcatggtagacgctgcagcctgagcagcagcagctgatttataaattggttctgaaagatcatactctttgcaagagtgaatgtaagacgcagctgaagcagcaatcttgtaagcagaagcagaagatgaagctgatcgttgagactgcttctcggattctaaatccggggatgtaataacagggacatgtgttggatcttgctctagtttctctctaagtatcgctgctttagctttcttttccaatgaagatgtcacaaactttaacccatagtttcttctcaaatcctcacccttgatctcaggtatcgtgtaagccaagttacacaaataagctaactgagaaagctttttagcctcagaccaagaaaccttcacaagcaatctagagaacgattctcgtccccaatcaccatttacagatccgtaattcgcaatgcaaccttcttcttcttcacaaccacacgtaacgtcaacactttcctctgcaacgtcactgtttccactctctgttttttgctctctcttccactgtctccttatctcaagcagcctctcgacccaatttgccttcttggctccatctagatttggctctgtctcaatctcaatctcatcgctctcttgctcgtcttgagacgtgtccgtttcaaatagcaacgtttttatcggacttgggattatagaactcgatatctgaaacgagaacactcccacaggttgaacttgttttttaccccgggcggacagacacagcaagaatgcgattattattattaccggagcgacaacacaagtgattgtcggaactcgatctccgtataccaccgccttttaagacgagatcttgaccggacaacgatctacggaggccaatatgttctcttaaaacgtcatttgccgccgctggagatgtagacgccatagccgtattaaacgccattctttatgaacaaaactccaactatagcaaacaagacaagacaaatagaatcctaattattaaacacaaataaacagagtataataaaagaaaattaaataaaaggaaataaaaacaatctcaatcagtctaactgttcttagtaattttttgttagaaaatctttatatatttcatactatttgcggaacataatgaaacgttttaataggccaaaaagtaagaaacgttttaattagtttgactagggttaaatgttggcatagtaggaatgtgttattatggatcgaatttaggtaattagccagctataaaggaaataacaggtattaaattcacctacgagccaacttaacaacctttgctatgtgtgtggggttcgagttggactgggtccgtcgtacagaagtgcttccacgtgcgccacgtacgatgtgctcatctttattaacatcttttcatttccttaacaagtaaaagtaggttttgtctaattcaaataagcagcataactctaatttcttattctcttgatttttatgttgttgctcgttatgataaatcactatgaacaacaacgaacattacatggaattatagttttcgtttattatagcaggaaataaacaaattaaatcgaagaaaaaaagacaaaattattgaaatgttgaaaaaacaaaacaaaacaaacaaaagcatatgatatgtgttgttcattaaaagacggagagattacggatattcacgagaataatttggaagaaacaaaacaaagattgttaaaacaatgagtctcgagatgcgttaattaccttatttctgagtgttgatcgatggcaaacaacaatggaggatcaaaaacagcgttgcttaaccgttattggatcagtcggagatcaggatcatcattagaccatgctttgaaacgatagcaaaaatcgaataccagatcctttgataagaaacgatcgaggcggagattccaacaatggcaaagaaatgtagatttgaatacgtacaatgaatcttaaacgagaaggttacaaagagtcagaccagattctgaaacttgttcgtgtttctgtaaaaagattcatgaatctctctctctctttcacagatgtagatggagccagattaatatatacgtgaaatgaaagaaaagagagagagagaatcaagtcacgtggatggagagaaagagaagctaagtaaggacgtaaatgccctcgttgtggtcaca

SEQ ID NO: 36400 - DNA, 1831 bp, Arabidopsis thaliana landsberg
ttacttcatctatgattcactagaatcagttttgagtcactatataggttttgttttgcttattgtgtgttatgaatgtgatagaccgaagtagtgcgggtactggtagcggtagttcgttaagatgagtttggtgtttttggacatatcaacagaacatgctaactctctcactagctagctttttcatatgcatagcttttcgagaaaacaaaatatattgcacgattatataatcaaattctttttttctcacgttcatatattatgtatatgaatatgatttatacgaccactcaattagtcacatgttattgatacttgacagaactcattatgtctgaatttggatttgaaatatactgataggtcaatgatacaaatatttgatactaaaactcaaaagagaaagaaatcgagtataagaaagatatacttacacgaaataaaggatagtgtggtttaagtggagtagaaagttgaatgaagcttcgttctagatatggaaggtccggtgggagaattagggttgtgtacgactctaaccaaatctttgggtttccttgttccaattctctatattcgtttcgaaagcaacacatacatatattgaatcttccatttattctctttcgttttcaagttcgacgtctctcccacttttcaaaagggaagtaagaaaaaatggctttcgtccatatattatggtatcatgcattgaaaaccatacaacatcaaaccaaaacacgagagggtgcattttcatgagtacccatttgaagtaattagacaactctgagatttgtcaatggatggtcgtagcatgctttgaggtatcaatgaacttagatgttaagagagtatactcgccaaaatacggaaacaagagagaacaaaactgagaaagccaaatccgtacaagtataagcctcacaacaactcaagaaatcagtcttggttgttcagaattctgatgagaaatacaaattctccctgagactaattattcttataatgtaacttggatagtataagaagaaaacatcatatagacgaaaaggtgaaaggtttgagtcgttgagcttgacccttcttatgttatgacggtgggggctgatcggcctgtgaactcttccatcttcgacagctttagagctaagtcaacctgtgaatcacacatcaacaattacgcatttgattagagaaaacccctttggtattagctaaatggtaatgagtcggaaaacagtttatggatttgaggttttatagtaagcaactgaccagaggagacaaagcttcctgggattctcggccggtttttgaagcatccttttcgtactgttcgatgtaaagccggatggttgctccttctgagccagttccagagagacggaaaaccttcatatggtttcagatataacaagagaggattagttagttttgatttctatcactttgttcttagctggaatgtatccaagctcaaataccgaagaaaaagatgacttacaagtcgtgatccgtcttcaaacaagtaacggattccctggtgcttcgaaatggatccatcaactggatctttgtactcgaattcatcagcactggcgacgcttgccacgtccgaacgaattcctttcacaatcctgaataaaatcaagagagaagaagaggttagaaaaacagagtaccaaactgatgagtacgtgttcaagtataaaaggaagggatttcagagaagtggaagtgtgtgacttgttaacttcaggaattgaagattgcaataagaccaaatgctccatcagttccttagctttacctgcgtctcatt

SEQ ID NO: 36401 - DNA, 4202 bp, Arabidopsis thaliana landsberg
acatgaagaatgtgtggagatactaacaaactgtaagaaagcattaccggaaattgggcgaataattgtaattgaaatgatagaaccccgaggaggcatgaaaaaccgatcttgcaaccaataactgactcagtgcagatctgactataattagcttaacgtctggaggcaaaaacagaaccaaaaaggaatttgaagatctagcttatgaagctggctttaagctcccaaagattatttacggcgcgtattcttattggatcattgaattatatcctaattgaaatgacttctttgaagttataatttaagaaaaattatgttgagttgtattttcatgctacactttgatgtaattccatgatattcttcgcaagtgaaactaaagatggcattctcgtgttttgtaatgattaaagttctttgttcccctctataacattgagctcaacaatcgttgggtgggtgggcgcctgggcgccggcaaaatttcatgaaacctacgcagtacgtactagttatccaaaatcgtaagtatgagatcctagatttggaaatgttcactaaagaaacacgagaattagcctaaccatcataatgatgatatcaccgatcggaaggaaattctataggagaggaaagacacgattaagcgacaatatgtaattaaaatatcatgaaatacggaaaaaatatcaaatactttttaaaaacatgtaaaaaacttcacaattaaacatacatacaaaatttggtgttttaaaggcaaaaaagaaagagattgaaaacaaagatcctttattaatatcgacaagtacaacacaccatcaaagtagaaacatcacatattaacataaaaaatatctaaacatagtaaaagctaaaaagcttaattattcaaacttcgagtgacaaattcctaagcaagaaacttagtatacgaacgtatttaagagagaatgaaactcaaaaactctttaatttgctgctggagtgaaataagcaccaatagcataaagaacatcgctagctttcccatggaaaccagcaagttttcctcctttaccgtcactaagttcatatttattctcagtctctattccaaaacgtggagaagtttcacccttaaaggtcttgaaggtaagagcaacgacgatttcgcttttataaccgtagactttgtcgacataaacctccattgatgttatgtaatcgcctgaatcaacctcaaagtcctctgttcctaacaatgtcatttttccatgctctcgcgtctctttccccccgtctttttcgtattcgaacttgacatacgctacaccagaatcaccttgaccaacataaacctttctcacgtgatcaaaagcaccatcgtcaaatgtttctccgtaacttcctccttgagctttaactttgttgggaggaggagtcaaggaggaagaagaggatgagattgaaacgaaataagctccaagagaattaaggtgtgagtcggcaaaaccatggaaaccaatgatcttcttgtcattaacttgaagtgaaaattgtgtaccatctccaaaaaattcatatccaaagtactgagaagtgtgtttgttggatttaaactgaattccttgaatgatattggaagagtcgtaccaaccctcgacggaaacaagatactcgtccggatggctaatctcaatctgcacaatcatgattataaaaaatcttgaattaacactttattcgaaaaacataattaaaccataataataaatatttacgcaccgttgaagtgccacctcttcctttgataccatggaagggtccttccttcaactgtccgttcttgacataatcaaatctaatttgctcaattcctagaccaccaactgcaacatgtatcttcatcacaccatcatgatcggttccgtcgtcccactgatttcctcctttgcctccttgtgcttccaacttttgtggactagaattggtgttggattcacttccggtgttagattctttgcctcccgtgttagtttttgtgccgtcagcgtcacttttggtacctccggggctagttccagtgctaccatcactatttccgatgccactagcaccagggttagttttctcgccaccaacgttattttcagtaccttcgatgtttgaatctgttcctccaccagcaccagggttagttccagtgctaccatcattacttccaataccactagcaccatggttagttccgccgctaccagtgttatttttggagccaccagcatcactttccgtatctccaattcccccggtgccaccagcaccagagttagttccagtaggaccatcattactttcaatgccactagcaccatggttagcaccatcattacttttcgagccaccagcgttacttttcgtatctccaatgttggaaacagtttctccgttgccaccagcactagcaccagggttagttccggcactaccactgctaggttttgagcgaccagcgtttttttcggtttctccgttgccaccagcactagcaccagggttagttccggcactaccactgctaggttttgagccaccatcatttttttcggtttctccgttgccaccagcactagcaccagggttagttccggcactaccactggtaggttttgagccaccagcgtttttttcggtttctccggtgccatcagcaccatggttagttccggcactaccactgctaggttttgagccaccagcgtttttttcggtttctccggtgccatcagcaccaaggttagttccggcactaccaatgctaccagaatcacttccgatgccactagcaccgggcttagctctggtgctaccaggaggaggagctggggcaaaatgagcgtcgatggagttgagagcatggctgctacttccaagaaaaccgacaatctggttatctttgggtgcggcaacagaaaagtagctactggttttatttccgtaagtcccatatgtccttttgttcgtcttgaacgttaacgacgttatgacttctcccgaaaacgtagttttgtagtaaccattcacctccgttatatactcatcagagctcagtgtaaactggaaaaacaaaacgttacgtgattaacgaacaacaatgtttactaaaatgtgaacactttgtttactaactccgtcaattttggtgccagcggtgccacgttgctgggacttaagggaggttccgtcgtattcgacctcgatagatcggatgacatcatcgaacgtaagctgaactctcttcaccttcgtgtgttttccgtcgtcccaagacatcgttgccgttgaattccgtttgatatcttctgaaaattattacaaaatttttgtccaaataagaagtttatacacttgaaaataataacaaaacgtaaattcttttatcctttttttaattggttactaatgaacataaacgcgtctctctaggaatgtaatggatcaaactcatattaaaaagagtaaacattatgcagttatagcttattatgtgtgtgcaactgatatcaacatagccacagaattgatttgttcataaatgcttgaaagtttattaaatacttcaactttaatacgggatgtcgtagaatttggggatggataaaaatattcaagaaaaatcgaaattagatagagaagagagagcgagtacctgagtggaggatgataggatcgagagtgaattgcaataattgagggtgggtaatggttccatatttattgccattttcgggataaggttagttactattatttgtcacatggcaatattaaacttttttggttacaaaaaaaaatatagaacatgcttctcacccacaaaatatagaagatgacaaaagaagttgaaaataaatggagaaagaaacaacaatttttgtggaccatttttgcagcaaaaaagtatgggtggaagtcatggaaggagttcacacaacaccgggtttttttttttttggatattgataggtttggtatgtatgccgtcacaacaaataacttgtgatagactgatgagatttgtatcaatgtttgttttggttaacggcatatatatatatgaacttttagcgaaaaaatgctagtaacggcggagaagaagtgtaaagactgttaattttgttttattttgcattaatgatttatttaaagaatgt

SEQ ID NO: 36402 - DNA, 3169 bp, Arabidopsis thaliana landsberg
  unsure (1)..(3169): unsure at all n locations
attgttttacttgaacctaaaccaaataagaaaggggaaggcttgataagacataatgagtaccatataaatgtggcttacatagagaagcacacagacacttacttgcaaagcttaaggaagttcttgcaagtaaaagggcatatattcgagggaagggcaattactatatcaccaaggtctagaataataagaactgtcatgtggaacttgttgccaaaccataagaaaatcaaacagagtgagtattcatttttattaacactcactaagaacagatattagagaacagagtcattcaacatgaaagaagccctaaatatctcttaaacagacaatcaatcaattaatcactcactcactactaaatcaaaacccctaaatactttccctaatgatgatttccttagaaaatggttacttaatcgctatcatctatacatcaagacgaacaaaaatacctaaacctatgcacaaatgaatcagcaatcgacgatccgttatcaatgtcttcgtacatcgttaatgaatagaggattatacaaagatactatcgatgagatattcgaccaaaccttcagaaacagagagcgagagaagaagagagggtgcgaagaggcgctcctggagtcgccggagaagctagagtactgtctcggcttttgagttttccgtttcgtttttcattatttcttggttcggcactgttctaataagcataggcccaataacgacaaaagtataggcccaatataaactcggcccagtatttttggaatagcgcattcattcccaagtttcggcgttttacggtatactcaaacgcagctcagcgtctgtcgcgtcttgaccgctcttttggtcaacgacaacgatcattagatacatatctcggcgaagcaaagccgagaagggaggagattcagatactcggaaaaaatgaaacaccaccataagctcacggtggcgttatgtctcatttgggctgcgacgatcctctacggagaaatgttcgccttctgggttccttctctcttcacttgttcttggcctcaccataaggtctctctctccaaaaagtttccatttttttcagtaacggatgctcaattttggagattcattgagtttaattcgaccttgattgtgtatttgcttatttctctctgtaatcatccttgtgttgctataaattgtataaagccaaggtttttatattcttattcttgagaatgtaatcgttctctaatcgaaaaatagcttagatgcaacattattagaaggccaatgtggaagaaatctctatgattcatcatttattctagtcactgtttagttgtgattactaaatatctgttagcttctttgtgttgcagagtgatggagtggagagtgatggaaattttactaaagtagccattgttactgatccacaggtgagctcttcaaatgattttcgatttttgttgtgtgttgttttaatggagtttgatcatctgattatgtgtttattgatgttgtttttatgcagctcatggataagacatcgtttcgtttgtcgtcaaagacacttgctttggagcttgctcagttttatactgatataaacatgcggagatcattctttcggtctgtcttgcctttcaaacccgatgttgttttgttttaggtgattatttcgatgtcggaccatttctttccgaggaagagtaagctctccttgttcttgtctttcacttgttcttctttctgctcaaaggggtcggggaaatgcttaacttcttattttatcagatggcaggagtctttaagccgattgaaacatgtatttggtttgaattcagaaggcagagttggggatatccctacattttacatccctgggaatcatgacattggctattctcgggttgcttcccataagcaaggcgtagtacatttatcacttttttttttctcaaatgtataacatatgtcagcgacctatatattgatataccttcacaattcaacaggtgattgatcgatacgaaaaagtatttggggtcagaaaccgcagatttatgattggaaatgttgagttcatcagtattgatgcccaagctatcgatggttgttacaaactttgctctgatcattaagatattggtttacatgcttagaatntctcctcaaagagaaaccaacgatctgttactgaaaagtgatgtatatgttgcaaggaattctaaaaaggatctggcctcagaagtttggaagtttgtacaaaatgtctccaccggtgtgtgtgttattcagctgcatcctcttctgtatatactatctttgtgaagcttatacataaaattttcttatcttttttagacgcacagtcacatcctagagttttattgacccacatcccattatatcggcctgatcaaaccccatgtggccctcatcgtggtagttctgtcattgatcaggtgatttgtcagctagaattgtatgtaactcaaaggattaacactttgtttatggtctaatgtatactgtttcatgtacagcggttttggcgccattctcaagatcaagaagtaatgtaaacttctacctttccatttcatcatacagaacttgagttagctttaaagatagccattttaacaggggacaactaattcaatgttgacctttttgtattttatattcctatgcagatatcaaaattatatcactccagaatcatctacgaagttactggagttgatcaaacccgtaagataaagttcttctgttttctgttcgtgtgaattaccatatgtgcttctatctctattacttcacatacagctcacactaatcccaaaccaatcatgacaacaacatttgtgttttttgctccagatactcgttctgtctggccatgatcatnnnnnnnnnnnnnnnnnnnnnnnnnnnnnnnnnggatctgtaactgaggtaacagaactttgtaatggccacaaaatatttgtatttacactatggacaatctttgatagtgaatatcatatcacagcatactttaggtactgtaagttggcaacaaggaaatatacatccgtcattcatgctattatctgttcccaaagccttccatcgaaactcatctgatccagattaaaatgtacacacccaattatgcttc

SEQ ID NO: 36403 - DNA, 4134 bp, Arabidopsis thaliana landsberg
tctgtgctttacctgttattacgactctgttcaaccctgccgtacctgccaagtaaccaccgttaccttcctgtgcaaggctcatttctttctccagaccctctttaccatgctcttgcggagaatacccaccgagcgaaagcatttgagaaaccaggtagtaaatcggaaccacccattataggaaactgtaaataatgggaaacaccaaacaagtcagtgtctttgtttgctttggaagaaaaatcgttaacttcaacaagaatgatatgtggatgaaggagatttacctcaaaactggagttcgtattagttaaagaagtgacggattcatcccggtcggtgaacaagttatctgacgaaacagactttgagctgcaggaaacatttagaacattacaaggcttacttagaaggaagtttcatgtctgaatattgtaaatgtatcagaatgctatacggatgagtgtttttacctgccacgttcaaatatgtcttctgccggcgtgaacttagttacgtatgagtgtgaaaaaccaggtatatcattgggcctgtgggaatcagaattagaggaactgccttgaaacatctgccctgaccctgtttctctcataagctcttcattgcgcataaccgagaggaagctgaagatgtgatcaaagaaagaggatgaaaaatcagacaaagtatgttaatgaatgcttgcaacaagttaatgagactctgattcataccttagagaagctggttcagtttcatagaatggaaattctaaattggttcctgagacacccccgtttaacccttcatatgtaggctgagaattttcgcgtaccagctcctccagattcaaatcacagtccataataatgttatcggaaaatgatcttctaattagtggcctgcaattcatatcagtgtattgaaccatatattaattcagttacatgactaatttctggtttagccaatttttcaacaaaagtagtgtacctcatattttcgatatctaagttagaaccagatcttccgatgttgtgctggtcagaatccaactcccatagcgctggcctccccagtcgaggccggaaatgacccaagaacctgtcaacaatcaactttacactaagcaaacacgtagcaaatgtaaagacgaaaaaacaagacaaaaagtttctaaaatggagcttacacattgatggcgttttgcttatcactgtcctgatacgcgttactgtagtaacgacgtacagctgtgaagatatcacgctgcctcatcaccatattccaattacctctcagatcacagaacatctgtataccataaactttctaaagttgatacacatagttcaaagatccatcaacagcctttcgtacgaaaaaaatgtgttggtaatcaatgactcaccttgctgtgtgcttccgagccaccatactgcatcgcaagtgtattacccatcttttggtaagcgtccatcagttctattgccagaggattattaagatcgacgacaggaggtcctgagatacctaatgtacgcagctgatgcccgagagaaaccaatccgtgggcgtactgcgcaaaattagtgcgatctaaacagtctatgcagtttgtcctcaagaccccattttgaagcagaaatatatccgccttcatatcttctttttctggactacttgcctcttcatcttgacttggaatagggttactggagcatggtagcattaatattagcactcagtaagaaacgtgcaatacaatcaaaattatggattagagctgttacacgaagactgcatttgcattagacatagcatacgaaacttacttgaaaaatgaatcataaattacttcttcagctcctacacctgaaggagctttacagtaaaacaggtcagttagttccaatgatttccttgaaaagatacacaagtggttgaatgcaccatcagctcctctgccaaattgaaggaaaaatggttagaaattctcggagatcagacttattacaaaccagtaaggtgcataaatgcagtactttttgtagtgtttgcttagatcaaaatggattgcctttaaacgatgctccctgtccatgcctttgttaataaatcggattgtctttgcaaactctccccttaagatggtttctcggtgctttttctcacctgtcacagtctgacaacacaaaatagcaacgatacactcaatctttcaataatccaagaacgggcataagaatttgacttttcctagaaaatgagagagcctacctttaggaggttgagaattattatccggttcccatacctctgtctcagattctgaaagtggtgttgggtagcctcataatttgcgtccttcttattcactatgaaccaaaaaaagacaaaaacaagagaatcaagatgaggcaagaaaaacctaaggatcccttttgcaaactcatatggtgcttacatataatctcgggctgtgggttgaaaacagatgcctcctgtgaccaaaataggggtatggagcctcgaacctgcacaactgatgttatcgggattttctgacccgcaggaaccactttggaaacaatctgctctgtctcaacatcattggctaccctgcctatatcatttacaccacgccttaaatatctgcacattaacaaataacaaggaggagttaagctcaaaggcatatcaagactagcccttatctacagagggagtatcgaaatatgatatttccaatattacaattatgttagagaccaagtaggccgtgagacaaaaaaaattcaaaaagaagaataaagatttcaaactgaagaagtaccttgtaccagcataatgccgtgaacgccgagcaatgatagtgaatacaaatttttcaccagatactgaacatttagtctagacaaagcagaggatcaatagactttagattaccaaacattttgaaaaatctgcagtctaaaccagtcacataggcatgcatttgattattacctgttgaaagaatccgtatatcaatgcaactgtccatatggaattctgcaggatctttctgatctcgcgtgttaagaaggagttccacacgaacattgtgttgtcatgagggtttcctctctcagtgttgcctatgttcttctgaagggaatacatgaggtgatatgtgtagctgaagtagaagtttttgctaagatccaccacgcttaagagcttcttgtacctataatagaaaggggaatacatgtcggatatgtgttctactaaagtttacacaagaaagttttcatctcgagccgtttaaaagaattatcgataaaatacctcagctcggcttcagacttagccacttttgattgaattgaaggatgtggaatcgcgatcatttgactctctgctataccataaactgtatggccacagatctcacccactttctttcgttttgttatcagcagcatataataaggctccaagaatctcacaaaccctgcaccagaataatcaacattgctccatgagttcacaacgttaccaaaacaatgagaaaggacaacaagcagttgtagtaaaagagactttaccaatgattccatagcaagttgtgattgctttaaagccaccagactcctcgtttcctacaatcatccgtcttttaagttcgcgcatttcgtcttttgtataccttgtaggatgttgggtaaatttaactcattttggtcccttctatcaatcttaagaatcctcctaaagcttttgttctcatctcttccaatcaaataaaaattctgcacaacaaccaataaattcaccaacttcaaaagtcaaaatgtagtgatttcacatcagaaaatcaagaattcatgaagcaacaggctaaaataatagaaaacttagaaccaaagactctacattatgtcaagctaaaggcttaaggctctctcattcatggcttacactacaaccatatgaaaccgccaagcaaagagactcatcgaataataaaccaaaccaaaccatcttaatcttaaggagaattcgaatccaaaaccggagattaatgaattattatgcaatcatgacccaaaatcaaaatccataaaccataacagtgtcaacgca

SEQ ID NO: 36404 - DNA, 3979 bp, Arabidopsis thaliana landsberg
  unsure (1)..(3979): unsure at all n locations
ctacagtggctggagaacttgcgaagccatggaacaccactggcatgcctcaagaattatcaaggagattctattcttcatcttgctgctacatggggtaatctagaactagttaagagcattgtctctgaatgcccatgccttttattggagttaaactcgaaggatcagcttccgcttcatgtggcggctcttgctggacatccagctgttgttgaggatcttgttgcgtcggttacatttttttcagctagactggctgaagaagatagggagatactaaatctgataaaataagagtcgaatattttctgtgtattgagtttgaccacaaggtctagaatatatacaaaacatacaaagcttgcagaccaagctgtttccttaacaataggaaagatacgatatacacaaatctaaagatacgatatacttaaatctaaagatacgataaacctaagaaaatgttaataacagatatgagaatatcttccattagaatccatctattctgaaggacataaatggagatactgctctgaacttggccttgaaaggatgctatgtgaaggttgctctctttttggtgaaggcgaacaaacaagcttcgtttcttgcgagtaaagacggaatatctcccttgtatttggcagtagaagcgggtgaaaagaaaattattgccagtttaattttaattgatagagtcattattgaatctccatgcaccttttgtcgtatacgaaaggctacatggaaattgtgtgatttataattaaattattctaactagctaaaaattattaaaaatacaagttgtaaatttgataaagcatgcaatggcttactgaaataattagtctaacaatacaacaaaacgatgtgcagacgacattatatcgtatcgtcttattgcaaaataaatttcgatgtcaattgtcaagtcatcatctttcagtggagaatagaaaatgagaatttccatcattggcgcacagtcggatctctcggatacacgacttaaaaattgtttttgccgaaatgtttattaagccaacaagttgaaggttttagttgacattcagagcatatttgtaaaaccttttccataagaaatggattaacattttacagcctagcccacaagatctcaagtttaggttactgcggagaaagacgtccatttataaactaagaatttggttttatataatggacaaacatggagtctcactttcatcaaactttagcgactcctcctgcatttctgatcttcttgttccttcactttgtaagtcgtctctccaccttcgacttggtatgttttctttttttttttttcttttctaattgcgggagaactaaaactgttatttcaaacaatgtgggttgactttaggtttgagatggatatttctgaagcacgtctagatagaattgaggtacagagttcagtggatgcgtctcatgaccaactgagaaaaatatacgtcttgatgaataagatatacaactgctttcgctcactcagttcacgaggtttctttcgagccggagtagaagccacgccacagcctatggaagacaccgagcctgtgccagagttctttattagtctcagattgtccgatctttgtgatctccctggtgaatatgtgctaatgaagacggagatgcttagcacactgagtgatgggaacgaagaatggttggagaccttgagaagccatggaacaccactggcatgcctcaagaacgatcaaggagattctattcttcatcttgctgctacatggggtaatctagaactagttaagagcattgtctctgaatgcccatgccttttattggagttaaactcgaaggatcagcttccgcttcatgtggcggctcttactggacatccagctgttgttgaggatcttgttgcgtcggttacattttcttcagctagactggctgaagaagatagggagatactgaatccatatattctgaaggacataaatggagatactgctctgaacttggccttgaaaggacactatacagaggttgctctctgtttggtgaatgcaaaccaacaagcttcctttcttgcgtgtaaagacagaatatctcccttgtatttggcagtagaggccgggaatgtgttgcttgtgaaagcaatgttgggaaatgatggccctgaagggagaaattccaacgtagaatcactgttggaggggagaaaataacttgcacacgcagctttgaagtccaggaggacaggtttgttttactttatattaccaattaggaggacctggatgattcattgtgtnnnnnnnnnnnnnnnnnnnnnnnnnnnnnnnnnnnnnnttgatgttattcttaatgaatatccaagttttgtggatgaacgagatgaagaaggaaggacttgtctttcgtttggagcatccattgggtatcataaaggagtacggaacctattagaccgatcaagaaagggtgtttatgtatgtgatgatgatggatcctatccaatccacgtggcagcagagaaaggtcatattgaagttgtcaaagagatttgcaaacgttgtccagtttcaacgcacctgcgtaacagaaaagatcagaacattcttcacattgcagctgatcgtgggagatttagacttctacgtcaatggcggaatcatgaacatctggctaatgagaaagatgtgggtgggaacacacctctgcatctagccaccataaagtggcgccctcgagctgttcagttccttgcagttagaaaaaacttgttgatacagaactaaatctgcgacccaactacatcttcatggaggtatgtctaatttccttagttaacaacattttctagattattcacagctggtgacctttaagtttggattacagaggttgacactaatggccttagtaaatggtcatgtcgaaagagatagtagactcatggagaccatgaagctatcaagaccatcagtgccattggaccatggtggaatgttacagggaaacctgcgattcacaagaacaatccaaatctccaattatcattcgaaaccaacaatcaatcgatgttcataaaacaccaaatgattcagctagctctcgatgtgagagaaatctagcacttacaaaggttctagagaattctgaagattacagattattcgataatgaaagcatgagcataacatgttgctcttatacaaaaaggtaaagaaagtaaacgttaaccacgttaataacgatcgccgttaacgtccattgcattgccagctcgccagctcgccagctcacaagtactttgcctaacgtccgacttcacattgccagctcgccagctcgtcagctcaccagctcaccacacgttaatcctgtatcatggaaacaaagagtacatcaatgctcttatactagtggcaggtcttgtagcaaccgtaacatttactgcaggttttaccttaccaggtggctataaaagctctgctccgaacttgggaagagcaatgctagtaaccaatctcaatttcaccattttcctgatatttaatgccgtggcaatgcaaagctcagtattagcagtagtatctcttctttgggcgcaattgggggatcctgcactatttcgagcttctttaagtgtggccttgccatcactgtgtattgctctaatatccatggcttatgcattcgtttgcgccatgggtattgcagtaggagaggatgggggtgatttagggattaaactcgacattagcattccatcagttgtcttcacaaccatgatgacagtaatcgttgtccctcacaattttatacagagacctaaccttcatgttagatgttataaaattttctgcctttttctattgtttataaatgacgatggagatgaacgtcaccagagctctactcacatgcttgtgaagggggctgaatctgtggagcacatcaaaatgac

SEQ ID NO: 36405 - DNA, 3395 bp, Arabidopsis thaliana landsberg
taaataggcctaagctttggaccgtcgcactttcgctccactctagtgagtcgagcctgattttaacatttaaaagttttatcatatatattactctcagagtcttaatggaaacatgcagttcaactgcggataaagtgcggtgcagttcaaataataacaaatatatatatatatatatatgcagagaattttattaatgtgcgattcggtcaccattcgaatttttttcgtgactcatacccctattttatactgtttttaactattatcgaattacttatgattttttactcgttcaaaaacttgtacgggtttgtattaataatcggatccattatactttttcctccaaatatagaagtgagccgctttattgtcaactttgaaatctcctactaccatttttttttattaccaaaagtagctttttattatttcttatcgttattataaaagtaaatatttatcatcttatgttatattccggatctataagtaccgatagtttattttgacagaagaaaaatagtggatatattgtaggtttgaatttgcgggattaacataattttatttagatacgattcatatgaaaatgttattacttgggagatcgacgagaacaaattatatttttaaaaaaaaaaaaaaaaaaaatttatgaatcttctactcatgcatctttcaagaactcgggttgctttgcggatgacttgtcttctgtccacagaacctttaaattcgtcgtgaaagtgtagcatatggtgctgaacataatgtttttctagccaaaaaaaacacaatttattgggtcgattggaagctataagaaactacacagagtaataatgaacatgcttaaaaaagaataaatagaaaagcaaataattataaaataaaaataaagaggaatgagtgtaaaagaaaaatagaataaatgttattgtaaatgataacccaaacataaaataaatagtataaaaatgaaacaataaataaaatattttctaaattaaatattaaatgaacatggacgttaagaaaaaatatcaaacaaacgtggaggttaaaaatttaattttaataaactaatatttaattttttttcctctttggtccccatcaaatttgggaatgaacaatttttcttgtacaattcctcaaaaaataaggaatgaataggaatagtgtagggttcacatgttacaatttggaaaaaaaattattgttgaatggtcaaaaaaaacagaggaacaattaggaacatgttgttcctacccattccttttctaaaaaatcgaagccatcatttaatgctctgattcagatttgtccactttactgagaacatttaccattattatgtatgtagtacaacaaattctagaaaatagtttgttagtgaaaaatgtatattgtaacaatttcttgaaaatagtttgttagtgaaaacatgaaagcttaagggtttgtttaaatgagatggaaataacccgttcactaattagatcattaaatggtttacttccgctgtggagctggtgaagaggtcaattttaatataaacaaatttaacaatggcaagtaatttccctagtaaaatgggaactatagttacaaaaatttgtgttcaaaacttagtgatataacttatatataaaggaaaagcatacaagatcaacttatgcacatatcaaacacatttgtttttaccttgatcttacggtgcatcttttctgtatacggtatcccaccattttgctgtctaatatccgtgacatgtgctagaagctggttaagttgcttagtcctcttgcctttatcctttgtcttgttgttaaacaggacctttcgtcctccacatagtttgagaactctctggaaattcgtaattaatccaagtaaaaaaaaaacagcaatattaatggttgcactaatttaaaaaataaatatgctaagttcgaaacggatgctagcagaccgtcaaaaattcagggcaaccttcacgtaaataatcgtccaaggtctggttgtctgcttccaactcatcaccaccagtgaacaccacattgaaatagtcaaggattttatcatcaaatatcttctgcaatgtattaaatgtgaactcctcccgctgtgaaatccgattcgttatagacagaacaaacaacacagcatgtattccttcttctgccatagttaagcaattcattatttccttactgagatagtctcctgacacggatgactcgagcaaacctgtatcacgtacaatgttacattctgacttgaataaattcagctttgctattggcaaagatgtacattatattaccagccaatcacatctatagtatggctatgattagagaaacaattcccaaatgactttataaaatgccggtttggtgtatataatgttagaattaagactttatatgaagttttaatggagtatataccaggagtgtcaatcacattgattattgggccatcttgtattgcagctttgaacatcttacatctctggtccatatctcttccaaacaaatttacctcgaaatatttttgaccgatgatggtgttcccggtgctgctttttccattttcgctacgacctaggagaactaagtttgtaacgggccattcctgctcagccatattttgaaaaccaccaagacgttgctaatttcctgcacggatccatagtattacaaataaattatacatgaacaaatagatattttaaatgaagaatgaagagaagaaaaagttaattggtagactacaccaaatgggaactcacgatcttgtaaaaactaatcaacgaagcagttcaagactaaatagaagacattttgtattgatttggctttgaaaacagctatatcgttatttttatgtgtcatatgaatttgtttatgattttgtactagtgtggttaattaggtgttacaatattatgcatataacgtggaacaagaaacggtaaaggaatcagaaaggccaagaatacctttatgaggagtgagagacaacttttgagcattgactttaattagtaattataacctatagccatctaaagggggtgtgatttttgtgcaagctcaaatatttttttgagattgagattgctcgaagtcaagaaggtatcatggtgacacaaaaaaagtatgccttaaatattgcagcggggacaggcttagtcggttctaaactagttcatactccaatggaacaaaaccatcgtttgggtttggatacaagtgacgttctctctgatccattgacctatagaggattggttgtgtatttaatttattttgctaatccaagacctgatatttcttattatgttcatgtctcaatttagcaaacgcgtcgtgact

SEQ ID NO: 36406 - DNA, 5262 bp, Arabidopsis thaliana landsberg
  unsure (1)..(5262): unsure at all n locations
ttatcttcattttcttatcatttaatgctgtttgttccctttttttttttgaattctatatttgctttttaaactaacgtacttttaaagatgaaacttgagacgccatctcattggtcttggatttatgtccttcattgacatgtacttacctcttatatatgaatccacccataaggatactatatatagtgaacatcttgacctgagagtttgataaaagaactaaaacatattaacaaaaagataaagagaaaattcttgaatggatgcgatgtgtcaagcaacttctacttaccataagagtctgatgtgggatcttcttttccattttcttagttttttcctttaacctgaattacttgttgtctatgcattccttaattgaatttaataacttatcttatgtatggattctctacccttaaattctcattctttaagaaaagtatatctttttgtcaacaatatcttcatccaaattcttagaaaaatatactttctttttggtatgtatcatttaacatatcacattgcattgttttcattccacattccatgttaaacaattttataagatcacgaaatgtcattaattttgaatgtagctagtgttgtggtagccgccattgtaggagccatcgaaggtcacaccactgacatcggatttcttcaaggtagtgtgcttggagtggtggctggagttatcactgcggtccaactctttggaccggtgctacatagtgatcaacctttgtctaaggtgattgtgactctacatataaccctagaatctaaaaaataaatcactaaacaaccatatgtttctagttaaatagtgggagtggtcctgtaattaagaaagctagctaaaaatgaatggtattctagtaactagttatctgaataaaagatgatgttatggtaactatagtttcgtgacaaaaatatgaaaagagtggcaggtggctttactcaggagagtagtgaatgggaaagccattatgggattggttagaccttttgtcacaaagcatatcaatggcaagtaagtactctccattctttttgttcttctgacttttttcaactacgtctttttatttgacaagaacacgatattttctaacgtaaaatcagaaccataacaaaaagcgttaaactaagtatattttacaaaattttaactccggtaatattataatacaaaatgcagataatagcattggatacaagttacatggagagttcaaacttatacgatttcaatcatgaaaaaaagggactatcgaagagctctattcagaacatcccgatgttctacaaccgttcagaacatcaaacaaaatcgagttgctcgatttgcttacaggtgataaaaatgtaattaattagaatcatctaggaatcagattttaatatatgataataatgacttaaatcatatatatttctaatgttcatttttggggtgtgtaggattgggaagaaggggaagtaggaagaaagctagcaagatgtggccacacatttcatatgaattgcatagatgagtggttgcttagacaagaaacttgccccatttgtagagaccatctttcataacacacttctacataacaacatgttgtggataaactttcacaaagccatggacctcatgacccaatgggtccaaatttttaaaatttgcaatccaactaaactacacaaaaataaaaattaaattctcagtaatatatgtacctaactaagggtaaagtgggaaatacaaaaaaacatttcgaagagaaggaagaagacaaaagaagaagcacgagaatcatctgcttaaaatccaatcgcatcgactcagtcttcttcttcttcttcacctacctttctctctctctctcgtggtccattcgctattctatacttcttgtcggcgccggagagagtgagatgacttggtcggttttcagatccataaatactccaacactcgacctctccaccgcacttcgctccactcgtaccccattggtcgctgctggtgtcggctgcgcaacattcgctggtgtttctctcttcagaatgtcttctagatctcctcctttcgcttccctctctgtctctgcttcttctggtgacgattttactcaattttctccaatttggaccgatattagtactttctaaagatgcgatttttatgaatgtcagtgtcaaaaaattgaatttgatttcagttatcatcaatgcatatgtttgttagtattgggttttagtttctttcatcttccgtattgaatgatcaagggtttgagaatagggtttttactaaagaaatgtgatgttgtgtgtggtgtgcagtgaagaaggaagttgtgtctactgagaaagcaccagctgctttgggaccttactctcaggccattaaagccaataatctggtttttctttcaggtgttcttggacttatacctgaggtccgtatatataagatatgaaactgtgtaatcaccatgttgtttctcttttctgtgttctaagattacaagatttgctctttttgttttgtgtatatagactggaaagtttgtttcggagagcgtcgaagatcagactgagcaggttagctttcaaactgtcactttagtctctataaaaattggttttgtttagagtactttccacttgcttctctgttttggtggatgattatccacagaaaaggaggtctagcctctaggtcgtcatgatgttgtttgttggtgaaaatgtagtgagggatgacaacttaatgtgccttattctagctgagtttattgggatataaactttcatgatacaaaactaagcctttgaaacttttgggttttgctttaaaattcttgatttggttggtattagtcttcaaattaacttgttccagtgtagttgtagaaaggttgagttgctctgtttnnnnnnnnnnnnnnnnnnnnnnnncttctattatcttatggaatatcaaaggtactcaaaaacatgggggagatattgaaagctagtggtgctgattattcctcggtggtgaagacaacaatcatgtaagggatcttgtttttttcaacagtaccattgtccatttgaattctgaatctaaatagaaagaaaaacaatctcttctggttttctctcaaaggttggctgatttggctgacttcaagacagtgaacgagatatatgccaaatgtgagttctttaacaagattgtttgtgttcctactttgtttgagatgcataattattagtggagtcgttaagggcatgaaacatttgtctctgttgcagacttcccagctccttctccagcacgatcgacgtatcaagttgcagctttgcctctaaacgccaagatcgagattgaatgtattgcaacactctagaacactcaaatcaatctctacgaagggtattttggtccggaagatgtcaaaacaaataagagaaacaatggtttttggggcttaacccatatttaacctacttttcattttgctgcactacgaaaaatgttgcggattatcaaccattaggttggttacaaatcaaaagcctctaatcaagaataagttatttagtgtcttgtccaccctcatttgctgttgacgtatatgtattgattgtatacattattttatttgagtgaaaaccattatgcttgaagagacaagagttaataacttaatatggtcgttagaagaggaatgataatttaatattgctagagaaagaaaatatatgtaaaaaaaaatgcaaacacaaattaccctttattattattaggtggtttggtaacaaaggaaaaacatggagcttcaagttcctatagtttgagaaatctaactcgggtaccacttggttgaggaaatggcctcgagttgaacttgaaccatcaacatatcattcacaacaaaaccctttgatgaatctctgagatcagctagagggataatctgaaagtcgcccgagtaataaaaccaagaagtgtaccaattactaactgcgaaaaaagaaagtaaaatcccattagtcaatggcgatgagatgttatatatccattttcttacgtaccttgtatttcgacgttattgagtttgcgttggttaagaactcgaagcttccctcgaacataaatcatctcaaagggtttgaaattatcgttaatgttaagatacagcgacatggcttttccctttgaaagattacgaccattcggaaacacttgtaaatacctgatcatcatataaaacaagagataagttggagagtaggcagtttttgcaaaaataatttgaaaaatgggtaccttttttagaaataggtggaataggtacttttatctctcctctctaatagaactctcccactaatataacttttagtaaaatacaattttacccttctgttgttttgatgaaataaactgggcctcattaaaaccagcccaataacatctctaattttaaattgctcatgggcttgacatctccaatatattatcattgtcatataaaaggataaaccctacaatctcagaagcaaatctcatatacattgtcaaattcgtaacaatatggaagatatgtttatcataaaactctttaaagtttctgaatttttaaaggtgtacgtaaagtattttattgtacatattgtataccaatcagattttacatttctgatatctattaagtgtacatacacgtatgtagtctagtctacgtatatggtgtactaatgttggtatacgtatgtggtgtttaaatgttggtgtacgtatgtggtgtacttatgttagtctagacacttaagatgtattaactctagtgtacgtatgttgtttcccttattctagtgtacgtatgaggtgtactaacgcatgtgtacttgtttggtgtactattgctggtttacgtatgtggtgtacatattctagttttgaacatttttccattttttaaatgggttttctttgagtttaaatctctatcttggctttagagtgtagtttaaaatttcattgaatttttaaatggatttttctttgagtttagtcatctatcttatctttaggtatagttttgaacttcattgcatttagacatctatcttggctttagagtatagttttaaacttcattgcattttttaaatgagttcttttggttttccttattctaggtatacgtatatggtgtactaatgttagtgtatatactgtggtgtactatt

SEQ ID NO: 36407 - DNA, 2820 bp, Arabidopsis thaliana landsberg
tatattctacattgttttcgaatcttcggaaataccatagaacatttgtataattgctaattaattttttatgcaccttcattttaattaatcgcaacctcgtaaattatttgtattaaagatgcgtacacgagccaattatatatggagttagacaataaggttatcaagaacgagtgaatttgggatctaaagataatgtaaggtttagtattcttccttgacttcaattctaaggtaagggattgataatgggtttagctatgtaacaacctatgttgatcaaaatcacgagaaaatgatatttaaatgagatgattaataaagaagaaaccaagagtcattattatcatatgctatgtgcatgctcttaattaattcttcgcatctcccaaaattatcacccctaactaggactacttgtcgtgtctgtacgttgaaaaacggagtcagatattgtttatttcatgtactaactgtatgattcataaaacataataacctgataaatgaagatttgtacatttatatcaacgtgaacgtctgtgttttcagtaatttcttaaatagtttttctttgctgattatttttttcgtactttcctaaaagatatgtcatctagttacactgtggtcatcgtgaacacacgcaaacattagattctgtagcctatagtctccggctctcagctcaaaaagggtcattttgacttttgtttaatatatagaatttgactataaaaatgtagtgaaatactacaattctggacagtacttctaatgcattggacaaaaaacaaaaaaacaaaaaaaaacaactaaatatacacctcattttgttacacatatgacatattaaccattagctagtagacaactaataaatctttcattataatatctaacgccgcagatgatgatgcattgttttatcgagactgaaaatataaataaattcttcacacaatagaaataaaaacaaaatattgaaaaagtaaaatgaaagacatgctcgcattaattgcacggaacagagtctactgttgataaaaaaaaagagtgatcgaacagttttttttttggggtccagtttatttaatttagcattaataactttgtcagcgcgagccactctctatgattttgattccatcataaattataaaactaaccaaaattcatatctaaattaataattcctttaacccatttactaagctttgcttgtaaaattatgagacctatataaattcgatttattgaaagtgcctaagaattcagagtcactttgaatggtacctctcacgtaatgcctgtatgtaggatcttctgtcattgtcttatatatattgtctttttccatcataaaatagattgtctttttacgtatacgtacacaaacaatagatttccatttgaattcacatattacatatatatacatatacgtgtttaacttagattctattcagtagtttcggatttttagctatgttccatcaaccaaacattttgatttacggtagttagataaaattgacacacaaaaaaaaacaaaaaaaaaaacaagaaactgatcaaaatatgaaaatgtaagcacaatgtaactaaaattcgtttatacgtctaaaacaagcaatagatactaaaatacaacttgttcgttatcaaatgttttttttgcataagagatatatgcaactatttaattaactcaatctttttcactagaatgaattaaggatattgaaaaacagctaggtacgtagtcagggttgtttgacaaattgacttccgttaaaattattgaccacgtgtatggtcataaacaaattatgaattcatgattcgatcaatattacgacctactacatatgatatggtgttgtaattaaccacattctcttgctttttatcacattaaaatttatttattttaatttattattttacaccaccactattttccacgttctatggatgatcatagtggagccacgcatgaacatggcaaaaatagaaatatgcacatggcaatatatatacactatctacgtatgtgtcaatcaggccaatccaactttgttgtggtataaactctaagctcgaacagatccgaagatattctttcgttctcctttgacctgattaatgtctgattaatgatcacgaagctaaaattgattatcttttatttttgtttataaattattagttatccttaatctgaaatcattttaacaaaaaatttactgaatttaatcataaaaataggcttatgtataagctaacacatattttccaatgtccattattatttaatggtggaattcgatgtttaacgatatgattcaagttataaaaaaaccgaattaaatatctatttgtttctataataaaattctgaaatccaacatctctaaactatatactgcattatataataaacagatcatatttatttgaatagagtagctaagattaggcatactagttcaaatgtttgatggacatccgatccagttagtccgggccttcaatatttgggctcaaatgggcccaaactatattgggtcgtatatgaaaagttgaaatatctccaaactgaattttggatgggaaaaagcgggaagtcgagagagtaccttatttctaattttctataacgagggtagggcccaccaagaccatatagcgtaaagcaaaatcaaaatcaaacaattaggaaaaaaacataattttctcttttttcgaaattcgaaccgtaattagcctttggttttttttggactctaaaagaaaaaaaatagagaggaaaaa

SEQ ID NO: 36408 - DNA, 4227 bp, Arabidopsis thaliana landsberg
  unsure (1)..(4227): unsure at all n locations
aatgtcattttgcaaaagttgtttatcaaaagcacatattgtcacagatatgatatgagtgattatgacaattatgggtcaatcaattagaaaaacgtataagaaaagattaatttatgagaatttcccaataaatttaagatgcatcattatatcagtgaaaaatagaaaagttcatttatactcttattttcatcatatatctcacaatattatcaggaaagaaaatattccctgcaaataggattgaatctagattgatcactaaatatgaagaatttacatatacgtacaaaataattatgttcatgcacaaaactcattatataaattaaaacttacaggttatttccgtcagttgctgctgattcagaagtgacgttgacaaacgtcctgtacatgtaattagctaagctccaaagaagaagagccatgaacatcgtcaagaacataacctcagttactgtcactattcctaacggtccgttcactaacattggtcttctcaatgcaccaaacttggctctcttcttctccactccgctttaaattttacaaaaaaatgaaaataaaataaactaataaaaagaatctaatattaacaaaaaaaactaaaagctgttaactaaagagtgagcagtcgttagcttttaattacctgttaaattgattaacagttgttgatttcttcaagtgaaggtagatacatcccagaaaagccagtagaatcatcgggaacatgtaaaccaaaagattcactcctataatataagaaaaccattatatgtaacggattcgtataaataattttagatctgtatcgagtgaaattacctggtctcccatagtatatcgatttgccgagcttggcacgcatagaggttaaccagatttccttgtaggtagaagttggcatcataatccagatcactatagtccccatcaaaatcaccatcatcaagaacttaatcaccttatcaatcactttcttatttatttctcctactcccatgggaccagagatgaactttcaagaaatgagaagaaaaaacaaagcgaaatggagtttgcaatgaattttacaaaacccatatatatgtgctatatttgtttccagcatatatatagaaagatatttttttccagcatatatatatgctaattacaccaatgtaattagtagttttatgctaaatgcagaaaagatccaataattaaatatgttgagaacttgagatgtttaaagatatagagtatatatataaaataatatactcttatataaaagaaatgatatttaagtcatttttctatgcataatattattttcttaaaataataattaaatttatatgaaaatatggtctggtgaataaaccaataagaaattattttattattattttaaaataataatattatccagagaaattataattgaatctttttataattaatttgtgatttacagcttcattttactgctgacttacaaaacaggcttgactcgtggaagagtctaggtaaagtgtgtaatttcctcatttcacattgaaaacgcaattctatagttttgggcttaaaattagcaaattcaacggaaagcagaatcattgagtttgtacgccgatgcgtgtagacgtatatttctattatcttttcgtttttttttctttttcgattttattccttgtactgagttttgaataatcaattatcaaaaaatcacacgtaaatttatgaattttacattaaatttcctcagaacaccaaatttaaccatgatattttttgttagttacccactaaattgtagcagagttacacaataacacagattttaaataaacggatgtatatataggtgagttctttaatttgttcttgtacttcctcttacttaaatcgaataattagtgacatgtcaattgaaacggttttttttttttatgttcacgtaacttcttcttgtctttttaaccaacaattaggtaatttgtgctatctgcaagatagtatttctgtatttgacagataaattctgatagatccaaatattaatttacatgtagctcacatctgtgtataacccaactcgtttcgagcaaattgactttttcgtaagtatgtttaactgaaaaatagagataaaatcatatatatgacccaacatgagtattatatttcaacatttacaatttacaaaagctgtatgccttgtgttacaaacaaaaaaaggatattccggaacttttgaaaggaagttttttttttaacactgaatattcctagaagaggataaagaaaaacaagaaacaggaanagtcaatgtaaagcacacaaagataggtcaaatcacagggccaccttattaacttgcaactcaagcaaattgcacaacacatagtgaaaacagagttatatacgcaatcaccagctgaaactgatagattcaaaatgaagattctcagccaaaccagaggaacatatttccgcaaccttttgtctcatcttcttaggaccacaaacaagaactcccacactcgaaccttccacatcaagtagaagttctgctcatataaaccaacaaaaaacataattagaataacaattccttatatataagatagagatagagaaattaaaagaaggtcatgtatatattactcttgagattaggtctttctccaaaatgcagattggtgcgttgcacgagcgattcttgtggcgtactttcgatttctctcaaggaattgtaaccccatgatgaggtaggagaagatgttggagatggacggtcgacgttttggacctgtttactttcaactttaccatacttcttcttgttccacaacatagccgcactacaagtcgccattatgctcacggagatgaccaagatatatatgatggtttttgaagtcaaagaatagatcttgttggtgttgtggtcgatcgggtaaatgtaatacctagtgatgataccaataattatcatgaagatcaagaacgaagatgcgagaattgcaccgagccaaagccatgagtttggtccgaggattgatgagatggattggtctgaaagacttggtttgaaccagagagttttgattttcccagcttttgcttcatctcctgcatcattatctcgggttatgaaggcttcgattttgatgttaatgtcggaggatagttcagtctcaagaccggataatggcaagacaagatcgagcatggagatctctgaagacttcttaaacgcacaaatgagagttatttttgggattttgcatgtttccttttggcttgtggcgatcaaatcacgaataacagagataaacggagttatcccgcttcctccgcacaccataaccaaagcttcatgcctagaaagcaaaaaaaaaaaaaagtatgaaatcaatgtttcttgaaatgcaagtcaatcaagtttccaggactcttaacaaatctgaatataaagttattagataggtgattgagaaagtgtatataaacaaatcaccttaagaaatcggcggaagcagggccgtaaggaccttctacagaaacagcacgtcggtcgatctgatcagaagaagaaagcctctggtgaagcttagttgaccatttgccttctttcttgataacaatacttagcttctctggttcgagtttgctactggaagttatcgtaaacggatgccattgcagnnnnnnnnnnnnnnnnnnnnnnnnaaacattatgctcgtcgggctataaaccaactctataaaacaaaaagaatagtttagaattagatcaatatccagtaagggtgaacttttcatatacaattagccaattggacaaaaggtactcactagagtttttggagaaagtgagctccatagtgtcggaaggaagaatccgagcagcgagcaagcgaacattttcacgtgactgaagaaaccgaaggaaacgatcgactaagaagatgtagaaaccagggagagcgatgaaggagaaacttatgccgacgtggaggacaaagaagagcatgaagacgatgtagagatagtgagtgtagaagaagacttcgaagaatcttctccttatcttcggatatgtggtggcccacatcacaagtccggccgccagagctatctctccggccaaatttgagacacctttcgtatcccacatgatcatctgcaattaatttattccacgtcagattataatctact

SEQ ID NO: 36409 - DNA, 1369 bp, Arabidopsis thaliana landsberg
ttcgttaattcatttagcaaccgatttttaaaaatataatcatgcaagattttagggagcaaattattttaattagtttgtgattggaatatgctaggatcatcctgtattcgagtatttaatttattttcataatttgttttttacagatattgaaggaaaaaattataataaaatgttgttagcatagatcatgttttaaattctaaacccgttgtagtattccggaaaaaatcttcaaataaaaaatattttttgttagcatagatcctgttataaattcttgaattggatttgattttgggaattttgattaagatcaaatattttatttgaagtttttttagaaacaaacattttcgaagttgttttaaaatgttgtgaacgattatgtgtagctaattttaagggatttaattggaagtttgttgtttggattaaatttgcatgataatgtgattgatattttaaatcaagaattaaaaatcaaatcaaataatttagagaaaaagatttaatgccaatgacatgtcattgtaaataagtgccaaatacaagatttattttctaaaataactgcaaaaatgtatatgtagatatggattcttaatccgaccgacttctttctagccatttacaattttgcctacttgctacgtttcctttttttgggaactctttgttaatcttatgctaatcgactacaattttagttgtagctaagtgtagaaataggagatgttttattttagtcgattgccgatattgataggttctgtgagtttatctccgtatatgatgaatcttccgatctttcaatttaagagaacatcgttgaaacagtagagaagaatccagtggtagttgaaaatggagaaactggttcttggaagagttaatcagctatatcagatacttgatcggcatggttacacaacgtccggtgtcaccaccgttactccaccctaacgtgtacgtgtggtagccgtttccatcacttgagagacagatctcgttttttccccaggacacatgtatagtacattcttctcgacagattggtcatcatccacaataatcatcattatataaaccgatttatgtcgaatgatttaaagttacatttactctgcatactcgtatgagttgaaacgagacagagaaacacaacacgaggctcaagttttcagatagccacactagtcattacccgaaacagagagtgtgaaagtatgaatcctacatgctactcacccaccgccatgaatgggattcccctgccaacatcaaccagagccaagattgttatatagagtctcggtgcctgagtgtttgtatgcgatactgtattggtgcatgaagccagaag

SEQ ID NO: 36410 - DNA, 1207 bp, Arabidopsis thaliana landsberg
tgaattctgagtttatatatgctactgtatggccaagcgcagaacagcgggaacatcttgtgattcctcattgtgcttcttatcgttcatgctctttacctacatgtgtttcctactaagtgtctgtttttgctttgatttctgctcaagtattaactatgcgtttcttttcttcagtcttctgttcttcattcccaaccaaagtcaactgttggtactcctgcatacattgcaccagagattcttcttcgacaggaatatgatggcaaggtaaggccatgagaccaattcctctgtctagagttaaaaccagcttatccatatgactgtttataccataaatattctttgagttgtcctctgaaatagctggtgttacatttttccagcttgcagatgtatggtcttgcggtgtaacattatatgtaatgttggttggagcttatccattcgaggatccacaagagccacgagattatcgaaagacaatacaagtaatgttttttaattgttcttgatgtctcattcatcatcatccacaaccttgttatactcattatccttcaaaagttgattgtttatgtttgcttctccattgattttaaaacgcagagaatccttagtgtcacatactcgatcccagaggacttacacctttcaccagaatgtcgccatctgatatcgaggattttcgtggccgatcctgcaacagtaagttttacacttgaaacaaactttgttctttaaagcattttgagttctaaataaacaaattgagagaccaatgtggcagataatcgtcattttgagatcgtttgttgttttttactctacaaactttggattcacatgcatatgtatatgtattgtaatgtaatgtgtactatatttctgaatttctctttgtttaataaccattggcacattttatttttttcaaagtatgtcattagattgttcatattaatacatatatatatatgagtgatttgacacaattggtacatcaagaatcatcacttcaagacaaatcggatcgcatggcctttgttcggttttcctgaacaccagccgatgtggatatcaaacttcggtttagcttcagttggttgagtcatgatttcgtcaaatttagtcctgatttcagacatcttggccttgagttctttgatatctgccaattgattaacttgaacatccacaccta

SEQ ID NO: 36411 - DNA, 2490 bp, Arabidopsis thaliana landsberg
agccaggtctttcttcaattgagcaagagttgcttcgatctcatcaatattgtcttctatactattctttgtgctactattattcttcccggaagatttctctgttgagccttcttcaaaatcaaatctttctccgtttttgcttgatccttcattgtcttcgtcgctaatgttaagttctttctcaagaaactccacaaattcttctccaatttcctgagagaaaagaaaaagaaatatgagaatcaaaaggagcctagattggttttagtctatattcatcagaaccaatcttcgtggaaaaagttcatatttgacacacattgaggactccaggttatcagtagtttgatattattggacttaccgatagttcttcccaaagacttttcggttttccttgtgaggacgcactagcttcccagtttttatactcttcttgaagatctttgaagaaatcccctgttaataccacagaaagtgagcctctaaacaaacaattaactacaacttcacaatgtgctgtgcataaaatctctagacgtgcaaaaaacaacgacagaaagataatagaattcacagattggctctaccgactgttaattgaacatccctcacgaattcacctgcataataaagtgtgttgtgcataagatcacactgacctcaattaacctaagtgccccaaaagaacacaacacataagagagaataccgcaccacacttctaacccagtcattaaatggagcctagcattcacaatatgtcaataagttgtcacactctgtgaacatttccactaaccctattttaacattggtgttcaaaaccctttgacaatgcttctacactgtgctcatacaaaaattctcttccctaattatgtcaagccatagtttaacattaaacttcaaagaaacagttcccattttacacaacaggatcctcaatgaccacatttcaatttcaaccaatatatggtgctttaaggggttagggttttaccaagtccatagaaatcttcctcgacttgactgttgccttttcgactagtttgacccgtcgaagaaccagtcgcacgactatctgaaccgtacttacgccgtgagtcagggtttatcagagtagtgtatgcatgctttattttcaaaaacttctcttgcgcatttgcctatacaccaaaaacagccaggggatgaattatgaactaaactttcttccacagggatagagactaagtaaaccaagtccatcagtaggtccacagagatacacatacatatgatggcaacatacggaggctcaattccatgaatttgtatgtaaagacaaacatgttagcataaagcatccatacaaagctccaattcgttaaacttcaatgaaatagaaaccatcaaaaaagtacctctttattgacatctgggtgatatttcaaagcaagtttacgataagctctttttatatcttgaggagtcgctgatggagacacaccaagaatctcgtaaggagaagctctagctctaggtacgacgattcgatttctccgtctttgtatactactccgtcgtttatataacgtagcgagaccaatgtctccaccatagcagcaacttgttacaggaaaacccagaaaattaatccgattaaggaatgaaattggaggaagatgatgcgaaaggaagaaactttgtggtgttggagacagaatcgaagatgttgcatacataattttctttgcttcattggattgaattccccctttttggacaatggaatccggtttttgtttaaccgctacttcgattaccggttcagtattaatcgtaccgtttaatctggtataatcgctaactctgtgcttccttgttcgctctctgacagataaaatcgggagctcttattacttccgtcactgaaatctaccatcagtcatgcggggtttgataaagttggaagctttgattcttatccatgaagaaacttaccatcgttcctagttcttttcggttattatcaatcggttcttatgttgaacttatcgaaaccaacggtcgagatcgactgttttgtagaggaagagtgcttcatgctcatttagtgacatctgggattgctcgcttgacgagaattgcagctaagcttgtcactttttatgttgaatgtgggaaagttctagatgcgaggaaggtgttcgatgaaatgcccaagagagatattagtggatgtgttgacatgattggggcttgtgctcgaaatgggtattaccaggagtctttggatttcttcagagaaatgtacaaagacggtttaaaacttgatgctttcattggtcctagtcttcttaaagccaagcgcaatctgcttgatagagaattcgggaagatgatacattgtcttgtgctgaagtttttcgttgagtctgatgcttttatagttagctcgcttattgatatgtactccaagtttggggaggtggggaaatgcga

SEQ ID NO: 36412 - DNA, 4809 bp, Arabidopsis thaliana landsberg
gtttggaagtacccatctcccggcaatggagatgtaacaaaggtacttttgacaaaacgcttcccttttggacatcaagaccttctggtctgcgcagtttatatggtttcccagtagttggttcgatatcaacctgaggcatctgtttccatctcttgtgaacaaaccaaccgtacttgtaatcccctactattggagtaccaagtgcttcagcgcagtgtacacgtagctgttttttagaaggtggcttcatcaagagacaaaacaagaacaaaatctttcgcaaaattggtaaagaggatagcaaagtttaacaagtacctgatgttttctgctagtaataggacgaagttctacccacgaacacccgttgatcttaggtcctaacactttatactctgttattgcttcttgcgaagcttcaaagcccgaaccttgagccaaaaccaccctgtctgttttaccatcgtccaaaagcacctgaacacaggtttttgaatcattttcagatacaagcagtgtgtgagcaagcaaaggttataaatgagataactacctttgaaagaggagctgaaattagtccttctttttcctttggagaaccaatcaccaatgcccaatattgctgatacatcgcctcacacgctttgttccaagcctaagattgtgcaatatttacgagtcacttaacaattttatgttcaaccgttccttactagaccgtagtatgtttggttcaaaatttcagataagttctccttaccttacagcttgagtttctccccttgtagtcactgaacactgagtgaagataatctatactttctttggttcgacccattactaagaggccactagtttccctatcaagacgatgtacctgaccattgaaactcaaataattcagaaaccaaatcaatttatcaagataaattacaacacccccaaaaaagtgagttttaccaatctaggaccttcatcgttaccaaaagacaaagctgcagctgcaagtgcatccatgctattatgtataggcacatttccctgaaacaaagaatgataactgagtattcaggtgctgcttaatcaacaagaaaatgtaacagcttacttccacaaagtcattctgcagcaaaactctattaccttgactggaagcttaggtggcttattaagaactataatagcagagtcctgcagtagagagagaaaataaggttaaaaactagtctataagatcaaccaaaagagaccaatcaccgtttgaactcaagtgtaaaaacatccgcaaatccagaagaattaagagttaccttgaacctgacaagcctttgaagatatgcgatttcgtctgcgtttggatacaaggttccacttggtatggtgtcatatctcttagaaatcctcatctcagcgattgaaaccggcaaccagattttgtctcctatttgcatcacctcgttatgcttaatctgcggataaaagtgtacaatgctacctccattggaaaacctaatcctaagaaatgatcacaccaacaacaacaacaacaacaaaagatcaattgtacctttctcataggaatagctccatcttctttctctcttgaagcatccctacgacctcgaaactccatctgaacctgccacaaagataatacaatttattctctcatacaaaaataaaatgttaacatatattcacggagtgtatctgaatttcattagacaatgtgatgatccaaaagaatagtctaacaaagctcaatcaaatatttgatcagaagtaatgaaattgttataccagagacactcacaaggccctttgtgaaatgagtttgaatagccttatcatagatttcttcaaaatagtacttgacccagcttatagctgtgacgtggccgccgctatgtccatcgtcgccgtcagctccggcgtttttgccaggtaatggatgaccgggaaatggcggcagggatatcagctgacgtggcagtggtccttgcttcggtggtcccaggtgtgctacgttgtttgtcacgcggatcaccgaagacggcggcggagcgactctcgagtaccgccgtattagtacggtcaagtaaatctgacggaagcatgtcttggccttccacatgggggtttatcagaagaccggaggactctgtgtctagggtcagaatgctgaatgccggcggttcttcttcgcgcgctacggccgaggaagacgaagagagaaagaacgcgacggggaaagccaatttgggcctgttgggctttcaattcttactaattgactcgtcgatccaactcggtcgtgctaaataaattcatgggtcatatcacagacttgctcatgaaattagtacaactaaattattttgtgattttaaattttcctcttcaattaccgatttattatgtttacaccaccaaaccataaaatgaaaaaaaaattacaaaatgatggtatttattatgagaaaaataacggtatccccaatatgtttttggacataaaattaacttattgaattgagagggtacatcaaatcaaatatatgactcacattggctgtaccttattaccaccgaaataaaaacatgaaaacaacgaatcaaacatattacacagcacagcacagccggagaatcatgacgctcacagagctaaaactcaatcgatcgaccaaaccgataaataaaataccgaccactatgatagttgttggttcaaaaacacaagaaagagaccatgaatgaaaccctctttctccaaaaacaacccaattctgtggattttttttacttgcggtggagactcgacagcttaccgagtttcatcttccaaagcacggaatccagcattgagatcgtcgtacaatttcttgaatttttccaccagtgtatcctccccttctgctgggtcttcgaacttctgagacctgtagttcccataattccgtttcagaccattttattagagcgctatgtaacagagtcatagagaaatcgaggagaagcaagtcgtttgcttacactaaacggtagaaaagatctcctaagcgatgcttgataagagtgtaggtaatcttttgaccgtccattccagctgctctctcaaccgcctgtgtatccaaaacaattaatgggtttttacctagacaaaccaattgaccttaatccccacttagcatagtatgtataaatctcatcttatttacctggttggctaggttgtagaaatggataatgttacgcatcatccacacggacttgtagaaaggacagaatttgtcatatctgtcaaaaaattcatccaaaaggttcaagagtgaataacccgttgagagagaaagagagagtactaaaccaaaacgaagggagccaacaaatcttacggtgtaaacgcgttttgagcaaggtaatcttccctcaatagcttagctgtttccaatgtgattttgtccccttctgctagcgcatcttttcctacaagctgcacacaaaaagcaatgtgtgggtcaaataagttcctttcgaaaagaataacgtgctagcactgttttccttctataactcaagtcaagtttacatgccaagattatcgttcaaccccttcaaaatgtattagggttgctgagacaagagttcattggtcaccacaatagatacttatacaaggataagtgatacatacctggacaatttcattaagatcgtcttccctctgcaacacctctctggcctttgtcctgatgttgatgaaatctggatcgaacttctcatagaaagattccagtgcctaaaacaaaaagcagcgttttatatacaagatttctagatagtaaaccaagacaagtttgaaccgagaatatttaagcataccgttgaatactttgagtaagaaatcaaccaattaacagagggaaaatgttttctctgggcaagctttttgtccaaaccccagaagacctgcagaagaaaagagaaacaaccagaatggaagagtaagcatttcaaagtggagaaaaaaaatgcttaaatatacgagtctgcggcagatctaaaactaaacaccatctggttcatctcaaccaacatatacgactatgtaatctacaatggaagatagggaagcagacatgaaccaaataatcacctgcacaatactaagggttgctgaagtcacaggatctgaaaagtctcctccaggaggcgaaactgcaccaacaattgtaacacttccgttacgttctggtccaccaagacattttactttaccagcacgttcatagaaagatgctaaacgtgctgctagataggctggatatccactgtcagcaggcatttcagcctataaaacaaagcaaaataggtgtcaataaactgagaaaaagagaagtgagatgaggacaacacgaacatccatatagcaaaagtgaaacgcataagattaccagccgtcctgaaatttctcttaatgcttctgcccaacgggaagttgagtctgccatcatactaacattgtagcccatatctctaaaatattcagcgattgtgattcctggaattcacattaaaaaaaaaaaaaaaaatgagcataggcaatgggattcatcaataactattaaatctgtgtgcctgaacattacctgtgtaaattgaggcttcgcgagcagccacaggcatgttagaggtgttagcaacaagtgtggtacgtttcatgacagattcctcacggccatcaggcaacgtcattgtcaattgtgggaagtccataagaacctaatttatgagaaacaatca

SEQ ID NO: 36413 - DNA, 1806 bp, Arabidopsis thaliana landsberg
atcgaacatgaaaaatggaccctttaatacagccaaagttgtgtgttggtaattgtaaggaaacatcgatagtgattaacactaccctaagaccgttgaaagaaatcaaaagaatgaaccctctttgaaaaatttaggagacactttagagaacttatgaatagttttttaaaaaaaaactctattattcatttggttctacttgttcaacttggttaaaaatggaggaaagatgaactatttatagaatccaaaactacaaaatatctaacaatatttatcctaatctagaaaacattcaaccataatatctagatttttctctgcaaatatatctagatttttcgacatgtatatcaagataatcaaagaataggattcttaaaacacttaaagaggtgatgatattttatgatgtttctagagaagctctagaatttgaatttggtccaataaaggataatcggataatgaaccaataattaagtttgactcaaaaattaattcagtttcagtaacactatttgttgtggtcttgtggacacaaacaatgagatctatacaactatgggtgatatgaatcccaagtaacaaataaaaagggcaatgaactgatagtgatttgagttgaaaattcataaaagttaatatggtgatagaagttaaacatacattggcctttaccgactaacccgaactgaaatcaatctaacaaaaaataggttagattgattcgattggaattttgtcaagaataagaaccattatcttgaatttgtgtgttagcaatgctacatcaagagtaagatagaaattagagactatggattcgagttagatgtcaataaaccttaacaatatggattttttttctccgattaatctaactaattggcacgttaggtgaatttcaactataattggtctccgtttgcttttgggaaagagagaaaaatgcaataataatgattggcacacttgatgaaaactgaatcaacatgaaacttgacttttaatattgatggcattgcatgagttctgttaccgaccgtcaataaagtgtaacttaacgaatctcttttttttggatttttctaaaacactgatcctatgacactcttacatattattttatcttttaaatgtaataaaagcaagaaaacatacataatattaatatatgttcatactatggttcatacaggaaaattcgtatcataacattttttcatcatttatttgttccatagagaggctaaagtagggataaaacgtcacctcttattcacttttcttttatttcgtttaccaataaaaataaataatatatgaaagtaacatggtagtataattggagtgaatatgtaagaacattaattggaatacaaatttactacaccaaaaactatttttaaccaaatatgtcaccaaattcaatagaattgacactaatttttattgggaacacatgttcccatcatggcctctttcctcctccactggttattactgataaaataataacattagacacttaacaacggttgattctctggtattaatgaaaaaagaatttcgaaagtgcacaaaatggaccccaaactccacaaaacctgcaacacactcaattatacgcacaacatgcaaacaataataaacatcactgaccatccaagtatttcttctatatatgtagactctcactcttttacgactcaaagagcaaagagctaaagtccaaaaccaaacacaaaaacaaaaatctaaatttctttcttgggctgctttcaatatgggtcctctacc

SEQ ID NO: 36414 - DNA, 5157 bp, Arabidopsis thaliana landsberg
  unsure (1)..(5157): unsure at all n locations
aaaatgatttgctggtgccccgttttagtttctgctccattttaaactttaccatggccaggggtgacatctactggtgctcctccgaagcttgtacgtccaaaaacagatatgtggcttgtatctgcatccatgagaatactggatggtgaatgttcttctacagctcttgcatataacttggggtggttatcacatccaggaggaagtgcaattgcagctcagttgcttgaacttggaaagaacaatgaaattcttattgatcaggttcttcggcaggaactagctttggcaatgccaaagatatactcaattcttgcaagattactaggttcagatgagatggacattgttaaggctgtacttgaaggtagtcgctggatctgggtaggtgatggatttgcaactttgagtgaggttgttctcgatgggcctcttcaacttgttccctacattcgagtcatacctaccgacttagctgtttttaggggactatttgtggagcttggtgttcgagaatttttaactccatctgattatgctgatgttttatgtagaatagctgtaaggaaaggtacttcacctcttgatcctcaagaaatcagggcagctgtgctgattgcgcagcagttggctgaagcgcaatttcttgacaaagtaacaatctatttacctgatgtttctggtcgactcttcccttcaagtgacttggtctataatgatgcgccatggttgactgcatcagacaatcttaacagctcgtttagtgcagagtctacaatgctattgaatgcgaaaagaacaatgcaaaagtttgtccacggtaacatatctaatgaggtagcggagaagcttggtgttcgctctcttcgtagagtcttgctggcggaaagtgctgattcaatgaattttagtttatccggggctgctgaggcctttggacagcatgaggcgttgaccaccagacttaaacacatactagaaatgtatgctgatgggcctgggattctttttgagctggttcaaaatgcggaagatgcaggagcttctgaggtgacattccttttggataagactcattatgggacgtcttcactcctatctcctgaaatggcagattggcaaggccctgctctgtattgtttcaacaactcggtttttactcaacaagatatgtatgcaatctcacgcattggtcaagcaagcaaacttgaaaaaccttttgcaataggaagatttgggctgggatttaactgtgtttatcatttcacagacatccccgggtttgtttctggagaaaacattgttatgtttgatcctcatgccaatcatttgcctggtatttctccaactcacccagggttgcggattaaatttgctggaagatatatattggaccagtttcctgatcaatttgcaccattcttgcattttggttgtgacttggagcatacatttcctggtacactctttcgatttcctcttagaaacgccagtgttgctcctagaagccacataaagaaagaaacatatgctcctgaagatgtgttatccctcttcacttccttttctgctgtagtttcagaagctttaatttttctgcggaatgtgaaaacagtatcgatttttactaaggaaggggctggtcatgaaatgcagttactgcatcgtgtttgcaaagatcacaatgttggacaagatactgaaccaaagccatctagtcaagtgtttagtcttcttgacgaaaatatttttgctggaatgaataaagatcagttgctaaaaaaactaagcaacactgtagttaaagatctgccatataaatgccagaagattgtggtgaccgagcaagattcatctggctgtattttacatggatggataacaggagaatgtctgaatgccggggtaagtaaaaagaacttgaaccttccagaaatgtcccataagttaataccatgggctagtgttgccgtgcatataaattctgtcaagaatgaaaatgtggaggatctggctgctagcatttctaatatatttgggccatccactatttcaattcagaatagaagaaattttggggggcgtgcattctgctttctgcctctacctataactacaggcctccctgcgcatatcaatgcatattttgagttgtcatccaacaggagggatctttggtttggtaacgacatggcaggggatggaaaagtacgctcggattggaatctttacttgattgaggaagttgtcgtaccagcctatggtcatttgcttgaaaaaattgcatctgaacttggtccatgtgatttgttcttctctgtctggccagtaactctaggaacagaaccttgggcatccttggttcggaagctctacagttttattgcaaataacggtcttcgtgtcttatataccaaagcaagagggggccaatggatttcaactaagcaagcaatttaccctgatttcagctttcctaaggcggatgagctagttgatgtccttgcagacgctggtctccctgtaattaatatctcaaagacagttgcggaaagatttggagaggcttgttcatccttgcatttaatgacaccccaactattaaggactctgttgactcggcgaaaacgtgagtttagggatagaaatggcttggccttggcattagaatactgtcttcttgatttaaaagttccttttctggcggatcttctttacggtctacccctgctacctcttgctgatggttcatttacaacctttaacaagaatggtactgctgagagaatctttttcgctgaagagattgggtatgaacttttgaaggattcacttcctcaccaactcgtggaccgcgaagtgccggaaggagtttatagtaagctattggctgtagctcaaagcggagaatcatgcatatgtctcctctcttgcaatttgcttgagaagcttttttttaagctactgccagcagattggcatctctcagaaaagatactttggacacctggccaacgaggacatccgacagtagaatggataagggtactgtggagctatcttaagttatcttgtgatgacctctcagtattttctaagtggcccatattacccgttgaagatggctgtctcatgcaacttattttaaattcaaatgttattcgagatgatggctggagcgagaacatgtcttcattattactgaaatgtggatgccggttcttaaatcgtgagcttccagtagagcaccctcagttggaaacatttgttcagccaccaacagcaacaggcatattgaatgcacttcttgcgatttctggtgggcacgaaaacataaaagggattttccttaatgtttcagaaggagaattgcatgagcttcggaattttattcttcagtcaaagtggttctctggtggacatatgaatgaggtccactttgaaaccatcaaacacctccccatatttgagtcatacagaagtagaaaacttgttagtttgaactgtccagttaagtggctcaaacctgatggcatcagggaggatctgttggatgatgattttgtacgcttggactcagagagggagagaactatcttcaaaagatacttacaaataaaagagccctcaaaaatggaattctacaaagcttgtgtacttaatcgcatgtcggagttcctttcgcagcaagaagctctgttggccattttgcatgatctaaatgatctggtcgtcgctgatgtttcgcttcagtgtgcaatatctacaaccccttttgttcttgcagcgaatggattatggcaacaaccttccaggtttgtctatcttattaccattttcctattctgatacgttaaatatgttaaatcaaagactaagctacagctgcaacttgatattagctatttttgtttgcatttacacgcttaatacagcaacctgatattagctatctttgttggcatttacacactttatagagaacctgtatatctctatagttgtcttcatatttttgtcctattttcaggctttatgatcctcgtgttcctgcgctacaggagcttcttcacaaagaagtctactttccttctgagaaattctcagattctaagatcctggatgctttggttggtcttggacttagaacaactctggattgttctacctatctggatgctgctaaaagtgtgtcaatgttacatgacttgggagatttagaagcatcgagatatggaagaagattattattccatatcaaaactctttctatcaaactatcatccaagacaggtgaagcgaaccatgatgagtcccaaaatataatgtccattacaagcgaagactcgtttgatggacaaacctatcctgaatatgaaacggagactagctatcttgggagcttgcttactcaacaatcagaggatgagttttggtgtcagctgaggtctatcccatggtgtcctatttgtcttgatccaccaatagaaggaattccatggcttgaatctagtaacttggtagcatctccagatagagtaaggcccaagtctcagatgtttnnnnnncctgccacaatgcacttactggatggcgagtgccagtcatcgtatctacatcagaaacttgggtggatggactgtttaactattgatatcctgtgcagacaactaatcgagatatcaaaatcttataaagaacagaagtctagttcctcagtaaatcctgaatttgagagcatgttacaaagccaaattcctctactttataccagactgcaagaactttctagggaaaatgactttcttgcccttaaatcagcactaagtggtgttccttgggtgtggcttggtgatgattttgtctctgctgatgttctttcttttgattctccggtgaagtttaccccttatctatatgttgtcccttcagaattatcagactttaaagaattgcttctagaattgggtgtgagacttagttttgatgcagcagattatatgaacactctgcagcatttgcagaatgatataaaaggatcacagttaacagatgagcagataaattttgtcctttgtgttcttgaagccgtgcagactgtttttccgaggtgtcttcagatagtgataacaattcagtgctagttcccgattc

SEQ ID NO: 36415 - DNA, 3603 bp, Arabidopsis thaliana landsberg
ctttggttcttacatttctctatatcattttttgtccttccattaaaaacggaataaacagaatgaacggtggtgatgtcaccgtcgccggatccgacgatctgaaatctccgctcttaccggtcgtccataatgatgaaccattcgaacgacaaacggtgggacaacaacttcggacaatattcacgcccaaaaactgttacatcgctcttggtcctcttctttgcgccgtcgtgtgtctatgcgtagatctcgggggagatgaaacgacgacggcgaggaacatgctcggtgttttggtgtggatgttcgcatggtggttgacggaggccgttccgatgccgatcacctccatgacgccgctcttcctcttccctctctttggtatatcggctgcggatgacgtagcaaattcttacatggatgacgtcatctcccttgtactcggcagcttcatacttgctctcgccgtcgaacactacaacatccatcgccggcttgcccttaacgttagtctttcctttatctctttatcttcttcttcttcttcttcttcttcttttttctacataatttattcaatatttgattctttccgattgtgtgcgggtccacgggtgaattaattacaaaatatgatcgttaaataggtggattgcttcaattgaatccctacttataaaattaaacattacaatgtgtagtggtccatgttttatacgtggtgatgccagattatatgtttttccttccccatacatttttttccccacacacatttatttcgttttaattcttcttcaataatttgtgtgttcaaagtctaatgataacttgatcatttaaagttaagttattaacatacaaagagtcctttatttcaattttttaaacaaaatctttttcatatgcattttattttattttatttgtatcatagatgagatgtcatttcatgaggccctaggccaatccaaaattccatttatatgacaacccaaaaaaaaagatgagagacacgtaaacactatgtttctccagcaaaagcaatgatagtgagtatgatttaatttgtgcaagtgcgggctccaataattagctcacaagtcacaactataatcattgtttacttttatcatgtttttaaactataattaatcgtacgagagatatcctatgattaagagaaaactcaccagtcaccacgtatctaattatgataagctaataccataacttaatggataatctaattcttgaagataacgttggtgttctgcgtggagccgctaaacgcgccgctacttctgcttggcatctgcgccacaacagcgttcgtaagcatgtggatgcataacgtagcagctgcagtcatgatgatgcctgtcgctacggggatacttcagagactgccctcgtcatcatcgacgacggatgtggtgcatccggccgtggggaagtttagcagggcggtgggtgttaggtgtgatatactctgcggcggttggtgggatgagcacactcactggaacaggagtgaatctgattcttgttggaatgtggaaagctacttccctgaggctgatccgatcagttttagccaatggttcttctttggcttcccattggctttgtgcatattcgtggtgctttggtgtgttctttgtgttatgtattgtcctaaaggagcaggacaagctctctctccttatctccataaatctcatctcaggagagagcttgagttgttagggccaatgaacttcgctgagaagatggtcttagccgtgtttggtgggttggttgtgttgtggatgacaaggaatataactgatgatatccccggctggggtcggatcttcgccggccgagccggggatggaaccgtgagtgtgatgatggcgacattgttgtttatcatcccaagcaatattaaaaaaggagagaagctaatggaatggaacaaatgcaagaaactaccatggaacattgtcttgttattgggagctggattcgctatagccgatggagtacgcaccagtggcttagctgaggtcttatccaaaggacttgtcttccttgaaacggctccttactgggccattgctccaacggtttgcctcatcgctgctaccatcacagagttcacttcaaacaacgcaaccactacattgttggttccgttactcatcgaaatcgcaaagaacatggggatccatcctttgctcttgatggctccaggagccattggggctcagtgcgctgttttgcttaccacgggaacaccctctaacgtcgttgggttcacgacagggcatatagagatcaaagacatgatcaagacaggcttgcctctcaagatcgctggaaccatctttctctccatcttgatgcccactcttggtaatttactcaaaaccttcttctttatataataagattcattgtagtttagttttcttatagatattgttacatgatgccaggggcttacgtttttgcatcaatgggaggagtttagttctacaagccaagcacaagaccatgtacacaattgatttattgtactatattgtttactaccgtaatacatatgtagatatatagtcaatggaatgggaaatttacatgaggtcaaaaatcacaaaatcggcccatttttgtaacccgcccgattatagtttccggtaccattgctttcttttgtgcttccaacgtaccggtaactttggtcccttttttttttatttggtgtgtatatgaaaaagggttaatacagatttgtgtgttcttcttcctaacaataacaactagtggcaaatccagcgcgcggtccaacctggccataccataccacgtcattgtccagcgtgtcttcttctgttttcggttttctacaaacacaaaaagcaaagaaaacaaaacatcaatgcatggtttataacgtcttgctttttaattagtttttgtcctttacactcatttatgttctttctttgtcctttgctatacactacttgtctattgaataatatgcttataatcgtaaaaaactacaagtagtcaaaatccttttggatatttattttcgtaggtagaagttggccattgcaaattacataaatgatatccaacctctagaggataaacctcattaatttgtctatattatgctgaattccataacatataaagaattatgtgagtgttaattatttaccaataaattagtataaattttgaaatacaaagcaaaaaagtttttcataaaagttcattaaaccttttgcctaaattatggcatgtgttattaagattagaaataaatattctgctagaaatctagaattctgcgacacgtcatgccacgtggcggacctttaatgtatttaaaagcccttaaactcaatgccataatcaattttgaggaaacaacagttacaaatcaaaatgactagtaaggtcgtcttccttcttctcctctctctcgtcgacctcctcctccctctctacgcctctgcggctgcccgtgtcggtggctggagtcccatcagcaacgttacggaccctcaagtcgtatagatcggtgaattctcggtctcc

SEQ ID NO: 36416 - DNA, 3680 bp, Arabidopsis thaliana landsberg
  unsure (1)..(3680): unsure at all n locations
acttcaatttagatcccaatcatatataaataagatggtttcagattttaaatggaattacatctttttaatttatttgaagttatgcatagattgttggtaaacataagtatattagcacttgtgactagcttaataatttctaagcgtgctagagataactccaaacagtacattttcaaatgtaagtaaattgtttagacatatattttaattttagataacctaagggcaaaaacaaatattagataatcttagattgtaaatacatgaaattcttatttttaatggttcagatgagttgattagtaagtagttaaccatatgatatgtaatattttgtacaaatgttattgatatattcttctcggaatttagatacccattatatgatgcatgttgttaaatgacttttgtggtatgacagaagattttggtataaagttgacttgacattattgttaatttgaagataattgaacgtgctactgttacacatctgacattcgtttataaccacacctgtcactgtttagtcttctaaattaatatgcaaacaaaaaactctgtcaatgtgggacttgtaggggtaactgaaatatacgagtaagattccgtaataactaaaagtgtaattttgatttacaggcacgaggtagtaggtgaggtgttggaagtgggatcagatgtgagcaagtttactgtaggagatgtagtcggagtcggcgtggtcgtcggatgctgcggtagctgcaaaccatgcagctcagaacttgagcagtattgtaacaagagaatctggagttacaacgatgtctacaccgatggaaaacctactcaaggtggcttcgccgacaccatgatcgtcaatcaaaagtaagcacacgcacacaccttgtttcacaagaaacacacagagcatttgtttcttcatccacaagtaacttatttttgtttcaaaaggtttgtggtgaagattccagaaggaatggcggtggagcaggctgcaccgctactctgcgcgggagtaacggtttatagtccgttgagccacttcggtctaatggcgagtgggcttaaaggagggattctagggttaggtggagtagggcacatgggtgtgaagatagctaaagcaatgggacaccatgtgactgtgataagctcatcagataagaaaaaagaagaagctatcgaacatttaggagctgacgactatgtggtgagctctgatccagcagagatgcaaagactcgcagattcccttgactacatcattgacaccgtaccggtgtttcaccctctcgacccttacttggcttgtcttaaactcgacgggaaattgattctcatgggtgttatcaacactcctcttcagttcgtgacccctctcgtcattcttggtcagtactatttcttgcgtttaaatcatatctagctaataacaacaaaattcaatagcaaacctgatgtttttttctatattttgacagggaggaaagtgatatcagggagctttatagggagcattaaagagacagaagaagtgttggctttctgcaaagagaaagggcttacgtcgacgattgaaactgtgaagatcgatgagcttaacattgcgtttgagaggcttcgcaagaacgatgttcgttacagatttgtggttgatgttgcaggaagtaatctggtggaggaggctgcaacaactacaaactaaagagggcagggcacattgatacatgaacgaaaaattgtaacgggcttgtttgtccaacgaatgttttgttgttgtctttttcaaatggttcaaacacgaatgctttggctttatttttttctaatcaatgtggattttctgtttacgtgtgtttgtcacaagaaaatcattatgataagaattttcttccacttgaactcaaatttgttaacaattctgaatctgaattatggctgacaccaattgaaactgagaaccagtttaaagtgattataaagaaaagtgaaatctttttattgccaaccaactttgggctaagtattaaaagaaaataatacttttttgataagaaaaaaaaaaaagaggaaaataatttgattataattaaaatctaaaaactttttcgcggaagcgttaaggaaaaatctttgatctttgaaaggaagagagcaggcgcaatcgagtaatccaaaggagttgcgttgttctgcgatcacgaagcggtctctcggaaaatctttcgacgcaagacatcgattcgtgtatttcatttttgctttggaactctatgcggaagaaccctaattgattcgccatgggagattccgtttcttcttcatcccgcgtttctgttcatcaatctcttggtgctggttctggtcagtctctctattcgattcattgaagcctattttggcttttctcgagtttcgctttcgattcaatcgctctcgagtttcgctctattcggaatctggaatgttgcgttgattggcgtaaattgagggttttgtttgattgttatgtgcatttggggaatttttaaacttgatcataattatgaacaacaatttcacgtatttggagacatttaggaatctcttgactcgtgactcttgtgtccttaaatgcaattttttgcagttgctgatttgctgctatggagaaaccggactggtgcagtcattttgctaatctcttctactgggttttggttcttattcgagagagctggatacaatctcttgtctttcgtctccaatgttctgcttcttctcgttgcgatcttcttcttatgggccaagtctgctacagttnnnnnnnnnnnnnnnnnnnnnnnnnnnnnnnnnnnnnntgttgtggaaaaagatgaaacctttatgttgatagtagaggttgctttagcttcttctttgttaagttactgcttcaccatttgaaagagactactttggagcataaaagcttatgaatactggaactttgctttgacaacccgagtcatgtgtgtttttattcttataaagtatacaactgatgtggttttatttcagaccgctacctccagttccgaatatggaaatccctgaggagtttgcaaataaggctgctgatgatcttcgggtttggatcaattatgtactgtcaattgcaagtgatatcaccatagctagaaatccgattcgtctccttcaggttttctttcatcacttgtggcaaaccatttgttgtatctttttgtttctgcatgtgatgtatctcactgttcacatctcgtttgtttttgctgtgaaacaggtttctcttgtcttgtgggctatatcctatgttgggactttaatcaactccctcactcttgtttacattggtgagcgtctaaccttttcttgtcggttatatagtctatgatcttggttgatatgattaactaatgtgtcgctgtttttatcttgcaggagttcttctcagtctttcttttcctattgtgtatgagaagtaccaagaccacattgatgagaaagtgaactcgacttctaaattcgttcgaaatatctcaaggaagtttccattgcccataaacaaagagaagaaacatcagtaggtagtgtaagtagtctctgatgaattgatcctttgtggtccgagaaagagttagttttcgactgaggttttactaagcgcc

SEQ ID NO: 36417 - DNA, 1484 bp, Arabidopsis thaliana landsberg
cctggaagacaaaaaaggggaaaaaccattatccttaaagtaaccaacacttctctctctctttcttcaatggatttgcaactgaaacaatggagaagccagcagcagcaacaacatcagacagagtcagaagaacaaccttctgcagctaagataccaaaacatgtctttgaccagattcattctcacactgcaacttctactgctcttcctctctttacccctgagcctacttcttctaaactctcctctttgtctcctgattcttcctccaggttccccagtgagtcttttcttcctcttatcttatctttcttgataaagaattagacttttcattcatatagtttgtgtttaattgattttgattcctttttgtagagatggggagcttctttagctgggcacagtggcaagaacttgaactacaagctctgatctacaggtacatgttggctggtgctgctgttcctcaggagctccttttaccaatcaagaaaagccttctccatctatctccttcctactttcttcaccatcctcttcaacacctacctcattaccaacctgcttgtgagtctcgagaacagtcttcatctatctattttttaaatataaatgggttttgtgctactggtgttggagttgtgttcccaagatccagactttcaatattagtatattatctcgctttgccaatcttgaagatctaaacatgtgtgaatgggattaagtaggattagaatcttgttattgatctgatatgtgatatgaatgttgaaaacagggtatttgggaagggcagcgatggatcctgagccaggcagatgcaggagaacggatggtaagaagtggagatgttcaagagacgtcttcgctggccacaagtattgcgagcgccacatgcaccgtggccgcaaccgttcaagaaagcctgtggaaactccaaccaccgtcaatgcaactgccacgtccatggcttcatcagtagcagccgcagccaccactacaacagcaacaacaacatctacgtttgcttttggtggtggtggtggtagtgaggaagtggttggtcaaggaggatctttcttcttctctggctcttctaactcttcatctgaacttctccaccttagtcaaaggtaataaaaagaaactgtttttttttctcttaggtctgtctgttttagctgttgaactttatggtcaaaacattaaacttaaacacattgacttttttatttctttagtgttgagccaataagattcatggttgagattttagacaattgttttgaataataatgaaatcgatttaaagcaatactgattcttgatttattagtatgaagtatgaactaatgatatcacaacttggtttgtatgttcataacgattgtgtgaaaagaggggaaatgttggaaattgagagagacatccttatcatttttggggttgggtgggtttggtttgttttgttggaa

SEQ ID NO: 36418 - DNA, 5767 bp, Arabidopsis thaliana landsberg
taggttttgatattttaactgttgttacagtaagaaatgcagaaataacttaccgcagccaagtgggaaacggtgttctccatagtagataaggtagcgaatagaagtacctgttatgatcatatgagtattggggttgaggctaagaatgttcgagaaacttaagatttagccaggttatttggttaccatgagtagaactggtagtgcagagagcgagcaaatacaatgccgatgaaattcccaacaaacatggccgtgacgacatctgcgaatcaagtggaatgcctgtaagtatggacatagggaaacataagctaaaataacagtaagagcttacgttctttcgtaataatccgtgaggctgacacatcactgaacgagagtgaagacggaagtgtcaagaagaaatgcctagaacgcatgaagcctataatcccgccttcatgcctataaaatcaacatattaattacaactgatgctaaacacacaaactgcaactgctttcaaattgcagctgccttatgagaattaatattgtgattgtacgtacttgcaccacttataatttgcgaacgccacaaggagaaaaaggtgagcaatgagcaagcatactgcaaattctttggacacaaaaactcgttctggaacaaatttgaagttaacagacctgttgagagctcaaactagagttagaggtcaaaagacatttttagatcccatcaacatgttttttagatttggcgggagagaagcgaacaataccagaaatgaatgaaaacacgtccaagatcaaaggcgtttgctatgtatgaaaccggatatgttatcagaaacggcagtcccacgagtatctgtataaccattcattgaccagctgaatggtacttcttgcataatcaaaactataattcgctggataatgcaactcacctatttacattgaagaaactacagttaacaagtttccaaattgtcatggagaaacaatgctacgcatacaaattggtgaataagaaggcttataagagatatagtgaaacctgaacaagagctgcaccagccaaagcagacaccactccaatgatattcatggcctgtgaatagtaaaacttcacatatgaagaaaaacaatgctagaagaataataaagcaaatccataaactaattctcttccacgaacatatataccttaagtagcagaagtaacaaagttggagcatacaaaagtacattcatctttacagaaacagctccactgtataaaaagaagggtaagcagactagtcaatctaaagaatcgagaagcaaaagcagcaatctaacctgaaaacaagcatccctagatgccatttacgatagagaaagagagccattgatgcatgtaggagagtcatggcaaaacaatcattaaagagacggagaacaaagattgaatgtatcctcttggataaacatagtagacttaatgcccaccatggcacctgaaatacgtaaggatacaagaagagatatcatcactgaattcactaaaatcactcccatcataaacagacaaatcaaaaccaaaatattgttcattaacatcgtaaatggacaacgcttgacaacgtctacaaatacttgatgaaaagagataagaaataagtcttcatttataccacatcagtcttcacgtagatgaacaagacgatccccagattgacaatgtagagaacaccaaaaagaatctgcaaaatgtaagagagtagaattgagacaaatgaagcgatggatggatcaaattccgcagctaatccaaagataggagattcaaagagagggaattgcaagcacctgagcagggtagacttcccctccagttaagttctgcactgcagagtaaacatagaggaaacctgctggataaaccaatggccctgtatcgcctttcaagttcccatagtctctctctcccccgagaaacccactaacctgccccaattagataaatttcacttaaagactactactttactttgaagaaaccacagttgaccattgacactaacctgtgacatgtaagcatcccaatcgatcttcgtgtctgttaaaggcaaatgacgaaatttggtttaaaacctatgcaaatgcacatttcgagggatacgcaagcaaaaaaaaaaaggaggtaaatagctctcacatggaacataggcgataataagtgcgactaggattgcatcagcaagaattagcgcgaatgcgaatggaactgcaggttttttgaatagatcggatcgattcgtctccttccccagccgacggctacgagaagctctcaaactcgccggtgatgaggcgcccgccatgaaaacagagcaaatcgcatcagcgtctagccaacgccgcgtaacagacaactacttccatattactactcttctaattagcccaaattaaatgagcctattgggcttcttgtcttagtcggtgtagagcccaattgttgttttattttttaataatgcaaaagtattaagcgataaataaataagcatcgcaatcgtcccaaaactgtgtgtatgcatcagacatgagcatatagagtaagcacgtgtccacactttttcacaaagttatctaaaaacaaaaaacaattaattagcattcgacgtgtacatatcactcgccacgtgtctctccatcacaagagccttggcctctttgcttcttcttctctattaatatcatctcctgattatactctcttttgaccaagcagcttcttctccatctatccaacatctcaaatctcagtaatcttgttccttcgattctgttttggacgtttgtaatggattctcaggacatcagataccgcggcggggacgacagagacgctgcaacgacagctatggccgagacagagaggaaaagcgctgacgacaacaaaggaaaacgcgatcaaaagagggcgatggcgaaacgtggtctcaagtctctgacggtagcggttgcggctcctgtgctcgtgacgctcttcgccacgtacttcctcggcacaagcgacggatacgggaatcgagctaagtcctcgtcgtggatcccacctctgtggctcctacacacaacgtgtctcgcttctagtggtctgatgggtttggctgcgtggcttgtatgggttgacggtggcttccacaagaagcccaatgctctgtatctttacttagctcagtttttgctctgtttggtttgggatccggttacgttccgcgtcgggtcgggagtagcggggcttgcggtgtggttgggtcaatcggctgcgttattcggatgttacaaggcctttaatgagataagtccggtcgctggtaatctggtaaagccgtgtttggcttgggctgcctttgtagccgctgttaatgtaaagcttgcagtcgcgtgagatctgtaaacgctatacgatgatgtttgtagagtctgagtcatatgagtgtttcttgttgtttttgttttttgtgatatataccataaaagatgtctttgcgatccaatggtctggtcattgtggagtaatagacatgaacatgatatacttgagaaataatgtgatattgtagaagttttaagcgttggtctgaaatcaaactgtgagattcttaaaaggcgatcgttttacttttatgtcgccgaaacggaacaaattcaaacggtaaagccaactatactttgatcagttttgggttgggccgttgacactgttttgtgggcttctcagtcagtggtaaacctaaaattaatataggaactcgaggattagggcccaatccattttaacacgtgatgatatcatgtaaggtttggagggaatatacaaaaagtggatgaatgatagcgaacgagaggtccttgtgctttttttatttaccctcgagactcgtgccgacggagtggccgtggctttcgtgcaacagtctcgacccatacctcgacacgtgttgaaaacggtccattaagagtaagacatctgtcaataggacagctgtcctagaggtcactcgtctctcacaatccaatccctttcgcttaaattaaaactaaaatggagcatggcagcaacatgccacgtggctcaccagtttcaaatctgagccgtccggtgtgatataagtctttttaaagagagagagagcggttcgtttgtctgcaacggcaccaagtctttgacaatggctgaagatgaaatagtagtcgaagaagagcaatcacagccacaggagattactccagttccaccatcttcttcgtcttcgccttcgttagtggtggaagacgacgatgagatgaagctcaagcacttggaattcattcaagtcgcggcggtttacttcgccgcctgtttctcgaccctctacgagttggctaaagacaacgctggtccactcaaactcggcgtcgagaacattgaagattgcgttcgaaccgtgcttgctccattatacgaaaaattccacgacgttcctttcaagcttctccttttcgtcgatcgtaaggtaacaatcagaatgtaattcttaacttgaatatcgcttcggtttcatgagtgagaggcaaatgatttgcttggttttcaggtggacgatgtgttcttcgatgttgagacatatgttccgtcattggtgaagcaagcttctagccaagcgctcacggtggccacggaggtgcagcgcaccggcgttgtggacactaccaagagcattgcaagaagcgtccgggacaagtacgagccagcggcagagtattacgcagcgacgctgtggcgtttactgaatcaactgccgttgttccctgaagttgcgcatttagtgatccccacggcgttttactggtcagagaagtacaacgatgcggttcgttacgttggcgacagagactactttggggcagagtatctgcccatgattcctattgagaagatctctgatattttggaacaagatcagtgtcgagctgattgactatttactcttctgaagccaaagattccttcttctatagagtatatatactgtatgtactctgtttttctttcctttctgcaatttgctatcccaagagatgtaatctttcttcaatatttcatttaaacaactttgccttttaataataacaagaacaagagacataaaggaaactgtcctcttcagtctcaacttttataaaagacacaagacccaaaaagtagtatctgtttactagtaaggagagtgtctgtttttcttgcggttccttggaggcttaacaaccaactcacttgaagtccaagaccggttaatctcggtagcatcctcatccgacttccagcaacatagtcgcccatcttcaccaccagtccatccaaataaccctgcagctcctccatactcgcatggcatctgcagaacgctccttactacatctatgtgacctccaccaagaatagcttcagcggtaccgattgatccaggctgtttgtagttcaccggaaaataaccaacggttcctgcgcacgttccaccgatcacccataaatcttcacctcctggacaatgacaatcaacaaaataatcaacctgcaaaagagtaatgggaaagttcaactctgtaagtaaccattaggtttctggttagtgttaatattttactagaagggaaagaatgagattattacattatcttgagtccaactatctaatgcgagttccccagctttctctaggttgacttcacagcttccgtcttcc

SEQ ID NO: 36419 - DNA, 4571 bp, Arabidopsis thaliana landsberg
gatccatttttgtgagctagctcaaacttgagaccaatttatttttgaaataatgatacagttctggagtgagctgtcgtcgaaagctaggcatgagcttcttaggattgacaagcagacactgtttgagcaagctcgcaagaacatgtgctgttccagatgccttggactgttgcttgaaggcttcgcccagattctttctgctgggagggccgcgtacgaaaaaagaatgatgggaccctccaaagataactgtaaatctaatggcactaggaaatgtacggttgcgtaccagagccctcctgttcatcgatggggaggtctcactacaacacgctcgggatgtatcactcttcttgactgctttttgactgcaaaaactttcaaagggcttcaaaatgtaagttcatcaaaggtttccctatatttggtcggtcctgttttacctagctaatctattagttctagcaggtctttgaaagtaaccgtgctcgagagagggaacgtgagttgctttatcctgatgcttgtggtggcggtggtcgggtatggcttagtcaagggattgctggttttggtaaaggtcatggaacaagagaaacatgtaatttgcatacgcgcgaggctctcttgtgatacattagtggatttttggtctgcacttgaagagcatagtcgacagtcacttttgagaatgaaagaagaggattttgtggaaagactaacttacaggtttgttatttgctgattcggtattcttggattttctgtcacaagattagttgagaaagtttttggatatgatcttgtttctcctactaggctgtagtgtgtattatgaactcttactacttaagctagtatatttaaaattgaataatgattagggattctgtattttcgattttggggatatgcctatcaagtcattgcattacttagttgttatgttctccttctcttctcttcgttgtcttgttactttttctcctttccttataactagttgacatttcaaactacagattcgactgcaagaagttttgtagagactgccgaagaaatgtcattcgggagtttaaagaacttaaggaacttaaacgaatacagagagatccaagatgtaccgactggttttgtgttgccgatacagcctttcagtatgaggtcttttatcttttttaaccttttcttcttactttgtagattcctatattctatacaacaagatcactggttttcaagagtaaatttatcaatataccttagaggcttatattgcaaggtagaatcaaaagtgtaattgcaatttctcaggtggacattgattctgtccgagcagattggagtcaatattttacagagaatgctggatatcatcatttcgagtgggctattggaacaggagaaggcgaatctgatatcctcgagttcaaatatgtaggcaatgatcggagtgcccgagtcaatggcctagaccttcgtggattacatgaatgctacattactcttagggcatttaaaaaaaatggccgcccctcagaaatatctgtcaaagcccatgcattgagaggccaacagtgcgttcactccaggcttgtggttggggatggctttgtttcaattaaaagaggggaatgcattcgaatgttttttgagcatgctgaagaggctgaggaagaagaggtaaattgaagatttataagctttgtgactgaaaagcgttcagatatttacagttttgcagatatgatatctccttgctgaaatataattattttgtttccaatgcttctataaggatgaagtcctgatagacaaagatggaaatgaacttgatggtgagtgcttgcgtccacaaaagcatgctaagagttcagaacttgctcgagagtttcttctagatgctgcaacggttattttcaaggaacaggtttgttatagattcctcctctaagttcaccttccattcattgttattttgggctttattaaggtgtattcatttctatctattcataataatatcttaggttgaaaaggcatttagggatggtacagcccgtcaaaatgcacacagtatatttgtctgcctttcatcggaactgttagagcaacgtgttcatattgcctgcaaagaaattgttaccttggagaagcaggttcggtcgccatcttgattggattatttttgacaatctatgcaatttaacaagacatttacacttttatctgtccaacaacttcatcatctcaacacttgcagaacaaacttctcgaggaagaagagaaagaaaagcgtgaagaagaggagcgaaaagaaaggaaacgaattaaagaaagggagaaaaaacttcgtagaaaggagagattgaaggaaaaagaacgcgaaaaagagcagaagaatccaaaatttagtgataaagcaatactgccaattatgtcaagggaagaagaaggctctcgaaatcttgatgaggacactaacaataccataagatgcgaggagtccggaattgaaaatggagatgtagatttgtcttcacctggttctcctgatgatcaagatgaagagtgtttggatggttgcatttctccaagagttgaaacccactcttgtgatagcactgataaggagattatagatcatgaagatgaaaacggctgctttacaccaagacctgctcataagacggcgagattatggaaagaggttcagactgatcattctttgaggttgtcagaaaaacgcagatttacagagaaaacttcttttgtcagtagttctgaggcaggatactgtaatgatagattagaaatgtcttcgggacacttcaatggctcagataaaaatgtgagagtgaaagcttcgaaagctggtggtagcccaaatagcagtaggtctcatgaggagtttcagtgttcagatggcaggactggtgagaggtatgattaccattcttgcagttgcaaacccattaatggttaccgggaaaaggtagagtctaatacatctgcaaccagaggcatgcgagaaccgaaatcagtattcaaatctgactctgatctggatgtctccaagcttaaccgagccaataggtatactcaatcaggctatagacgagagataagaagcaaaatgaataatagtcgaaacgcttgtaagatggatccagtaaatgtgagaaaggtcttggactctgtggagccgaagcattcacgaaacagctcaacctctgacgtattatcacttacaacatacaaagcagaagagattaaagatgtaagtcccactgtgaagccagctggcacaccgtctctatgcaaggctacagataagttgggaaatgggagttttaataattcgacggaggtagacaagaagatggaagttcacataacactgaagaatgattacctgtactcgaaagatcctatgatgagtagaagttctagttcaaacaatggaaacatcgaatcctcctcgatgtctgattccgaagttgccagtcagcaatctgaaggaagagagaatctagtggatactcagaacgatatgcccgactgtcacgagaagatggtagagaaagtgacagagatgagtatggatgaaagagatgttttaaagattaagaatatatctaaccttccagcagacaacggggaaagtaaattatcaggaactccttttatggttcctagccaaaacatggaaaatatggtaccaggtcttaatactggttcctacctgtcccagccacaaaacatgatactcccccagatgcttaaccagagtataccattgccagtcttccaggctccttcaacaatgggttactatcatcaagctccagtctcttggtcttcagcttcaaccaacggattaatgcaattccctcatcctaaccactatgtatacactggtccccttggatacagtctgaatggagagtctcctttatgcatgcagtacgggaccccattgaaccattcagcagctcctttcttcaattccgggccagttccaattttccatccgtttgctgaaaccaacacaatgaacactgttgaccaagctcaacctcttgagccattggaacacagttttttgaaggaagcaaatgagaggagatttaacgaaatgcctttaatggaaactccaaggaaaagatgtccacaaactgatagtgatgagaacttctccttgttccactttggtggcccggttgctctgtccacaggaagtaaagcgaatcctgctcgatccaaagatgggattttggaggatttctcgttgcagttctcaggagatcatgtttttggtgatccaaccggcaatagcaagaaggagaaagagaacacagttggtgaagagtacaacttgtttgcgacaagtaacagtttgaggttttctatcttctaaagtttttttatacaatttcttggattgtttggcgtcatggagaacgcagtaaaatacctttggttgttttatttcatgtaaagatctcttcatattttaaaggttttgttttactcagaatgaataatgtctccattgttgggtgtat

SEQ ID NO: 36420 - DNA, 2594 bp, Arabidopsis thaliana landsberg
ttaggtcttaactagggtttccattttattggtctcttcttattgatgcagccatttggtcaagtcccagttttcctagacgggggtcttaagttgactggtgagtttaaaactacattttcaactaattaatgatctaatgaattttgatataatttgttttcgtcagaatctcgagctatatctgaatacctagcgactgtccataaatcaagaggcacacaacttctgaattacaaaagctacaaaacaatgggaacacaaagaatgtggatggctatcgaatcttttgagtttgatccactcacatcaacactgacctgggaacaatccatcaagcctatgtacggtctaaagacggactataaggttgtgaatgaaaccgaggcgaagctagagaaggttctagatatatacgaagaacgactcaaaaattctagcttcttggctagtaacagcttcacaatggctgatctttatcaccttcctaatatacaataccttatggacacacatacaaagagaatgtttgaaaaccggccaagcgtgcgccggtgggtggctgagatcacagctagaccggcttggaagagggcatgtgatgtgaaggcttggtaccataagaagaagaattaatcttataatcttgtgatgtactttcggtgatttctttaagattgatgttatgaataaaaggcaaagcttttgcaaaaatcactcatttttttggccataatgatttcaaaattccaaagaataatatatacttcaatatacatgtcacaagcttaaatgtcaaagttgtttataatgagcatttttgtggatgtggaaaatgtgaaaattactctgttccttcgaatgtttctatacgaaattatagttaggatttagtaatgtatttctccataattatgctaaatttagttagttacttcaatatgattaaatactttattgaccccaaatttgtaattgtaccagattgtcaaaagtgtgaaaccaaattttcttttcttttgatattgttttgtttcttattatctctcgttctatcgaatgatctaactcgagcatccaacgatctaactcgagcatctaacgatccacgtggacccaacaacgtcggtcagagtttgactagtagatgaaggactattcttgtggtcgttgtcacgcggtggctgatattttctcttatttttattttattttaactattttttacgttatatttaagtcttgaaccaatagaaacgacgaatcatacattactcagcttgactttgaaataatcctataacaaaagagcattccaagaattttatccaaaaaaacaaaataaaaaagagtattcaagcttggtggcgccgtttgtttttggtttattcactaaagttactctgttttagttgtataaatacacactcccatttgtgtatttcttttcatcaatcacaaagatctctctacttcaataaatctccaccttactttaagaacaagaaaaacacagtattaacaaatggcaggaatcaaagttttcggtcacccagcttccacagccactagaagagttctcatcgctcttcacgagaagaatgtcgactttgaattcgttcatgtcgagctcaaagatggtgaacacaagaaagagcctttcatccttcgcaacgtgagtacatataacatctgtcaagccaaaatattgtatttcatctagatactgaatcttggtcttaacaatcttgaataatgtttttgcagccctttggtaaagttccagcctttgaagatggagacttcaagattttcggtaaatacaaatatatatcattatagtcatgtttacaaatttttggttttatgatcattgcaataatagaaagcagaaacactcaaaaatgttttttttttggtgggcagaatcaagagcaattactcaatacatagctcatgaattctcagacaaaggaaacaaccttctctcaactggcaaggacatggcgatcatagccatgggcattgaaattgagtcgcatgagtttgacccagctggttcaaagcttgtttgggagcaagtcttaaagcctttgtatggtatgaccacagacaaaactgttgtgaagaagaagaggctaagctagccaaagtcctcgatgtttacgaacacaggcttggtgagtccaagtatttggcttctgaccacttcactttggtcgatcttcacactatccctgtgattcaatacttacttggaactccaactaagaaactcttcgacgagcgtccacatgtgagtgcttgggttgctgacatcacttcaaggccttctgctcagaaggttctttaagtgaatctcaaactatttatcgatcagaagatgtaataaaagtggcgatgacctaattgcccaattctcataaactctgtttttctttttgtgtttcctctgtttttctgcttccgagtgtttgatttgaatgtaatcttcgataatgagtcttgatataataaaatatttcttatcttaaagtttaactaccaattaatgttgatctcattcttcaaagttgactatcattctcctaagt

SEQ ID NO: 36421 - DNA, 3077 bp, Arabidopsis thaliana landsberg
tagaatatgccaacgaccactgctccatccaataatatttactgcacaaacctcagttcctgttttttttgctgcttcaatggcagcggcaatagcatgcacacacggatacttgtcaatgtcaaatagcttgcaagagcaagttttctcaaccagatcaaccacataactactaccaccaactccaataacatcatactcaagaaaaaagctgtttagttcagtgaccggtaagagtgttgcttcttcacatcttatgtgcaacaaatcctcaacaaacggtattaacttttgcatctttggtgtctctaaggatatctttctgtatttgttaaaccattccgtcagtttagccaccatcgcatcaatcattggtaatagcgggtatgcccttatatatcagaagacaccattaatagattcaactgtattagtggagtctatgttgtatcttgctcctggaaaataacatcgcgcccatttgttctgtccaacaattctatcaagataagcacctgcagaagaatatcttttgataaaagcagcatacagtttcttgaactcaacctctggataagccttagcgcattccatgaacttggtttcaactaactctccgttcacgttttgtatagctgagtttcacattctgggataaatgatatatacaatatccatggtcagacaacgggtatacctaccttattgccttgataaagctttgatttctatcagaacagaacaccagttcaggacaatcaagtataactgattttaactaactgaaaaaccaagtccaacttgcatctttttcaccgtcaactaaatgcaatcaggtaatggtggtgatctggatcttgagctgtagcaatgattagtactccgccatatacagttttaatactagttgcatccacaatgatcacctttctcatggctttgaagccttgaatgcacgctcccaatgcgaggaataagtacttaaacctcttagcttcatccaattcaacatatgaactgttcctggattcattttctccaacatgtgcatataacaatacaccatcttaaaaccatcatctggattaccacgtagatcataagcagctatctttttccctctgttcgccgttgagtatgacactttaacgccaactcttgactcaaccaaagggatgagatttttgggagttggagtgtctatcaaaaatggaaaatcttcacgcaaaactgatgcaactagatgtggtgtgcctctccttctgtttctcattgtaactgtatctgaccgtaagcacgtatgaatcttgttgtaagttctgaccgagaagctgtatgagttcccattcctcgcagctcctaaagaccacttgcagccctttctacttcagagcatttaaccacaaacaacactgtatccgacttcactataacaaactgaaaacggttcttatgtgcaagtttttcaactaaatctttaaccgcttgcttgctttcaaattcttgacgtatggtcacattcataccgtcttcccattcacgctttgcaataggtgtaacttcagcaccttcactcatatcaccgttatctaccacttcttgttcttcaaacctttcttcataaacaatcatgttcagatctctctgttcactattttctaccatctcatcaccttgagatggctcaccttcatcaagaatcatgttcctatatgtcgctctactacttgaaatcagctcctcattactttcacaaccaatacttcctcgatcttctctaccacatgcttgatgctgctcatgcccttaattttcatcatttacaatttccacatgcaaaacttggaatagaacttcattcatttccaaataacacataacatcatcatcattggatatatcggttttttaggatccactaattttggaatgtaactaagttttagctcagtagtcgcttcatcaaccttagcctttctacatattttgttcaccaaagcagaataagtaacctcctcaatagatgtttccattctaagagcttgatgaacttgttctcttgaattccagcctttttcgtttccccttctaacatagtatcccccataataaaaaaatatgatttttggacgattatgattcattgtgcctgaaatagaataaaaaaagcgcccataagaatcgtctaactagtacctaggtgtagcaattattaccagaaaatagtccaacttgtacaaggtgtatcgtataatttataccaagttagtactatatccactaaatcaccataccaattggagctgcacattaatttcaaattattccctacgagttggttcgattgaagtgttacaatacttgcattaacaatataattagacccagatcaagtacaaaaataaacaaggctgaatcgaatgagcattcaacataaattttagaatgagcattgaagatgaatttagaactctaaacaaaagtccctagatacacaacatcaactttttattatacaaaaaacgatttccgaactacgtaaatttaacaatggaaacagagaaaatggaaaaatcacctctgtggcgaaattgaaagacttgcgggagagggagagagcgggagggagcgagcgggagaaaagggagggagaagacgaagaagatgattctggtagggtccacttgttttgttttttattttttctttaatttttgtttggattaatagaggggaaaaaatgttacaacttggtcaacacaaagtcaaagggtattaggaacagaagaaggcattgttgaattgtttttctggtcaaagggtattagagatgatactccagaatttctctagtataatcttatctgtccttatgtaacgttttatgtattattttatgttttgggtatgatgttttctacatgttattgcttatatttttgtatcttctatggtttctacatagaaggagtgtaatatattttaggctttcttcctgtaatatattagcagtcacgataacattgtttataagaattaaatatccaactgcgcaactttttaacatcatctatcac

SEQ ID NO: 36422 - DNA, 1674 bp, Arabidopsis thaliana landsberg
caatagaaggtcgtcttgtttttaaaaaagtcttttttgattagtgcttaaacacaagttcacttgttagatgtaacatatgtgtgattgcttctgttttgttttacttatgtttaggttgagatcagagtgtctccgggttctcacgctgatgaagtttcaggtgaggaagtcttatgtttactagaccatctcttcgcaatggtttaagttcatatatgctttctataaaccttaactaatatagagattgcaaattgaatggatgatttgtgtaaattataaacattgctcttgtccttggtttgatagattttagtttctaatttaacatcactgcaaaatctggttttctatatttgtatttttgggaaagttgatgtcttaagttctgaactttgacactcattgggatcattttatattgcagtgaataaacaactgaatgataaagaaagagtggtggctgcattggagaatcctaatctccgtcagctcgtggatgagtgtatctactccgatgagatatgatcacatcatttacttctactctcttgtacaggcttcatatcatgggtttatataatgccttagagaccgctctttaatctcagaatacacagtttaagggtgttcaaatgttgtatactacttgataatgatacagaatctcagaatacacattttaaaagtcttgtacttcttcttcttcaaagttcaagcttctgcaatgttttagcatcaacaaaagttagtaaatcaaattcttttaattgtatagatatttctgttgtagttcactctttcgataagaacgcttggttccatcagtttcaccaaaatctctaataaccaacttgagatatgaataacttgtctttgactgctcctttaccatggtaacaggataaattgtattaagatctgtgatgaacattaatttcctgctaataggcctcttgactgtgttcaacttctgcttgataaaccataaaattgggaagtgaaaatgggaagaacttgtgctcaaatggagctagacaatgacatttgtattaatataatcgaacagcagatgttttagagactgtattctaggttctaacttttctatgtaagctttaaaatgtttttgttttaaaattagcataatactactttacttgcagaaccaagcaccaaaccataataagtataaacttattatttaaaatacttaacatgctaatggagatataaatataatacatatagttctacaatttaaaactattaatgccaatatagtgtggtcaacaatgaaccaaatcttgatgttgtacaaacttctttgtaaagttgttaacaaaacaggcaatgtacaaggcaaactcttccgaccatagattttctattctgacataaatatcaatgtcttgtctacattaatcatacatatccctgtcttcgtcatgtagattttgttttatatcactgaggctactttggtggttgggggtaaaaacattcagttggccgtttgtttatgtggcaatataatatcttgtttttaatcaacgagttagtttgacttaaccattggttagtctaattgtttgtcctctaaagaatgagtacaacatttgttaggaaaaatatctcaaatgaattctcatacaaattgtaacatgcata

SEQ ID NO: 36423 - DNA, 1641 bp, Arabidopsis thaliana landsberg
ttttcctcacaagaataaaggattttcttattagtgtacaatatccttaaacaatctcttcctccaaacacatcagactagtcacgcttctgctcactaaattttattctatttcaaatgaaaagagcgaagcttcttgaactctacagctcttaccaaactactttaaaatcttttcccactgtcacgtttcagtactaggactccacagcatctcgacgatcatatgtgcaaacttcttgaagctcaaccactatatatcttctatatcatttctcatttaaaagttctcctgctggaaaagtctaaacaattcgtctgtacagatttaattttcatttgtaaaattaaccgaaaccaaaagaaaaaggaaagaccaaataagaaatcaacaaacttgacaattttgactaaagtaagataaatttgatcgagtttttttcataaaacatggtttgattttctaagaattttgactagtaatagcaagcaacacaaactaatctactagtagactaggctgcactatatttgatcggagagtcattacctgcaaaccaagttctcttttatgtaaattaaatcattattttataaaatggcatttttcatgagatttatggaattattatcgtcttaaactatcctaacattcattcggtgtgtaatattgtactctcatgcattttggcttccatcgacaagaaagaagtagacgtctaaacatagttaggaaaaatcaaatgaattctatataaaacacaggataaattaaaaaccattcagaaaaattttggacttattttcgatatgtttaggggaaaaatatttgtgttatcattattttctatttacgtcctctcatcagcggctgaaaaaaatacatcattttctgcgctttttgcttttggtgattcagtcttagatacgggaaacaataattttcttcttactcttctcaaaggaaattattggccatatggtttgagttttgactataaatttccgacgggaagattcggaaatggaagagttttcaccgatatagttggtataatatcccaatgttgactggctttacttaactctacctataaagatctctcactgcacactttctatagatccgagactaataatcttgattaatcatattatttatataactaggtagtattctcatgtggtgaagtcttctattgtatgcagccgaaggtttacagatcaaaagacttgtaccagcttatagcaagattcgtcgcatcagttctgaagaccttaagactggcgtttgttttgcatcaggtggttcaggaattgacgatcttacatcccgaacactggtgaaagaaaaaaaaaacttaattgttatttcgataaacactatatattatatatctcaaacaatgttttcttataataattggatggttgtgggtggttttgtcagagagttttatcggcaggtgaccaagtaaaagactttaaagactatttgaagaaactaagaagagtagtgaaacgtaagaaaaaagtaaaagaaatagtttcaaacgctgtgtttcttatttctgaaggaaataatgatcttggatactttgtcgctcccgctcttcttcgattacagtcgacaacgacata

SEQ ID NO: 36424 - DNA, 3601 bp, Arabidopsis thaliana landsberg
taaaaaaacgaatcaagattcaacagactctatgcaagagccaagataagatttttgttgtatattgttaagacatatctagtaaggttggtgtaattaaatgagtcaaagagataattcttatacggccacatgttcttatcacttattcatgtttgcttcaagattactaaatctgatccgatccatatttgatccacaagatacaatctaaaagaaaaaggatctgacagtagattgctatgttggttcttttttggttgaaagaaatcaaaagaacaaaaggaagcagattcatctcctaacacaagccaacatggagttctttttaaaatttatagtcttaacttcatgaatactttttttctaggaaacttcaggaattagctacaaaagtgtcaattgcaagtggcagagaaaagttaagcaagagattgactggctaactagcttagccaggaaaagcatgtaaagttgagattgtatacgaagcccaaattctcagcaaaatctttagacaaaagcaaaagaaaagggacctaacaatttggggtttgagaaacatcaaatgtctagtggtagagactgaaacaacgatcgacaacacagactctttcacaattttaatacttgtgtcagcaagaaattagtaatcaattctaacttttatctgcattccatcatatcaacttgcttgcagtagcctactaaaaaaagtactaactagacgaatgagaaaggaacaagacctagtttaggcttttgagaagaaaacatgacaatcctaattaagggtgaacaagaattagttctgcatagacctagttctgttttattcactttagcttccacggcaagcatcaaggccttctgatgcatcattttttaccatcttaaggaacccattgtttcgaaatggggtcacagtctgacgtatattaagaaatcctagaactagaagatcagattcgtactcagcattacgttcctcatctagaaaaaaccctaatccaacacctgagaaacgcatccctcaatgttaaacgttatattgagaaattggttaacaaaacaacactttggttaaaccaattacggttctccgaattggtttactcagtcgtattttaattttgtcatttaactcgatacgatagaaatcttcttgtacatatttaaacggactcatttgaaacacaacaggcccgttaggcccgcgaatttgaaacccattatatgtatgtatccggatctcatacccggttaaatatctctaggagaaactcttgcatggatgatgcatgggcacaagacttgaaaatgaaaatcatgagatgatgtaatgttagctcacaacaatacatcgaatcgaacacatgaagtggactcccgtacattccgcataatcatcattagctttttgttgcttctgtctgttgcgagacttcaataacctttttcacatatttttttcctttagctgatttcgtattattttgtcaatagtttgtttcaaaaatacgaaaaataatcattaatatcacgagtaatggatctactcatctacacgagaactaatatattgttcgggatacgaatttgttaagataatttttctcttgctatacaactaaactaactacatttaaactgtgatggcaactcaaaaatcaggactaatttaaaaaaacttttggaagtcactatcaaaacctcttgaacttaagagattaaatagacaaacatatacacaacaaagagaagcaacacccacaaaactgaaaactgtcgttcttacatttggttaaggcatgtgcaatcttattattgtgtgcacacaaagttttttttttttttttgatagcttaaaaaggttatgtgagcctcgagtcatcttcaatcttatattatataaccaaaaatattatttattgtatttagatgataaaaattggtgattgttggctggaaagtcattgttattcagacaacacatgatcatgtgatgggtggcgcgtgggtccacgtgatcccacgtcgaaagcctctcttataaatttcacaaaattagcaaacatccaaagattatataatttgataattgaataaaaattttaataaagaagaacgaatctttcttctgtatgtaactccaaacactcccggcctttctcatccagtatttgtatcttaaattcttcaaaaattacaaaagcaaataccttcaaaaattttataaatagtaactcatcatgttctattttttgatataatagaattgtggatcaatgttcaaactaatctttctcttcctcaaaatttagtttctgcaatgttcagacaaaatggactattgaacatggataattcttggatctatgaattttcggtttagcaaagttaaccaatatctccaattatttatgtttatattattattttgaaaataaaaaataataaaataagccgcttcaagaaaatgaaattattgtgcaatacattctttcttcaactcgtttgcaagaaaaaataaaattaaaactcacaaaccaaaacaataagctaagcttagatctttctttccctgattctaacaaatcatcgacaacaaataaatattcacacacacattttataaatgtcatcaccctaatcgaactcctgtaaaattttttatacggattcatccgagtaagcaaacgaacaattagatgaacctcgaggagtactgacaattttctccggtggtaacggttgcggctgccatttttcgcattttccgccttttatcatatcggattccgatctatccatatcaaactgcctaatctctttaagcattgccacaatgtctttcatcataggccgatcggatgccttgttgctcacacaaaggaacgagaccgctagagtttgtagcatctcatgcattataggatctgcccgcccgcggagtctcgggtcaagaatttctctaggatctttctttccggctaaatgatctctcacccattgaaccaaatgagcacctccgggtagatccgggtccaatggatgcttcccggttaaaacttctagtagcaccactccatagctatacacatcactcttttctgttatatgttgcatcgaagcatgttctgtaacaaaacaaataaaatccgttataaagttaatatttcgaaattgataagtttataacgttaaaatcgaaattttgaattttacctggagccatgtaaccataagaaccggctaacggaggccggttactcaatttagacgaatctccatcggtaactccctcaccggagacgatttttgctaaaccgaaatcggctaagtaagattcgaagcgggaacccaataagacattcatagctttaacgtcaccgtgtagaatcggaggaagacaatcatgatgaagataagctagtgcatgtgcaacgcctaaaacgacgtcgtaacgtgcttcccaatcagctcctccacttcctttaccggcaccgtgaagcagagagcttaaacttccgttaggaagataatcatagaacaaaagcttcagattccgattcgaacaccaacccaaaagacggattat

SEQ ID NO: 36425 - DNA, 2904 bp, Arabidopsis thaliana landsberg
ctttttgaatcatatccacagtcgataaaaacttaatcccaaaatgacgacataatatctctaaaggagtagtccacaagatgtcacgaatttaataattatggaatcaaacgggagggatgatcagacgaatgacaccgttcttagcaatgatcttgatcttacggatgggaatgtcgaaaggagtggagagcatagcaacgtcaccagtgtagaaacgtccacttgagtcgtggctaatggcaggagcttcaccggtcaccctcactctcccattcatgactgcgacagtgaagttctctttgggaacgcctggcatgtctacacgcacgtatagaccaccgttttggagcctcttagactcataaggcatctgcgatccttgggcaatataacaatgtggcatcaatatcgggccggtcaagttggggtctgctccacatatttcacaaacaacaacaaattaatattcaaagactcttctcctattcctatatacaatgaaattctctaaataaaaattctaaagtttccatgtataagcttaaaggggaataatgtgaataccattaggatccgtggcatggggaaaaccatcagtagccgtgccaacgcgatctataaccagaaaatcagagtgcaaaacaattctaattaagtaagtaagtaagctatatttcaaaagtttatggatgaaattaaaacagaactaataataccttctccgtctgagccaccaagaaaagctgtagaaacaaaaataaaaataatggttcatatcagataattatcctattacaaatttctatttttcgaataaataaataaaaagggttagatagaaaatatacagatgcaagtacaagaaggacgtcgtgtagaggcgtggctcgtggtgagaacgagtcttagaacaccatcggccatgtgagaagtaaagccggagaagaactcacagcatttgcaagggatcttggtgttgataccgccgacactgatcttgggtcttagcttggtaccgtcgtagttacggtgcgacgagtcatacttgtgttccttgggagcgtcggctaagatattcacagtattattaggttggtctagtaaaacagtgacgccatctctaggaactccggggagatcgaagcggatgtagctttcattatccaaagtcttggcctctaagaaaccctttggaccattcacaaggaatggattgttgattgcgtagaaaccctctgctcaattcaacaacaaagaaaaatgacaactttatcggaaataaagaaagaggttacgatttgatgagaacgaaaaaaagagaaattgttaaaagttaaaacatacctggagatggaggagcaagagtaaccggggagaccatgattaggcggctcaagatttcgttagggtttttttaatgctttttgagatctttttctctctttgtctttagggttcttggaggttttttgaagcgaaagctgtaaatcaaatgaaagagagagtgaggaagagagtattatggtgaaatacgacaaacactctatactgacacgcgttctattttttggagcaatctagaagcacacgtattagttgagctgtatcgcgccactctagactttgagtcaatctctcttgaaatcaattacagtactaatagtgaagtagcaaattcgttttaccaggaatattaaccatatgcattagatggtgacaaaattaagcataattaacatgcataaacatacgagtgaaacgtcttaattaggtacatattaaaattgttgaaacattcggaaatccaaaagaaaagacaaacagatagatatgctccatgcataagcatgatcttaagatgcgatttataaattagttggaagggatagtgagacggatgacaccatgcttggggaccaatttgatccgacccccgtcatagcctctagggacattggcgaccttggctacgtaagtacgcccactcgtgtcgtgcatggtcacaggagctcgtcccatgatggtgacgacaccatcgccgtccactgccaccatgaacttctcgctagggacaccaggcatgtcaacacgcatatacagaccaccgtttgagagctgctttgtctcgtaaggcatcatgggtccctccaacactgacgggtgtggtagtacgaccggaccagtgaacgctggatctgtccaacgtgaagcaacaaaacatataccattaagcctcccttaattaagtcttttgtttcagtatagaggaatctatttatagaaatcatgcatgtgatataaacatactataatgaaactaatatattgggaaattatgttacagtggagagattaagttcataccaccagggtcagtgcaacggcgacctatgatgaaacaaataatgaagtagattagttaattaatcaaccacaaagttttatggagtggtaaaaatatgaaatcaaatatatatataccttttgggataagtccacgaaaatgagctaagagattcactacaaaattaaaaagaagaagattttagaaaacatgtcaaaggaaaaagaaaaaaaattggtaaaaacaaaaaaggataagtcaaaagttgatgttacataccataaggagtgccatctgcaactgcaccaattggaatcaaacacaataaacccatgaaaaaatggcagatatatatatacacgttactaaataaaacaaccaagactaatttctaaaagaatctcaaataattaataagaaatatcaaatatctctgatctattaaccgggaaataatagaagaaaaaaatcatgtaccatagataatgacgtataagatgttaagaacaaatcatcaaaagatttaatggatagagacttaaccaggagccatacca

SEQ ID NO: 36426 - DNA, 4045 bp, Arabidopsis thaliana landsberg
  unsure (1)..(4045): unsure at all n locations
aggccggttttgtccttgccggtcagcttctgttccgcggttttttgcttccaccgccacctccaccggttgtgcggccgtccgaggtggctccgccggagcccgcgtccgtgctgccgccgtcggtccccgtcgaggatccgtcgcccgagcccgagcccgagtcgtcgcccgtgctgagcgacccaccgtcgctcgagccgctgctgctgccgttgtccgagccgctcgaggcgacgtgcacgcccggcttctgcccgcacgctgcgagcacagcgagcatcgccatgcacacgagcagcggggcgaatcgtcgtcggttcgggatcactcgttgtctccttcggacaaggcctgacgggcctcgagggcggtgagagcgccggggcgacgacccaaggcggcgggagttgcgctgagcgctgccaagcttacacaccatattggtaaaactcatatcatatttgatcagaccaattaatgcctgtttaaagtttcaaataggactgagagagaattggctgactagtcttaaatctctgtactttttttcgacgaactagttacttatttttttcaaaaaatcgaagtgcttattanagtgtggcaggtgacaccagcttttgaaggacaaaatcttgaacataatatcggaaatggagaattcagagaagcaaagttgtaccatggagataccttctgttggatgggttattgggaacatcatatccctcgcaacagttagtgaaaccgattttatggatccacaagaatcaaatccagagatgttttatgtcttgtatgttcatgttattgtgactctcgccgagaatctattgtctcaggttgaaagtgttggaattcaggatattcatcttgatattgaggccacatcgaatgagacagagaaaggaaattcagttaagatttcttttgtggaaatgcttcgaccagtatgtcaacagtggcatctcgcaaaactgttggcagcttctgggaaagaaattcgtgttatagcagataaagatgcatcaacgagtagtaagaaaggatcagaaacactaggactgcttgatatagcacgattatattcatgcatgttgagaatcttctgcgtgatgaatcctgttctaggacctttgcctgtccttaacatgttatccttctgtcctggatacattgtctctttgtggaattctctagagagtgtcctactccctgaaaatggttgcactgctgacgatgcatctcatggatctgctaaaacttcatggaatacaagaagtccttctgagaagaaattgaaacatctcaagaatgacagtgtcaacaagtgggtgaatgtgctaaacaagttttctggtaaatcaccgggaccacgtgaacatgtggagtgtactagtgatcaaccaggatcaggccaggttaatgagtcaactaatgatgtatgggatgtggaaactctgaggggtggtcctgtaggtatctccaaagaagtgtcatgcctgcttcatctattttgtgcaacctatgcacatttactcgttgttcttgatgacatacagttttatgaaaagcaggtaaatatgctatatggtttcctgcagcttatatgtcattagtctgatatttactaaaggtttgttatgtcatataggtcccctttatgctagagaagcaacagagaattgcatcaatgcttaatacactcgtgtacaatggattgttgcgaggcacaggtcctgagagtagacaactgatggattctgctatcagatgtttgcatttattgtatgaaagagattgcaggcaccctttttgtccttctgccctgtggctctcacctggtagaactagtagacctccaattgcatttgctgccaggactcatagaaatttaacaaccagtgatgttcttacaactccaagcatgggttctgttataacaattactccgcatgtctttccatttgaggagaggtaatcttacgttgattacccttcatagcctttccatgtcttttatctttgtgctacaataacttctaactaactttatctgttgaatgatgttcatgttgtgctatccctgcagggtccatgtgtttagagagtttataagcaaggataaagcttcaaggaaaatggctggtgaagtggatgcacctggtgcgaggtcaatagagatagttgttcgtcgaggtcatgtggttgaagatggatttcaacaactgaattcaattggtagcaggctaaaatcatccatccatgtctcgtttgtgaatgaatctggccttcctgaggctggcctagactatggtgggctttcaaaagagtttttgactgacataacaaaagcagcataagctactgagtaagctcttctgtatgtatgcatactttatgctagtctttgttgttacgtgttccagtggattaagttttatttatttattggtatgtccattatttttcttttccaaaaggtatgggttattctcgcaaacccctacttcagataggttgcttgttcctagcccatctgcacggcaccttgagaatgggattcagatgattgagtttcttggaagaattgttggaaaagctctatatgagggaatactgctggattactctttttcacacgttttcatccagaagcttttggggcgttatagctttattgatgaactatcagggcttgatccagagctctacaggaacctcatgtatgtcaaggtaaaaaccgttgcaggtgatatatctgtcgcctcatatgtcaaaattcaatcttgtaataagtatcacaggaaagggtttctgagatcaagactttgtttatatgcagcattatgatggtgatttgaaggaactctgtctggatttcacagtcactgaagagttttgtggaaaaatgagcataattgaactcaaacccggtgggaaggatacttcagtcacgaatgagaacaaaatgcaatatattcatgcaatggctgactataaacttaaccggcaggtatcgtctttttaacgttttataaataatcttaaggtcaatcatcctgcaaaacaaaagttacttcataattaatgaggtaaacatgttgtcctatgtcttgtctccaatgcagattgtgcccttttcaaatgcattttacagaggattgactgaccttatatctcctgcttggttgaaaactatttaatgcccatgaatttaatcaggtgtgcggctctaatgtaatgatttctagattttttttcttttgtacaaagctattgtctcacaaagattcctttacagttactctcaggaggaaaccatgatattgatgttgatgacttaaggaggaatacaaaatacactggtggttacagtgatagcagtcgaacaatcaaaatcttctgggaggtaataactcttaatcagaagtcctgatctctaccttttctttctattctgtttgccaatttatgacatatgctgagagtttgagtgcggcttgtataatttctctctgggcatcctgtctcaggtcatgaaaggctttgaaccgagtgaacgttgcttgctcctcaaatttgtgactagttgttctcgggcaccactccttggtttcaaatacttgcagccaaccttcatcatccataaagtttgtttttgaacttaagcttagaaatgtatgtttgatattctgtttggtaattttgttttcttacttttgtgctttttcatcttctgcaggtctcttgtgatacctctctttgggctgctattggaggacaagatgtagaaagacttccatctgcttctacgtgctacaatactcttaaggtgaagtttcaatagtccaattatctttgtagtctacatgtgaatattcctatatcttttttgttcagtctttctttttggatttcttcagcttccaacgtataaacgagcaagcactatgagggaaaaactattgtatgcgattacttcaaatgcaggatttgaactctcgtagagacctctaaccaggtattcatcttgttatgc

SEQ ID NO: 36427 - DNA, 4907 bp, Arabidopsis thaliana landsberg
actttttggaaattagtataaatgtatttgtatccgaatatataatgttgatgtttgtgttttataattctgtgtacttaagataattttattttatttgatgtagaatgtttagtactatataatatgattattttgtgtcctttgacatggtttaacttctttacgagttccaacataatcctagcttgatggcttgctgcaattcacaaattatttttataaaactgtaacgaggaaagaagaaaaacaaaattatgttcacaaaatcacagttcatgtaagaaagatgaaaacaactaatcttgaatattttgagtctgatctctgattggcggttgatcgtagaaggtgcatcagcaaatagaggaactagtctcattgctaacagtgttacgtctgacgggacgcttcagtcttatgtagcctcgggttacccaaattggatgcgtaacgtcttttgcgatgagagagtttaatcctctgttattgctttttgggatacctagtctaattgctaatttgtcgggagcaattcttttgcaaaggcaaaattctttatgttaagctgaagtggatccctaagaaggcggatgaatctggaccttattgggaaaactaaaccaaacccatgtggataattttcggttaccgtgtccggtttacttcaaccggacgttacattgttcggttcccaaagttttcctctccaaattagacgtaactattgaaacttgattaaacataaccagttgccacaatcatgcacattgaacattactaatgactcttcataagatatttttattttatcaaaaatgtggtgagctcatattatagtagagtactataaaaataaaacataatacagtacctttaatttccccaaaaataatacaaattgggacgaagaatcacttttcttaattactacggatccaatgtggatgcaagttgaaaccggaacccaagagaggaaattggggaatcgaagtaaaccaatttgaaccaaaccaaacttttctaaacatagttaacaacaatatcaacttaataacacactaattatatatccattatataaacaaaaatgaagcatgtacgtgttaatcaaacatctccaaatcaaacttttctaaacatggtgaacaacaatgtcaacctaatgaaaagtatacatattatatatcagtaagtgaaaacaatcatacaattaaaaattacacggataattaacttcttttttttaaaacattgtggaggaaattttcaaaagtcagaatcagtgctttcacggtggcgatcgtgcggcgaggacgcggagttgccaggctcaacgtcgttgtccaacattcctcgagaaccggttcgagtcatcgtcgtggctcgaccagtgctcctctccgccaacattctaaaatacgcatgtggagcccatcctgttaaaatattgtcatcaaccgttattattatcaagaaagcaataacatgatggtaattttttgtttgttttggtttaataccgttttcgtcgtaagggtaaggaaaaaagtggaggtaagagaaagaagcgacaaaaattccgatgatagctccggcgaagacatcggtccaatggtgccaatagtcgtctacgcgtgatattccgatgagaattgatatgagtatcggtaagaacacgaggcatagcttcgccacgtgacctcttctgtcaaagactttgattttacccgataagtaccacgctaggaaagttaaccagcgaatgaccctgcatgtataccgtaatcaagcggttaacataaaccggaatcaattcagatgttgttacttgtctttttaatgctttagaacaacttacatgaagtgtgaccactagggaaactcttgtaaccttctttgattatctttttaactccatgacacacaacatccttagtatccggatgaaatttctgcatttctttccgatttgcacaaaataagaaacaattccctcatgataaaccgggaaattaacgtataagtgagatggatccatagaaatgtacataccggtttaccattgggaaaacatcggtaaaagaagttagggcgtggcctaccgaccgcgtctttgatagaatcagtggtgactccagtcacaagacatgagaatccgatacctatacgcaatttccaaatattcttgtcacgttgatcatcaataatatatgatagtatggattttgatttgaaattgtaagtactataggactagatacatttgagggtgatcagtagtagaaattaactcaccgagaatggcgtgatgaagatcataaacatctcttcgatagtaatagtacactatgaagatgcatatcggaaccaatatacaaataatctacacgcacacaccatacatacaaataatcaatcagcgaaaatcgaaatacttccttgtgatggaatgcaaaatgaagacaaaggtttcttgggaaacaagtttacttaccgggacagcccacatagggatggtgtcttcataaaatgggaaagtgagatcggttaacatgtcaggtccaatatagcgatgaaaaggctcgataacattgagtacaatgtcgatgagaccgaggactacgaggatgagccagtcacaaagatgttcacgagccaccttccatccatggctcttaaccgagtgagatccaagcattatcttagccatctttcacgctcattaaataaacctgaaatatcactttcattgtaacatctgtatacatatggtttgttatgcaaactttctccgataaaatctgtaatagggtttgtttcttctttttgttcgtatatcataaatcaacgcaaagatttgtctcgaaaaatattaatcatttttgtttcggattgatataaaacaattccaaaaaatcgttagattcaccatgcaaacataaaatgcattaacaaattaactacacggccggagagataatggaataaaaatgatacctgctgggtgcgaagcgagatcaatcgatcacagatcgaggatcaagcaaaccctaaataatctaattctattacagttacaaacttacaattgcaatttacaaacgaaactatgaacaactccttaatttccttttgaaacggttaatggggtgaatctggggtggggtaagaaaatatttctgtatcgcaaaattaagttttttttttagcagttactatatttttggtttttttcttattgacttggatcttttttttgttttatcggttgaatatcggttaccatattaagttaataactatgattaaatgaagattatcaaaaataaataaacactatggctaaatggagatttatctcccaatatcacttttgaataaagtacgtttgagttacaacttacaagaaatgaagatcatatatggctttcaagcccactatttgtgaagaataaaatacaaaaatggtaaatgtagaggtgaggattcgaacccttcaccacatgattattacgtaagtgctcaaattgcaaccaattgatgagttaaataatcggcccaataaatagcttgtaagtaaggttttaagcccatgctttctttcaaaccctcctgttttgcatgtaatgtatatggaatttacctttttatgattcgacaatgtaagtagttaaccacttataactgccacaacataattacttttatgacaaaaggtaattactttcaatttgaatgttacggaaataaaatacttttgatataaattctgcattagtatatttgtggttaactaataaactatgaaagacacaaagaaataaaatacttttgatataaattctgcattagtatattagtttttattttgataactgttaagtgtttatatcatttttatatttggacaaaggttataaaaaaaataaaaaaaaatagaaaatccaaaatttacaacaaatatgactaaaaaaaagcacgataaaaaagtacaagcgataacaaccaatagaagttcgaagaagaaacactgattttgaaccgcgaagttcggacacaatctataattagatggagctatacttaaatgactaactcgtgctcactagtttagcgtgggagatacaacctaagtagaaacgcaccaaccattcttattgcttttagtttttgatggttgtattgcctggctaacaaaaaaaaagtatcacagaagacaagaacttttttagagatacgtagactcttgagtcataatgatatgaattttcaaaggtacaccaaatctgaatttcaaaattcgatggtccgtctacatgtatgtactctacagtctacactacaataagacataaatggttttgtaatgaagaatatggggctcacaagtttcttcagctttaaattaaccacatgtgccactctgcaatgaaaattccatttatcaattaatgattatctcatcagtatatagtactcttccccacttatttaataccattgtctatcactctttaaagtcttcctcctccaaatcaagttgttatgattccttttttgacctcttctctttctccaataggaaaaaaactgaaactacttccaaaacatatcacccacttactgttatccaacaagtccattattgcataagtcatatccatgatttgatatgaataggctttcacattttaacccccaaagaagtaataagagtaactgaagacgacaaagaggaactgaattacaagagaaaaaggacaaacccatgaataaccaaacactaagttttgattcccttcttaatgtcatagtccctactttggtgatctgtcgttttccttctacaattattaataaaactatgtttaattcgccaaccatctcggttatctaaacagtgt

SEQ ID NO: 36428 - DNA, 4874 bp, Arabidopsis thaliana landsberg
ccaagttaaaatcccatatctgtatacaagttcacaacacaggttaagaaacctttcatttttttatcttcttgagaaaccataaaaccacacagagtgactatatttgaccttacacaaaaacatttcaccacttaatctcacttgctcattaacagaaaaaactaaactgttcttagccaaaaaaatcaaaagagagataagcaaaacctgagaactctggccaccactaggattagtagtagtagcattccactgctggttaactcctcctcctccgccaccattgatctcctcaacatctcttgaccatttcaatctctctgacatctccggaaccataagcccctctcctgcttctccatctccatctccatcacaagcaccctcacggtcacaatcacggtcacgatcaccatcatcgccatcaccaccgacaacaccactcttaagcaactcctcaagctgcttacacaatacctgcttatacctcccacaactagatccacaagatccacgcttcttaaacgtcgtatcgctgggaacaatcaattcattagatcccaaaacccaagaatccaactgcatcccgaaattatccatcatcatcgccatcatcggaacttgattctcttcatctttcctcccttgctccaaatcaagtccccataaagcagcaagctccaacgccgatggacaaccggaaaaaccttccacggcggatcgaacatgagcatcggaaactgaacaacttccgtgaacatcccaatcacactcctgacacaaaatcagattatcggtgaaacaccgaacagagactggctcgttaccgcaattatcgcagatctgagatcgcacgtgcttcctcgacaacagattcgccgtgtgaacttgctgatcacaaggcaaacacagcttcgccgtatcggctctacaaaacaaaaccgccgtacgctcgccgcagaaatcgcacggtactctctccgaactactcataactgataactctctcaaaatccctaaaattcgaaatcaaaatcagaatttattttcagagactaaggacggtgagaagaatgatgacaaatccatttctcacgtttttcattttgaactcttttttttttgggggggctttgtcaaaattatctgcaaatcttttggaatgaagaagacaacgaagctaattattgtaaacagtttggggtttgggatttgtttttctgtgttgcgatgtatggaacttgtgtatgatgaattgttcagatcgagatatgttgagatctgacggtgtaaaagcgtgctgagagagtcgccattgtttagacggcgaagcttacgttgactgtgacagagaatctaagagaaaatatctaatctgctttttcacctaaatatctattttaacgtataaagggaaagttagttcaaagcacatgatttttatgggattaattctttccgtatatagcaataactttttgatcagtgtaataacggctggaatcgtctttttctggaactagtatttacgaacattgcagcgtaatgtatagcatatatttatgtgcataataaactgctacacacgagttcttgacaaaagatgtgataaaattaaaatcgtaaagatattttaggattcatgttagatattttctttttgtccatggacttcaataagttgtttttttgttttgaaaaaaagtataacttatttgtaaagtgctatcattctgaggtataaatatcttgaaaaagttcctggggagtggtaacaatcggaacgattcttgactaacgcattaaatttcacgtgttagagagtttgtgcttcagactatacataatacagtatatgagcggttttttttttctttgagtcaaagaaggaatatatgcgttatatacttatatatttgaattcttgagttttgatcgaatgtttaatttgtggtgaacttgtggaaacctcttcgcaaagaaatcttgtttatcccaaaaatagttggtatgaaaactcttggcaaagaaatcttgtttattctaaaaatagttggtatgaagagtttggatttctccttgtaagaaaattgcgacctgacatcaaatatttttctttttaaagataaatagcttgaattttcatatatcttgtctatagaagatgaatcgtcgatttttttttttttttaaagtatataaaagcccattagactcaaaattgaagaactatctcaagaaggaactcaaaaacgggcttcagcccataagggaagcttgtagtccggtgattggattatatatcttccggatccggtatcttttcgctcccttcagtttttttccggaaggaacaaaaatctgattcagaacttggtttcgctggtcgttttggttttaatctgaatcgctggtttattccggttgtgaattttcgtatatttataggaccggcgaatcagaagcaaattgttgttaggaataaaccctaaattctgccatggataaggagagatattccaggagccaccgtgacgatcgtgatcgagattcgagtcccgaccattctccacaacgtgaaggaggacgccgccgtgaccgcgatgttgattcgaagcgtcgtgattcagatcactaccgttcatcgaggcgcggcgatagggaagatgagagagataggaccaaggatagaagagggagatctgtagagcgaggcgagagagaagggagtagagatagggaaaagcatcaccatgagaggtctcacgaaggtagtaaagagaaggaatcgaggagcaagaggaaagatagagaggaagagaatggggctagggatgggaagaagaaatctaggtttgctgatgggaatggtgagaggaggagcaggtttgaggatgtggctattgaagttgagaacaaagatgctcaagtctctgagggttctggggctacgaatccaaccagtggcgttacgatggtgagttctctataccttttctttaatcttctttgtttgctacttgcgatttgttcatgattacctctagtcttcttcgatagctaatgcttgcattttctttttttgtgcagggagcctctacatatagttctattccatcggaagcttctgctgcccctagtcaaacactgctcactaaggtatcttcgatatctacaacggatgaaaataaggctagtgttgtcagatctcatgaggttcctggaaaatctagtacagatggaagaccattgtccacagctgggaaaagtagtgcaaacttgcctcttgattcatcagcgttagcagcgaaagctaggaaagcactacaattgcaaaagggattggctgatagattgaagaaccttcctttggtaagatgtacagatattctatacttttttgcgttcattcttctctgaaaactttgtatttgataaattgcttttcttattctctgtgcagctgaagaaggctactaagccaacttcagaaggtagcccacataccagagtgccaccatcgactaccactcctgctgtctctacaggcacatcttttgcttcagcattaccacatactggccttgctggctttgggagtattgccaacattgaagctgttaagcgagcccaggagctggcagctaatatgggatttcatcaggatcgagagttcgctcccgttattaacctatttccaggacaggcaccctcagatatgactgttgcacagagaccggaaaagccccctgttctgcgcgtggatgcactaggaagggagatagatgaacacggaaatgtgattagtgtgactaaaccaagcaatcttagtacattgaaggtcagcaatgttaatttgaatatcttaagttttcatgtttttctttatatgatcgagcttctaaagtacttggattttacaggttaacataaacaaaaagaagaaagatgcttttcagattcttaaacctcaactggaagcagatctaaaagaaaacccctattttgacacaaggatgggtattgatgaaaaaaagattctgagacctaaacgtatgagtttccagtttgttgaggaaggtaaatggacaagagatgctgaaaatttgaagtttaaggtatgcattgtcttttgtatggattctttttaacgatattctctcttggtggtcttttagatgtctcattgtgtgtatttctgtcttttctttatagagtcattttggtgaagcaaaagcgaaggagctgaaggtgaagcaagcacaactggctaaggcaaacgatgatataaatccaaatttgatagaggtatccgaacgtgtcccgagaaaagagaagcccaaggagccaattccagatgttgagtggtggtacgtaatttctctcaccttaccctttctgttaatgctaagttgttttgtttctgatttgacattcacttggcataaccttggtggaaacaactgatcctgcacttaaaaactgaaacttgtaacgatgggagtatttgatgacagtgatgaatcaccataacaataactttagtttgctctcagctacggatgacattcatagaatttgtttggtgttcttgttgctcatgttggattagggttgtttgattgttttttgaattacaatatagtttcgtttacgtgggatatatacaattaatatatcaattctttgatttccttgagtgcacacatatgtgctttaatattccacatacaacttccgaaatttcaatggttttgtcatcagcaacggtgtgattgttactaaaacatggtaacatgaatctactgatgattatgatctacttagtacctttcattgccagcccaaatttattaatttatgctatctgc

SEQ ID NO: 36429 - DNA, 802 bp, Arabidopsis thaliana landsberg
ttcaatttttgacatcttcttcttctcctttcactgcaaaaccgaaagcttgagactttgagattatgtctatgtcatcttcttcttcttccatcgatcacttcatcacctttcgtcatattgatcttattctccactgtaaaaaatcagcgagattttaagggattgtgaaggtaccatcttaaacacaaaatgggtacttctactacagagagtgtggtggcgtgtgaattttgcggcgagagaacggcggttctgttttgtagagccgatacggcgaagctttgtttgccttgtgaccagcacgtgcactcggcgaaccttctctcgaggaagcatgttcgttctcagatctgtgataactgtagcaaagagccggtgtccgtacgttgcttcacagataatctcgtattgtgtcaggagtgtgattgggatgttcacggaagctgttcctcctccgcgacgcatgaacgctccgccgtggaagggttttcaggttgtccttcggttttggagcttgctgctgtgtggggaatcgatttaaagggtaagaagaaagaagatgacgaagacgaattgactaagaattttgggatggggttggattcgtggggttctggatctaacatcgttcaagaactgattggtccttatgatgtgtcttgcaaaaagcaaagctttagctttgggaggtctaagcaggtagtgtttgaacagcttgagttactgaagagaggcttccttgaaggccaaggacagattatggctccggagggaatcaatggcggaggaagcatttttc

SEQ ID NO: 36430 - DNA, 2017 bp, Arabidopsis thaliana landsberg
gtaagcataagtgtagtacatacaatcatcccttcctttgatatggaacatagaaattctttcgaaaatagacacaagaaatctacatattactatagaactaaagatacccaaaaaatgattttcaccaaaagcaaaatccactctcatcgaagattaccaccagatttcttagtcttcttgctcgcatgaatcttcgcatagatccccttggttctatacgcaagcaaaaggtcaagaccgaccccaatgatagaagcaaacgccattacaatgaagacgatacggaaacaatgagctcctacacacgtattgcctccaccaggagtaggtgtggcttcagcatcgtagagtaaacccgcgagtagacccgagaagaggaacgatcctagaggcatattaagtataaggatgttgtagatgagtccatagtatttgagaccgaagagttctgatgctgttggtacggttatcgctaaccgaactccatagcataccccaaccaccattgaaccaatatagagtgaaccgggcaaggctaaagccatcagtagatatcccacggccataatgatttgagctgctgcattccataatggtcttggtgttccagctttcctataaagttaaaacaaatattcaagattagtctcaatagcaaatattattcaaggtcccacgatctttagttttcaaataaagacgaaagaaaatctaaaaagatattttagcgcaaaaagtatgttatggtcccccgcacaagctattggaccggtctagtgttagacaaggaaatttctccatatggaaactaacatgtcaagctttaattgaaaaatcgttaaaagaaatatcatgtaaatggaaaatattcaattctaagtaacggaagaggaaagtaatatactctgccttagcgacaaagcaaaggtgaaacagaggaaactgacatcaccattcacagaataaatttgcatttgaatgcgtgtgcgtaaagtgatcaataagaatattccaagtcacgatgatctatgttagtaaagtgacttacttgatgaagtgctcggagatagtaccggagagaatccgaccaaagaatccccaaatgctagtcatggagacaaaaatggagacatcagtgtaaccaagcgcaagcccgatctgacccatattgttcataactgctaaaccagttcctactccacacaagaacgacacgaacaacacccaatagtcaacgggcgacactgcttccattatagtgtggtcttctcccaaaaccggtttcttcctcttcttctcctcctcttccgctgccaccgcagctacaactattacttctttctccgctgccgctatctcggatctaagcaacggttcttgaatccgtccttctaagtcatcttgttcaccgtagttcaagctcttgatgaaagagtggaaaggaatggctataggagaagccaagaggaagagaagtatagaggcgaaagcaacagagaacactccagttttgattccaatgatgtcgtaagactgaagatacacggcgacaacaacggccacaatgttgaatatggtaaagtaacgagtctcttcgttctcctcagctgcggaagatgctggtgggatctcacggaggaagaaaaccgccgtgagacatacggcaaaaggcaccacggctagtaaaaccaaaaacgacgacggatcgtttgagaacagagcagtacagagatcagtgaatatagctgtgcttaaaccgacatatcctttcaagatcccggagaccggaccacggtttcgtcgaaaattgcgtatgcaagtcaccaacacagccgtgttcatccacgttgtgctgttccctcccatacagaggaatatacacatctgaaaattcgaaaaaaacaacatacagtattcaatttattgttgactagtggttagttgtactatgacgatccatgtgtgagttgtagaaagaaacacacccccattatggttagtacctgccaataaa

SEQ ID NO: 36431 - DNA, 6421 bp, Arabidopsis thaliana landsberg
  unsure (1)..(6421): unsure at all n locations
ctatatcccagcctggagggtgatcttcttccccccatgattctgtcttgaaattgtattcttcgtagtagtaataacactcatcgtacggcctcaagatcttgtggttcttgtccttgtcgtaaccgagagcaaacatgtctgattcgtcgtgaggttctcttgcttcgatccacttggtttgacccaaatacggattccaaaccacaacactagagttgtcacttggaacgcacaacactaaaccatcgcattgaaacactttagagatgtcgatttgattaactatatcacctacctccctgatagatggacgatcaaagccttcaccgtctccttttagaattccattgagatggaatatcattgataaaaacctatgatccatcaccatgaaccctagaaactgatccttcgcttccgctttatacaacagccgacctttggataaggcgttccattgtttgtgagtggatctcacggctccaagagaagttatcggagccttagagagtatctcctctaccaaatccttcgaaagatcagagatcatagtcattgttgtcaaatggagaattagggttttggtttttttattggtgagaggatttgttttttttttttaacttccacgcttgcccactctttatattagcgtctactagataagtgtgcgtctaataactttcacaacgataccctaaatatgtccactactcacactcttagggaagctcatatcattaaattattcaaatcccttaaattacttctgtaatcacattaacttccacgcttgcccaatactcccactctatatatgcgtctactaaataagtgtgtgtttttccctaacaacttgcataacgcgcgataccctaaatatgtcaaggatactcatatcatctatcgttattcaaatcccttaatttaatcctatatactcaatcacatttacttctgtaaccacacctatgtcttctcttttgtataaacttaagtactctaatttatttgatatacaaatttatatctttacaaaatatgcgatttctgtctgatcctctcgcaaaatggcattgcagaagaaaattaaattaaaaactaataaaatggaaattcaagtaaaaacaaggtattttcatacaattagttgtttggcacatctaaggctcctatgattatgattggtgaaagtcttggtgcatgaactgaaattcatatttttcatggtctaatctttgtttataggttcctttaaaagacatattaagcatgtcctaaaatcaagactgttttaacgtttgtttgttaatggcttcgcaaaatctaggacgagaaaccctgagtttgtgttgttcattaacctccaaggaaaatgaactgaaactaaattaattaactttccgtgatccataaatatgagcatgttgttagtcgtatccaacatcacacttgtctggtctgtcagtttctactttctaggtttgattcacatggctattcccatatgcaggttccaaaccacaagccacgtgttgtccgttgtgacacataacaataagccatcttaacgaaagactttagatatatcaacttgattgaatacacatttacatataaaaaaagtggaatctttttgttactaaattagtaaaatgcaaaattccgtatcgtattggaaagcaatttgctctgtaggaagcacatcaacaagagtaacacagttgttttttcttttctaacattttgttctgtacaaaacctctaatacttaggaggctaatatagtttacaataatagtcttccactactttctttttctaaccaaacgatttaaatttatgcagaatctcaaaaccccaaaccacattatcttttcttttctctctagctctagagatacagaataagaagaaaagaaaagggttaaatatgattacattctacaagctattgctctcaaccggttgagcctgtaggcctcctcctctgtcatcgttcaccatcttttttagggatcggtattgcagccgtacattgtctccgctttcgacaatctttaatagataccttttattgaaaaatatatgagaatggattagtttgagaattgaactcaacaactcgcttcacctatcacgtatagttttgttttcagctcttatatatcatagagtaatacttaccagccattgagacactgagatgtcacgattgcttcttttccaacaaacttttctggagttcgccggtttccctgcaattggaaatgtgttccataacaagctagaaccaaattttatctgctggaaaaaatgcatcagaaccaaaatgaaatgtaatggcctaccttgataagaactttctcatttacagcaaatggataatgcaccactcgatgcataccatcatccgtagctggatctccattttcctgtagagaatttgggatcaagttgtaacttgtatcagatcttcatcaacaacataagcttaagctaaccagaaaacagatgatgatgcaggctgataagtttggagatggtaactatgtaatcggaaaccacccacaaaagcaatatgtagagcagagtcagatcatctcaccacatccatttgatcactcatttcttttctacgccttctcatggctgcgttgtggaaaagtcgtttatcatcctgttgcttgatagctgaagcggcagctctaagtgctatgtgttcgacattagcaaagaaatatgattactcggttaggactgtttgtcaatgtgaaacccgaaaagactatcgtggatcaaattatttattgaggagcacagataagaagataatgaactttatcggaattaccatggttaggaaccagagacccagactcgatctctgtattgcagagcgtacatctagactgtgcataagatcattgtggttactaaatattcttgggtatataggaagaaccatcacatgagactagcatattaatagaatcgaagtaaactagtaccaaccatttcaaggactcttctaagcataaggccaccaaatgaatgtccacaagagacaaccattgcatcttcaagaaaagcaccactaacatcaaaagtttgcaacagacaaattagaacgtttttttcactgcactgccttcgcaaaattacagcaacagaataaaaaggtggaaaacaattgaacatattatacagctcatggagctagtaacaaaatatgactaaataatgtcttcagtgtatgtctactatctggcacggatgattagctttggaccccttgctaaatcagaatagaaaactacttgaggagaagtttagaaaaagggcttgccagcactcaagaaaacctaggtagggtactttttacgtgatcagatttagcaattcatccaactaaccatactaagagaggagatttattcgtcatagataatattatacactaaggaaaaaaatggtactcacgaaattggatccgagagaacacttcttaaggaaggctctttgcaaacatcatcccgtggaacctgacatcaacaattcataagacctcgtgctctgagcagttaacatcaaacagagaaacttatatcattatagtattgaggtagtgccaatcataaaacagatccaaaatagtgagatcctcaaaaagagtaatataagtagcacgtccacttattaaaatctcgattgagagtatctaaaagaaaaaaatgcatgatctgaaagaataggaaagacatatgacttttaaaactcgttcctcaatacaatttctgctgcaaatgtcaagtaaaaaggcagatttgggtactacagatatcaatgttttatacgtttaaatgtaattctacaatctagacagctagttttactactgtaataaagggtgagcttacattggttttcacaggcggattaactagagtgtcattctcggctaataggttatccataaactgactaacagatactggcacatagctttgaggaattacatgggcggctgtttctattggggaacaatctaatatagcatcacttttcggcataagcctaaaagctaatgatgccctgcaagtggaaagagttaaagttttaatcaaatatgtatgcatacattcatgtcataaggtttgttaagaaaaagctgtcattaagttgttgaggaaaagcttatttcgtcttaaaaacataccttcctcgagtgtcagtggcagacaaatgatcggtagtagttctgtaagaggcagctggacggagacctgcagtagcatgactaagcgctttgccggtaatcagtaagagatcacccaccccacatccattatctgctgtgtaccaacgaccatttgggtcacatacctaaggaaagaagaactttcagaaggaacaaaaaaataaaagccaaatgtactaaatggaatagtgtaatgaatcaagcaaaatggaaactcaggattatggctgatcatgtctaactcatagatagtattcttacacaactatttcgtccctcgaaaggataaaatatgacacgttttcccatcaagtttcttagctaaaataaaagcatatatgtaaccttctacacacaaaaagttcaatagaggttacctgaatgccagtgccatctgagcagaacagtgtcaacaaacccttctcaacttcaatcttagcagataggttcccacctccagaagcatgttttccattttgtatcgatgcatgagcataggaacccagtagcaccgaggaggaaacctcgttcggagctagtggaaagtcatcaagcatatggttaaaaacactgcaaaaaaaggagatacgctcattgtataagttaataaaagtaaagagacacaacaagtattagtaaaaacagagaataagcatcataaccatcctactcgcttcttaaacgtagatgccttgctattgcagataaagcagctcgtgctactttacccaaacacctgaaaatctcagccatgcatggaggtgaagaatctaaatcttcaacagacctgttcacaagacaaaaatcactcactacacatcgtatagatcaagaactgctatagtaactaaaatcaaaccaatttctcaaattcaaaaacgcaaaaccaattctttctacaaaaaccaaaaccagagaacaaaaatgtcgcaaaagagctaaccttccggctctatacatagagaggccacgattgcctttaccagaaacagtaaggcttctagttctaaaatacaaacgagcagcttcaaggccacatcgcatcagtgcagtgtcttcactccctatctcgatcacagacgcattatacctcatcaaagacacagacaaagcctccacagcttttgcatacaccggagaaggagctccttcataaggcaaaatttcagataatcgaaccctagcgagaggagtcccagacatcatcaaaataggatcaccggaagggtaagcagcagaaatcggcgaaactggaatcgcgtgagataaaggagacttggttaaaccagtaggtacatcagaagcaattgaaacggcggcgttatagtttgaaggcgtaatcggagacgagccctgccggtgcatcgccactccaatcaaccatatgtctctagagttttccgattcnnnnnnnnnnnnnnnnnncggaaaaatggattggaatagtaacgtgtctcgttgaagtcgttgagatcgttgttacagagaggaattgtgattttactactgtacggaaacctgactggtttgaattgggtagacgatgagtagttaggttacaaattgtaaccacgaaacgccgtataagggtatatcgccgtcaatatagtggagaattgtgccggaaacgttggattcgccggagaattgtaattgtgaaaatttctaatgtagtagactctggttttgagtttgtgttaaaggctttgtaattttacctttttggtcaaactacctacatattcgaattggaaatgattcactaattaatttgatgtattctggtaataaattattacttggtggcaaaataataataattttacttttagttaatttacatttttttaaaaatttactacagaacgcaattaaataaaacatgcgatgtagccaggaaaattgtcactacacataattgtatgtattgtaagaaattaaatttaattaattggtcaaaacttaattgaaagattaaatttgaaaaattgtgatgtaagttgcgattataaaacgttatcttaatacaaatctttttagtttagtagcattaatgtgtgggcaataatataatcaatacttaatgtagtatatattgactaaaaaaggggatataggggtgatgatgaatgaggaattgaggatgtttggggggga

SEQ ID NO: 36432 - DNA, 2386 bp, Arabidopsis thaliana landsberg
agtcgctcgacatcctgctgtgaaattaaaggttatacgtttcttggaagacaagagctctcaaaactcacaaattttaagcagcatcctgaacagagcgagtgtggtagatcaagaggaggaaatgaagcttgatgatgaatgttttgctgagttctacgaaagatacatagctggaggtggaagagtgtcttacatggagaagcatctcaccaactcctctgagactttcacagctcttaaatcactagatggagagtatgggctggtgattgtaggaagaggagggggaagagcgagcagtgggttaaccaccggcctcaacgactggcagcaatgtccagagcttggtcccataggtgacgttctttcaggatcagatttctcacacaacacatcaatgttaattattcagcagcagcgtactcggggtcagctagaagggcttcatgatgacttcactatactgtgaatatctgtacaaatgcactttacttagtagcttgggaagagtagtagcttcaccatcacaactcttaaagagactttgtacaatagttcaaacattaagcggtttatgtagatagaatggtaaaaagaagaggtaatctaagcattacttcatagcatcctgaaatggtgttgaaacatagagttaaaagaagttacaggccgatttgtttttgatttatacaaagcataactagggaaaatttcccaagctcattattagtcttgattggtgcttagcaaaagacaatgtaaaacgttttccccgatgtgctgatggagaactccaagttccttaaaactgattcgaaaacttggccacctctgcctgaaaacacagaagggtataccataagaccaggtacatcaaacaacatcaatagcatttgatattcgtctagcttattaaccacataatcagataagtatatccgaagagagaaacttatgtacctcaaactggttcttcaagtagtcgagctccttgtccaagtcattgatggcctggttgtatgcttgcattggggaagactggcttgttgtgtgaatctacatacagaaaccactttcacaattaaacaacaacatacaagatctttctataagtccttaagcaaccagtaatcccagaggaaactgttaacactagaagcttaaaccaagaaatattcacggtttccaaacaaccatacactacttttaagttcctaaaccaatcttttggatcctaaggtcaatcaatgaactgaaaaaaacgcagaggatagcattgttctttccaattcaaagcaacaggctctacagtagaagcaactgaaaaacttggaacttaccctcactatgattttgtacttaagaggatgaggaagttggtatccagcaaacaagacattctcgtcgcgatgaagttgcctaaaacaaaaatttcagaacagagctgacaaaaattagggctttcttctttctgagaaaagagttgcaaaatcaacaaaaagacgtacatgcggacaatgtttccaatcgtatggtcttctctctcaaccgtgaaggaagcagcattgatgatcttcgtatccctatcataagaaaccctagaacatagaaatcgagagggtttagcacatgtaagaggactatcgagtatgatttcgagtgatagaaacttcaattacttcttggtgccttcagggacgacgaatcgctcatatcgttcgggagcattcatggcttaatcggagatttcaagcttcgctctctttttcgccgcagagagacagtcaagagttcttcagtttctttctggcaaacaaaatataatacgacgtcgtttttcataaaagaaaaaagatcgaatctccacgtgttatattattattggtgtatacagtttgggtcggatcgggccgataaaacataatatttccgtttaaggacctctaggtttatattatttacacaataaaggacgagtgatttaattcagaaacctaacaaaaaattcaggaaaaaaagaaaagaagtcagatccctaaaaatcgaacccgaaagcgtaaaacttgaaaaccgactatggcctttcacgtagcttgtccaattacatggtatgtttttttttctttcttttggcgcctcctttactcgttggcttgtttgtttttactaatcgaattgttctaatttgggggttttcttctttctttcgttctttctccgcagccggaaaatttgcttctgcgttttggggttttctcggaatcttcatggtaatgaagtcaaggatgtgtatctcaaagagatccattctcttcaggagttcgtgcgaaacccctgggatgctgaggtttccaaggacggtaccgttcagatccatgtgcct

SEQ ID NO: 36433 - DNA, 1845 bp, Arabidopsis thaliana landsberg
atcttgtttagaaactttacaagattgtgaaaaactaatcaacacaattatagaaaactctttaacaataatttataatctttcatttctttactataatatgattttatcaaagtcatcaaaaaatttggtaaattagaaaccaataacatttgtaaaataacaaaattcaaaattagacaaaaaaaatatgattcaaaattcattacttttattaatgtttttaaaaagggaaaataacaacaacaattgcaaaacaaacaaagaagcttaaaaaaacaataaattcaaatgatacaaagtccaaatcaggtaaaagagccacgacatttgactgaaccacagagacatgtcttcttgcctttataaagaagtacttcatcttcttcgctcctctccacacatgaaactccatagtcatatgttaactctgtcattggaggaatatgcttcatagcaaaaagtccgataagaagatatacatcacctctgttttcatactcaataggctgccagaaaacattcggtgaacaactgtgattcatgaaccgaccaacattccctttttccttagcacttatcaagacttgtgttggaagattgataaattcagagacttgttcccaactatcttcaagcaaaagctcaggttcgtagttccatctgaacctctgataaatctttgacgtgtcgaacaagtaatcatcatcctcttctacttcttctttcgtctttctcacaccagcaaactcgcagataaaagttccggctcggattggatcccaagaacgtaaaccccaaccacagtttcttgtcttgaacacttccaaatggagcggcaacccggtccgaaccaaccggacaggacattagacacggcatggacaagatccaccgaactagtcaatccacggatgactacaaaacaacgtacccgactaaaatgccatgaaggttgccttcagtaccacaattggtaatgtaaccccaataatcatctctctcaatctcccaaagacgagcaaaccaatccaacacaccaacttcaaaaggtcttgagtgtacaccatagttactttcaataaacggatctccaagattattaatcgaaaaatgttgtaactgaccaagcgcaccatagtcgaaatccaagttataaggataacctacaccagattccgattcagattccgattccgattcaaaaaaaaagatcagatcagatcaaattttacctaaatggtttttggttcgttcaaccaaagttttccggtaacgagcaagaacactagccatataagcttctttatctccggtgaattcatcgttaacctccggttccgttacagcgagtgacgttgtgtgtatattcctaccgagaaccatctctctttctcctcctcctcctcctttatcagctccgattccattagttaccggaggaggtaacggttcggtgactacggcggttggatcgaagtcgtcagataagatgtcgagtttttcgattaaggtggccattgaaagagtttgatcagattccaaagatccaaccattgttgttttaaaggaatctgtagatctgagtgattggaggagaagcggtgaaaatggtgggacaaagagagagacacacagaaaacgagagagacgcttcgtcgttgatttgatttatatagaagaggcaaaatttgattctctttttggtttttgcccttttgtagttacttgtgtgtgtcgttgttgttgctcgtgagatttttatatttttcttcttataataatgttttttaaaggttatcatttttttaatatacagaaattaaaaaattaccaacttgccat

SEQ ID NO: 36434 - DNA, 4282 bp, Arabidopsis thaliana landsberg
  unsure (1)..(4282): unsure at all n locations
aacttctgcggtgcaactcatcggtgatggtgtttcccaggtacagtttattggaaatcaggcagtatttaaccttgtgaatttcttaaacatctcgccggaaaattcagatacaaatgagcagtcttctgttgatgatgaggtgtatgatgaaatggaaagtcagaaaagaaaacacacacctttcgaacggtcaacatctctacaatctgacaggagtagtgatggcactagttttcagataggaaggatctttcgtcatatatggtctaggatgcagtccaataacgatattgtttgctattgctgcttcattattgcgtttctctggaatttcagtcttctttccatggtctatctagcagcactgttcctatacgccctctgcgttcacactggccctactcacatcttctgggtcatcatgctaatgtacacagaaatttatatcctgctccagtatttataccagattataatccagcactgtgggttaagcattgatgcacctcttcttcatgaattgggatttccaacgcaaagaatcaaatcatcatttgttgtcagctcgttgcctctgttccttatttacatatttactctcatacagagttctataacagtgaaagatggtgattgggttccttctgctgattttacttcgcgccggaatgcccgtggtagccagaaggatcttacaagaattagattgagccagagaatcttggatgtgtttaagaagctaagagatagtgcgaaattnnnnnnnnnnnnnnnnnnnnnnnnnnngatatctctgacacgtggagcagaatcccctccgtactttgttcaggtgacaatggatgttcacatgtggcctgaagatggaattcagcctgaaagagttgaatgtagaatgaatcagttgcttaggcttgtccataatgagagatgcgagaagggaaaccctgatctctgcccttactctagcagggttcacgtacaaagtatagagagaagtacagaaaccccaaacgaggccttagttgttctcgaggttgagtatgcttctcccacaaatggctgttcttcagcagaatggtacaaatcacttactccagcctcggatgtggcgaaagaaattcgtaaagctcaacatagtggacttggtgaaggaactggatttccttaccccattctctctgtaattggcggaggaaagagagatacagacctctacgcctacatttttggtgctgacttgatagtcttctttctggttgccattttctaccaatcagtcattaaaaataaaagcgagtttattgatgtatatcagctagaagaccagtttccattcgactttgtcattattcttatggtaatccatttctataagtctagtttatctgttcacacccgttttgtatcagtgccctnnnnnnnnnnnnnnnnnnnnnnnnnnnnnnnnnnnnnnctaattgttgttgatcgcgtcatctatctttgctcatttgcgactggaaaagtggtatactatctcttcagtcttattctcttcacatatgcagtgacagagtatgcttggagcatatatcctacccagcaacacgctgctggcttggctctcagaatcatatttcttgccaaagcaatgtcactagctctccaggccatacaaatccgctatggactacctcataaaagcaccttgtatcggcagtttttgacaagtgaagtatcacggatcaattactatggttacagactttaccgtgctcttcctttcctgtatgaactgagatgtgtgcttgactggtcttgcacagctacatcactgacaatgtatgactggctcaaggtatgtcgtctgatcccatgcatttactttctggaacccttgctatgatcatggatcattcatgttagtttgaacatactgccaagggcttaagttttgttcgtttgcagttggaagatgtaaatgcgagtttgtaccttgtcaaatgcgatacagttttaaatcgagcaacacataaacatggggagaaacaaacgaaaatgactaaatgctgcaatgggatatgtctgttcttcatcttgttatgtgttatctgggctcctatgctggtaataattttcttacaacacaacttttataatgcttttgtaaagtttttcatttggaatctgaattatcaatacgttcttgggatgaatagtactcatgatgcttgtatttataggagaaagaaaaattatgtgctagcttaatccaacaattctctgtgatgtcttacagtttgagtatttggtgagtcatttgtttgttggcaatggctgctttatccttgcagatgtatagcagtggtaacccgacaaacattgccaatccgataaaagatgcgagcgttcagattgatttaaaaacagttggtggaaagcttactttgtaccaaacgaccctatgcgagagaatctcaggggataacattgatctcgggctagatctcgggtctcaaagctttttgccaacatacaacaaaaatgacatccagctgatatgctgtcaagctgatgcaagtgttttatggcttgtccctgacacagttgtgaccagatttattcaatcccttgactgggacacagatatggacatcacctttacttgggttcttaacagagaccgccctaaaggcaaggagactgtgaaatatgaaagaagtgtcgaccctctggaccttccaaaacgctctgatatccaaatggttctcaatgggtcgatggatggatttagagtgcataatttgtacccaaagttcttccgtgttactggttctggtgatgtcaggtctttcgaggatcaggtaaatcttgtctgcacaagctaagagttattttccagacaatgtttcctgttttggcttatacttccaatattgtaatgttgttgctacagacggatgaagtgagtgcagacatactcattaaccatgcaaatttcaagtggtggtggtcattccataatcttaaagcgtctgaaaatatcagcgcttgcgaggggatggatggaccagttgctatcataatgtctgaggaaacaccgccacgtaagttagctcttctaattcaagtgttatttcataactcatgttctattattgataccgaaaataatatgcagagggctttctgggtgacaccctcagcaagttcagtatatggggactctatatcacatttgtactagcggtggggcgtttcatcaggcttcaatgctctgacctgcgtatgagaataccttacgagaacctgccttcgtgtgacaggtaacatttgtaaacattgtccaagagttttgctgttccatgatactctcaacctctaagagattatgaccactcactgttgaatgtagattaatagccatatgcgaggacttgtacgcggctagagcagagggtgagcttggagtagaagaagttctatactggacgcttgtgaagatctatagatccccgcacatgctgctcgagtatacaaagctagactatgatgcttaggtccaaaaccagtctctcacactaaagaaacactttgtcatatttgtacatactgagcggaatattctgagggatttgttttgttttcaatcagcttgtagttgattattgtagttgcgacataatgaaaagaggagaaatgagagatgggttcaaagaagcattccacattcagaagtccaatctcctaaaagactaaaccagccaaaatgaaaagaggagacagagccacacatccgagacgatgggccgaaacacacatagtataattgaatagtgggccgtggcccaatattaaataatcatcccttgattattgattatctatgacctcataaacgataataattactaattagtagtctacgaatgagaaatataataaaatagtcgttttctagtgtgtttgttaagttgttatagatcaatatacaagtatcattcattggaagacaacaacatgtatatatctgagtgggaatgtggcagaaaaaggatttggataaaataagtacacgaagaaaaaagacagagtatgtaatgccgttttggtaggatggaaacagcatgcagttgttttggcaactgtattgtagtattagtattattagaaaatccagctaagagattattagactttacccatatctaaataagtcatccttccttacctttttcatatccgaaacaaagacaggttgacctaaaaataacacgctctctctagattccatcct

SEQ ID NO: 36435 - DNA, 2311 bp, Arabidopsis thaliana landsberg
ttgtgggttttcgtgtgcctatgtgtgttttcttgatttcatctctccttttgattgtactttttgattaatagatttgtgaatatgttgatctttcttggcttttgggttctacgatactcaaacaaaactttcacttccaatcaaagtaaaaaaaaatatatctgtcagattatcattattacagcatcaaacagccagcaaaagaggaagacacagaagacttaaccataacgataagacttgtggctaagatccaaagggagaaagaaaaactctcttgcaaaagcagagtttgagaattcatacaaattattcaagctgtgaacaagagcatcctgagggacttaaccagattgagtcttcctctgctggaaaacgactgcgaagataggaaccccaacaccgatgctgaaagcggtgaatacaccgagagacatcttgagagcttggtacttcatgcggtccaaattgtacatgtgttttgcgtggaggtagtattcatcgtaaccaccatgtcctcctccgctcatcctcttaactccagtcgagtggaagcttctagtcactgttgttgatgatatcaaagaaatcttcagcaagttttgaaatattaccaatcaaacactcataaatcatcttatagcccatttagtttcaagagatacatcaaaacaagctgatcatagcatgaacatggagcctttcactgatcaaccaaaactatcaaaacacgaacatggaaaatttccatgaaacaaggaaacatcaaaatatgcatttctaatttcatgatacaatttttcagcctaatcataaacaatctgtttcgcatcacgccattaaagcgtgtttctatgacaaattcgcgagcagagaagtttcaaatcccagaattcaatcaacgaagaatcgcatcggaatcaatccgcggctaatcagaaacattgatatctaggcaatcaaacaaaaccttagaataatcgattcctgggaaatcaaacaaaaccctagacaacaaaaaaggggaaaaacaaagaaatgcaaaaccaattcagcagatacttctattggtactgaccagatctggagactgatgcttcggaagaagcaatgatcttagatacagatctgatgctggtgctcaacgccatgattcagaactaatcgagaaattgcaaatgatgaacgacttctctggaaattttacggcgaatttgttttggggaggagaggagactgagaaatgagagatgatatcacacgtgcaaagcgacatcttcttttgggccaggcccatttactcttacacaaggcctttatttaactgtgttgttcaaatatttttgttttaagtaaaagccgacaaaaatgttcagaaaaaaaaaactttgggaattttcttaggaatcatataacatgtcaaaataaaaattcatgtcactttctttgatgaacatgaaatatactaatttttgcttgcaaatctccacctgtagagtcaccatttgtccacgtagctgaactattttatcttttctaaccccaaaaaaatctctggatggtcatgagctagcgatgattcttaaccacagaaaacagacgatggaagcaagaagcgtatcttatctctacgtttcatattaaagcgcacgaaaacgaacataataaagattctcttttttttttttgaaaaatgctagaaaaataaacatgggtcacttgccacagagcctctactccgccgctggaccaaagtttccatatcctggaagctccggtctaggagtagatcaacggaagctgacgtggagccgcttcccggtgttcctacggtgcgcgtcgacggagtcgttaacgagtttgactcagaataatgcggcggagatagagttgaagtatctggtgagtcaacacgggtggaacgtgaggagattgaatagagacgacgaggatgagatcaggagagtgtctcttgttcaagccgaagctttccacatccctcttgctctttttgatgattttttcttcatgttttttcaggtttgtttacttttcatatcctataagattattgttttgatgtgtatgaagattttgataatatgtaatacaggcagaggttctatcagcccttctttacaaactaaagaattcaccacctgacaggtaaaacaaataacaaaacatcatttcattaagactagttttaaaacggaattcacatacaaaagttgtaaaaatgtggcagatatgcatgtatcgtggcggagcaaacaagtgaaactgaaactttgtcgagcgcaagtgt

SEQ ID NO: 36436 - DNA, 3829 bp, Arabidopsis thaliana landsberg
  unsure (1)..(3829): unsure at all n locations
aactcacctcttaaattatgtatgttttaataacttgatccactttttttggctgcttactgttttcctcgaaagttgcatttttttcttttgctctgcaaacgaaaaagaaccataaatttttctcatatttaaagctctctctttctctcacaactgtgttcacatgaactttctcaccgctttcttctcttcattgaacaaaaaaaaaagctcctaacttttttttcttctttaggtaaaatttgacaaaagctctcaactttcaaactctgtttcttcatcatcatcatcatcaccatggacgccctgcttcaagtttcagttgatgggtttagatttgagaacggatctggatcttgctgcaaacccagaaacaatctcgaatctgggaacaatctcttccctgatttccacgagtctcagaatcagtcttcaccaaacgattcacctccaacggtgtgtttggataactctcctgttctgaagtacatcaatgatatgttgatggacgaagaagacttcgtaggtatatctcgtgacgatttagctttacaagccgctgagagatccttctacgagataattcaacagcaatctccagaatctgatcagaacactagctcctcctccgatcaaaactccggtgaccaagatttctgttttcccagcacaacaacagattcatcagcgttggtttcgagcggagaatcacagagaaagtaccgtcatcggaatgatgaagaagatgatcttgagaacaatcggagaaacaaacaaccagcgatatttgtctcggagatggaagagttagcagtgaagttagaacatgtgttgttggtatgcaaaacgaaccaagaagaagaagaagaaagaacagtaataacgaaacagagtactccaaacagagcaggaagagcaaaaggttcatcgaacaaatcaaagacgcacaaaactaataccgttgatctacgaagtctcttgacgcaatgtgctcaagctgtagcgagctttgaccagagaagagctacagataaactcaaggagataagagcacactcttctagcaatggagatggaacacaaagactagctttntactttgcagaggcgcttgaggcacgtattactggaaacatctcaccgcctgtttctaatccgtttccttcaagcacgacatcgatggtggtcattttgaaagcgtacaagctgtttgttcatacttgtcccatctatgtaactgattacttcgctgcgaacaaatcgatttacgaacttgctatgaaagcaactaagcttcacatagttgattttggagttctctacggctttcaatggccttgtttgttacgagctctgtctaaacgaccgggcggaccaccaatgcttcgggtgactggaatcgagctgccacaagcgggttttcgtccttcagaccgcgttgaagagactggtcgaagactgaaaaggttctgcgatcagtttaatgttccttttgagttcaacttcatagccaaaaaatgggaaaccatcactcttgatgaacttatgatcaatccaggagagacaacggtcgtcaactgcattcatcggttacaatacactcctgatgaaactgtgtcattagactctccaagagacacggttctgaagctattcagagatatcaatcctgacctctttgtgtttgcagagattaacggaatgtacaactctcctttcttcatgacgaggttccgagaagcgctttttcattactcttcactctttgacatgtttgacaccacaatacacgcagaggatgagtacaaaaacaggtcactgttggagagagagttacttgtgagagatgcgatgagcgtgatttcctgcgagggtgcagagcggtttgcgaggcctgaaacctacaagcaatggcgagttaggattttgagagccgggtttaagccagcaactattagcaaacagatcatgaaggaggctaaggaaattgtgaggaaacgttaccatagagattttgtgatcgatagcgataacaattggatgcttcaaggatggaaaggaagagtcatctatgctttttcttgctggaaacctgctgagaagttcacaaacaataatttaaacatctgaaaaatgttacttctcaattacatcatttttgtttcccaatggttttgtagaatatgtttgatcccatgagtggaatgcaactcttttttcctgcaagtacatattgtattcaaatccttgtggaaatgataaattgtttaatcaaagatccgaagacaacacgagcacttttaacccaaacaaattcaaaacttttggctataatttatccaacgggttgcaacaccacgggaatgacgatacagacagagcaacaaacgatctactagaacatatgaaccgatgtaactaatagcatatagattgctgtagttagctaatttaaaccctatttggtttgaggttttggtggcctcaaaacgctccagtccaccttcttgctcttgggtttcttaaaaccattgccctttttattgctcggtgatggtttgtcaaagctccttggggacttgttaggacggttttgttcctcggagactacctcagactgttttcttttcaagtcaccatctgtttccccacttggctcaacctttgaactctccggttcactgaaagaggatgcattttgactagttaccgtttacaactttaacgagaagcaaaatcagaaatgaactaaacgataagtaggtgataaatctatttgctaattgctatcagtaacgacttcatttgtctcaaaattagatgatcagtaagacaatagatctccagcgttgatgtggtgtatgcacactctctggaaatagcaaacaaaggaatataaaaggttcagcccccactagggagccttagctcctccattactgttatagcacaaggtatttccaccgtatagatcctcgtctctgtgatagtaaagcagcgtagagctatatttacagatgtgaaagatcactgagtatcgcaggcggcagagtcacagatactaacctcgatagagggattgaaagactgaaaagacatgcgtcctaacaatgctcctggctgaggatcccaatctgttatgaccacactgcatcgaaaatcaaatcacacattagtaaacactacaaaacacataacaaaagggtagacaatagatacacaatgtccttgtttacagtaatctgatgaaagcaaaacataaacatcaagtaagaagaaataacggtaccacttctttgcaacagtcccaagggaaggaaaactcccattaggctcttcttcatcagccttcttcttctctactttcagagaagacctttgcataaactatagacagagagtattatcaatcattattaacacgtatctttttgtctctcacccaaaaccagattatcaactaagagctacatgattgatataacacaattcttcagtgaaaaattgcaactttagtcccaaaccaatgtttataattggtgctaagctcagtgctacccccaaggtgaaatcaacctcgaaggggattatcaatttgtccaagaatcaaaacccagcttaatagagaaaagactaaattttcaagctcgaattcaattcaatttcagtaatttccttgagtttcaaatctaaggtcatgtaacatgaataaagctacttctacagagaaagaaaaaagacagtacctttagatttctcagagtgctactaatctctctcttcgccattatagctttccaaaattacaataactgcgatattcccg

SEQ ID NO: 36437 - DNA, 2581 bp, Arabidopsis thaliana landsberg
aaaggttgatttccctttatggcaaccttatcaattatatttttcaaatcttaagcttttaattgaggttctgtttcttatttagcgtcaatggcgccattaactctgttcttgcttatttctcattttagctttaacacgacaccttatcagtggtgctttcattgagagtgctatggctccacaagtgacaaaagtcgcagctctcgattctgtaccggaatcgtcagaactcgaggcagatgtgacgccgcctcctgcagatccagtttcacctccatcgatggagctgcgaatggaaggcgtcgaaaaagaggtcctttacttgaaagaagttgaaacccagattttgaaaaaccagatctacggagtgggtcgtgaaggaaacttgactccatctgctttcatgtcgccttctcccggagctcttttgcaaacgacacagaccccgagtattggaagtcagaacagagagaccttgtttgcatacccaacacctgaaatgcagcttcgtttacatgaaacacgtttccgaccaccaccttttgagccgccgcgtttccaggcttcttcatcggaaccaccaaggtttcaagcttccacttctgagccacctgggtttcaaacactgtcgtttcagcagcaacccagttttccacctcaagggtttccaccaccaaggttttaaccaccatcgctgcgtcccagaacagatccaccacatcgtacggtggagctaccagtctatgaaggtggtaacgccgatgactggttattccggttagaacaatgctttctcgctaatcgaactcctgaggaagagaaactcgagaaggccatctcatgtttaataggagcctctgtgacttggtggcgttgctcctaggagagagaagaaatctatacatgggtagacttccaggacaaattcaaggtgaggtttagggcaagaagaggtagttatgctatagatcagttgctaaacattcgccaaactagcagtgttgaggaatacagagaacgatttgaggaattgatagtggacctatctcatgttacctttaatattttggagtctgcgttccttaatagactaaggaagagtctcaaagaccaagtggtgcgatgtagaccagttaatctcgctgacattgttgaaattgccaaacttattgagtcccaggagagaaacaacgcaacttatccagtcagacaacagccgcgtgtatcgctaccccctgctcaaacattaactgctgtgagaccttatgtgccaagcaaagacacgaatagagcttcaggaagtgggacggctacacaaaaccacaacccctgtcgctgttgtggttctatgacagaggagactaaggaacagtctatgcgtatgcggggatacataggaaacgcaagagtagtaatcttgatagactctagagctacttgcaatttcattagtgaagaatttgtaagagttagaggtttggacatcacaccgacgaggagttttggagttaaagtgggtggtggcaggatcattagaagcagtggcaagtgcatcaatgtgccattagaagttcagggaatcgagttcatcgaggagttctatttgtttgatttgggagagctagatgtggtcttagggttttcatggttagccaaactcggggaaaccagagctaattggggacgtctaagactcagctggcaaattggtcgaatatgggttataatacatggagatccagacttaagcacacatcaagtgtcattgagatcaatgagtaaagtgatcaaatacacaggagtcgttgtttgataacaaggcgtaggaggagcagacttccatcactccagccatacaacagatcctggatcactatgagcaagtcttccaagtaccacaatcactaccaccttcatgcaacagagaacacgcaattacattgaaggaaggtacttctccagtaaacctaggccttaccgttattcttttgagcagaaaaacgagattgagaaattggtcaaggaaatgatgagcactcatgtcataaggcctagtgtcagtcccttttcaagtccggtgctattagttaagaagaaagatgggggatggaggttctgcgtcgattaccggacgcttaacgaggcaactattccagacagttatccaatccctgtgatagaggaactcttggatgagttaaaaggagccacaatgttctccaaattggatttaaggtccgcttatcaccaaatacgaatgaagatgagcgatgtggagaagacagcctttaaaactcatcaaggatattacgagtttttggtcatgcctttcggcctaaccaatgcgccatccactttccagaacgttatgaatgatttattcaggccatatttgaggaagttcgtgctggtatttttcgacgatatcttggtctatagtcccgacaaggaaacacacttaaagcatcttgagacagtcctgcagcttctacacatccatcagttctatgcaaacctaaaaaaatgctcatttggaagcataagaatagcttacctatgccatatcattgtcagctga

SEQ ID NO: 36438 - DNA, 1533 bp, Arabidopsis thaliana landsberg
catctaatactcttctacacttctcggatcttatattcctcttacttgggacgtatttgatccctttttcgcttgtgcaggttttgccagagcctctataggaggatcaaacaagatttctgagttgaaatgtaacatatatgttttgggtttaggatattatgaatctctgatactttcattagcaagaacagttagttatggatttattagttacacaggttccactttgtctggttcgacttgcctaagcttctaagacagtgagaagtataacatcccatatgtggtttatctaatactatatatgtcaggtcttgagaaataacataatctgtaatttacctggcgtcttctcgtttcactgatcacgggataggaactagttatagctcactcaagaagagttatcaacgtacctgaaaacgaagatttatccggtgacaccatcatgttataatacgactctaatcgccaaatgcaacatttttcatccctttctcctatcattctaatatcccatatggccataacaatacaagtcaaatcaagtctatcgatgaaacaaagagctggtaccataaagaagagaggcataggtttggaagggcttgaccaggtctggtaaaccccattggcctagcctctatagcactttccagattggataattctctcaaacgaaacctaatccttgttataattacatgtaaagtagaacgttccagaaaaaggagatcctaaattaattcctaaatctcagatcttaagtattcaatccatttaattgcaatgttttgatctctgtagttctacaaaaagaagatgaagttggaagcttacactgtaagcacatgtagcatgctctacttttctgtgacatcttcttcctgctcataagcaaaatgctgatttgtttttgttctgccttttcgccgattttcctgtttgaattctgtaaagagaaaagcaggaacatgtaaagatcagttcatctgaagacagagcaaagaattacatatcgaaacttgttgaaagtatgccataagttgtgcagtgaagtgttgagcatgccagtatcatgtctaagaaccacacactagagtagcctcttatgcatatcccaaagaactcaccagaaaaactgcctgcttcatcactcaaacatgcactgtaggctgtagcaaagagtgagacttgccagaagaagacttcttgggcgttgatatcttttaacattgatttacaggacaatcatgttctaacaagcattggaaccattaagcccatggcgtatgtaacacaacacaagcatgtatcccatatttatatttcaactagaagaaaacaccacccaaatggagcaccataaacaggaaaagccaaagatctcctctgattttcgacaagagaccacagcatttaatgcatggatcggacgagaagctgagagcagaataaatccctattgctaacaacatccgagatttatcctgcagtcaatccctttcatctatatacataaaacttgcg

SEQ ID NO: 36439 - DNA, 5774 bp, Arabidopsis thaliana landsberg
  unsure (1)..(5774): unsure at all n locations
agattgacaaattgaattaaagatcttgaatacatatggcttctgtgggaacattaccagcttcttctatggctacaaaacaaagcaatgcttctatatgcgctgaaaaattacctgaagggattaatgagatgaagataaaagatgataaggttgaagaactcagattcaatattgagatttagtctcttatttaatttggactttatgttgttaataatgtgttttttcttcttgctgtttggtggtttcttgtaggaaatggaagcagctgtggttgatgggaatggaactgaaacaggtcacattattgttacaactattggtggtaaaaatggtcagcctaaacaggttagcttgtttaacatttttgtttttgaggaatttccattatttctatgttaataggaagttgatagaaagatcattcgcatacatgagtggcacaccatatctcgcacaacttgtggtttctgtgatgtgtaacgtgtgataaagtctcttatagctctttctttttgtcctttcagaccataagttatatggcagagcgcatcgttggacaaggttcttttggaatcgtttttcaggtgatgtttcgattaactaccctgaataattgattttactaagtagccggtgcattgactcaatgtagataattttgttacttgtatatatgcaggccaagtgtttagaaacgggtgaaactgttgcaatcaagaaagttttgcaagacaagagatacaagaatcgggagctgcagacaatgcgtcttcttgatcaccctaatgttgtatccctcaagcattgttttttctcaacgactgaaaaagatgagctctatctcaatctggtccttgaatacgttcctgagactgtctatcgcgtctcaaagcactatagtcgggcaaaccagaggatgcccatgatatatgttaaactctatacttatcaggtagttattattcagcccaccagaacatctgttctcatcttttgaaatacaatgagttaatcaacattgtttccatgatttcttccttctgttgtgggtgcagatttgcagagctttggcttatattcatggtggagtaggagtctgccacagagacataaaaccacagaatcttctggttcgtatccttagttgattttattcataacattttattggtctacatgcttctgcttgatcaatcttgtgcttctcgtaggttaatcctcatacgcatcaggtcaaactatgcgattttggtagcgcaaaagttctggtatagcatttgtaaagagacatgttgatttgttttcatattgaaaagtttgcactttttatggtgctatgcaatgttaactagtcctaactattttagctttgcccctctgtaacaggttaaaggcgagccaaacatctcatacatctgctcccgttactatcgagcacctgaacttatatttggagctacagaatatacaacaacaattgacatatggtctgcaggctgtgttcttgctgaattgcttctgggacaggtaatatgactgtccaaactttcctccatttatcttttacaaatgatttgatttaccgaatgatgtctaaagttatatattaccaatctttggcttgtccaacttttggttagcctctatttccaggtgagagtggagttgaccagctagttgagataataaaggtacttcaatttggttaaacaaacacacataatcctagccattgctatattgaacatagagtggatcattgattatatggaatgaagaggctccatttcctgctattgattgccatcattttgtttactgtgtgtgttacaggttcttggaacaccaacacgggaggaaatcaaatgcatgaatccaaactacacagaattcaaattcccgcaaatcaaggctcatccttggcacaaagtaagcaaacacatcatcagtctttccttaacattgatctccatatattcttacgattgaaaaatctgttgttggttcttaagatattccataagcgtacacctccagaagctgtagaccttgtctcaagacttctccagtattctccaaacctcagatcaaccgctgtaagtcaatgaagtgattaccataataacattatgtttgatatatctggttggttgattcaaacttacttgttattgtagatggaggcgatagttcacccgttcttcgatgagctacgtgatcccaatacacgtcttcataatggtcgtgccttgcctcctatcttcaactttacccctcaaggtctgtctcctccaaatatacttttgtttgtttcccannnnnnnnnnnnnnnnnngactaaaagtgtgtgcttcttgttaaatatgtagagctaaaaggagcaagtttagagttgttgtccaagcttatacctgaccacgcccgaaaacaatgttccttcctcgctctctaaatctcttcctctctctctatatatatgtgtgtgtgtgtgtatgtacacatgcatataatatgcttatcgtttctaagtaatggagatagcttctcaggattatcattagctttcatctttcatgtatctttgttgtttattgtcttatcacaacctttgtactttattacatacaatgattagtgtaatgtatgtgacggtctttgactcgccggtcgctacagttatgttggatactaaattataaaataaacttctcgctcgtcacgtgtcattgcatgcatccaaagctcatgcttcaaagcttagccaaacttatttttaaaaaagcctatgttctgtgtaaaagtgtcatttacgagagtttcttgtttaagtttaaccaatttcacttcctcaaacgaaatacggtaattggtaatatcctctaaacatgaattatcattgactataaaaattagtttcgcaaattgcctctaagcaccacaagtgtcacgtaacgtgtcatttattcatgtttattgatttagtaaattaaaaacattgtagtttaattattgaagtagtacaaagaatagggactaaattgcaatactctgaatttgtttttttcttttttagaatcatccgactttttgtttcacggtttcctcctccagtaaactgacgacgatacaagctctctcaccaacggcgacagtatctttgccggcggcgggagcgcttctgcttaatctgtagctcaaactaaaaattctctgggtattactcatggtgatttggaataacgatgatgatgattttttggagattgataactttcaatcttctccacggtcatctccaatacatgcaatgcagtgtagggtcgaaaatctagctggtgtagccgtggtaagtgatccaatccaacagtcataagtttatgcctaagcagaatcattgcttatgtgaatttttgttttgtttcagacaactagttctttgagctctcctactgagacaactgatttagttcagatgggcttctcagacgaggtttttgctacattgtttgacatgggatttcctgttgagatgatttctagagcgatcaaggaaactggtgaggcttttttctcttgtttgtattcctttctggatatatatgatccgtaacttgataccaataattaaccaggaccaaatgtagaaacttcggttataattgatactatctccaaatactcagtgagtttctaatactttgatctcttgggttgcttgtcatttacatgtgcttctgtcatcacagtattcatatcctctcctttgtttatttgtgaagaccgactgtgaagctggttcttccaagtccaaggctattgatcatttccttgctatgggatttgatgaagaaaaagttgtcaaagccattcaagaacatggtacttacagatttctctcctccttaagtaagaagtaacactttatcactttgctgatatttgctttataaatcgcaggagaagacaatatggaagcaattgcaaatgcattgctctcttgtccagtaagcgatgttacgaaaatatactgtctcttgacattaaaaaaatagtacttaaagttcgttgatggtttgtaggaggctaagaaactgccagcagcagtagaggaagaagatggcattgactggtcatcaagtgatgatgataccaattacaccgatatgttaaactcagatgatgaggtataactctttcatgttggtgataacatatttaagcatcccaggtttgaattgtaaatgtatctcactgctattttgtatatgtatctaattttatgcgttcttaatctattttaaatcatgacagaaagatccaaactcaaatgaaaatggcagcaaaatacggtctttggtgaagatgggtttctcagagcttgaagcttctttagctgtcgagagatgtggtaactttattttaaacgattgccattgtcattaaattttagttccgttttgttcaggtttcttctagacaacgtcgtataaattgcttggtttagcctctgatttagtggtgtaggccttagatgtgtttgctgagcattttgattgtatttcactaatcgaaagttgtcattagttctgtcttagcttctggttctgtgatgtacgccttagatatgtttgtagagaatgtgatcgtatttcacaaaatgataaaagttgtcagtacttgataaaattgtatgttcactagttcctttttattcaggtttcttctagaggaagtggcataagccaaattgcttagttttagtgtaatgtgatagtcaaattgtggctttagcctctggttctgtgatttaggcttgaaatgtgtttgctgagcattgtgattgtatttcactaaatgatacagttgtcagatgttaatatatatctcttacttactctaagtatgttgctgccttatccagactcatatgattgtaatttcaggagaaaatgtggatattgcagagctcacagacttcctttgtgctgctcaaatggctagggaatttagtgagttttacactgaacctgaagaacaaaaggtactgttaaaaccttttttataatctatcttttgtaagttaattcctttgggaactgattattttgggaaatttggtgtatgcagcctagacataatattaagaaaaggcggtttgagtcaaaaggagagccaagatcatctgttgatgacgagccgattcgtctaccaaatccaatgataggatttggggttccaaacgagcccggactcattacacatagatcgcttccagagttagcccgagggccaccttttttctactatgagaatgtcgccctcacacctaaaggcgtttgggagactatttccaggcacttgttcgagatcccacctgagtttgtggactcaaaatatttctgtgttgcagcgaggaagaaaggctacatccacaatctccccatcaacaacagatttcagattcagcctccaccaaaatacaccatccatgatgcatttcctttgagtaagagatggtggccagaatgggataaaaggaccaagcttaattgcattttgacttgtacaggtagtgctcagttgactaacaggattcgtgtagcccttgagccttacaatgaagaaccagaaccgcctaagcatgtacaaagatatgtgattgaccagtgcaaaaaatggaatttggtttgggtgggtaaaaacaaagctgccccactcgagccagatgagatggagagtattctgggatttccaaaaaatcatactcg

SEQ ID NO: 36440 - DNA, 3025 bp, Arabidopsis thaliana landsberg
  unsure (1)..(3025): unsure at all n locations
ccctagtttttggtctgaattgggtaaaagaataagaaccaaaccttaacggtgaaatcgtgaacggttttttctgcagcagctctagcttggacagtgaaaggacgagacttgaagagaaacccaggattaattggagattttagagaaaacccattactcagattcgcgaaattcgatattccggtggagaatttcaaggaagggacgagaaaggttgctgaggaattaggtctagaactgttgaagactgtagagaatgttccgtacgaagaagatgaagtagtcatggaaaccatttttggttaccggagacgagtttatgttcgtcttctttcgaccagtgttacacgttcaatagtgaaaccgagagatgatatagtcgagacacgacgcactttatatcatgccaaaatacacattaactaaaaaacaaaaaaaactaaatttttggaccataaatgtgtttttaattttatttactttacaaaaaatataatgatatttttttcacaatttgttttcaaattcgttttggagacataattggaatttgttttgcagtatagttggattttttgcagaattcaattggagacaaagttggatttttttttttacaaaatgcttattagatttcttatgattacttaaattctggagcattttattctatgaaattactgcaaaattatatttattttatgattatttatcttctgtagtattttatatgaaatcactgtaaaattctatttaattttatgattatttatatgctgcagtattttctatgatttatggtagggttttaaattaaaatattagatgatatttttataatgaaaaattttccttaatatttttgcttttataatttttttttttaaatgggacaaagtaagtaattaagttgagtggtgcaaaatccacgttcattcacgagcgcattttggaccaatttgaggcacatatttaagtgttatgatatctatgttcttgtcccaaaaattaaatggattttgttttggactatgtttcatcctcaaatttttgtttagttcctttgttcaatccttatcctaattattgtctctggttacaaatatgtcgcactcaaacgaagagttataatctaaccggtggcaatgcctatccattattattattttgtaatatatattggaaatgttgggccacataaacaaatagataagatgtgacagccaaatttagttttcttattagtactttagtagtatactcattagaagctacctctctccattattacaatatcaatctaaaatgttgttctatataacttgtgtttactatagaatatctttattttgttcaattagtatataacaattcccttttcgaaattgaagctaaggaggttttatgcgatgagggtgatacttacatgctcaccgaattcactcccactcgttattccgatccggtttttcttcgtgaagcgaggctcttaaagtatctgcaccggtgatcaaagtgaagtgtcttaagttagattaaaattttaatcaataaattgtaaaaatattaaacccaatcaaaaagtgacatgtaagtaaaaagtgtctttaacatatgtttcttctcttttctcctttcacaaatatttcaaatttatattaaaaaaaaatagtataaacactcgttaatataatcgatggaggtgtttttagaagacgtcgaagctatcttcaccaacatgggtctaggaagacctctctcgagagttccttgcctcattgaaagtcaaaaatattatatttttagctatttaagatatttaaatgttaataatgttgtaatacaatatttaagtcgtaaatatttgatagaccacataattatttttgtgcttcaagcctctcaaaactaaggaccggctttcacttggagacaaaaaatcttctgaagttcctttttcttgtatttttttcttccatttctattacttcacatacctaagtgcaaaaattgattgtatcatgaaactatgtatgttcgatataaaaacagaaatcataaattttgttaaatgccaggtaaaaactagcatatgttaatttgtttttgcaatttatcctaccataatactctttttctgtttaaaatttttaatatacttttagccaacgacaaaaccagtttatatgaaagttaagatgacaaaatactaatggtctacatatagcaaatacacaactagttaaattcttctgtaattttgctgtttacaatgacgattacacacattcttaaagctgtgatgacgaatcagagaaagctttaaacagctgtaaagattacacatctcaagttttagttaagtaagttattaacaagaaaaagttttgaaaaaagtaaagacctttaatagttttcttttctcggacaaaacaataaataaaaagaacacactttttttatcttttgtccttaggatttgattgtacatacatctgatctcaagtgatttcaagtggttggttctgttccttttctcgtccccgatcaagtttcttctcctaaactccagaatttggtcttgaagatctctaaaggctcttcctttctgttcattggtctacggggatatgtaagttgctagcttcttctgtcataacttcaatatctgaatctttttccgatccaaatagtcaaatattcgcatctaggtcaaatcgattcaaatccctttttgttgattgatgtgctaagtagttctgagttgattaagtctatcagtttaagagaaatggattgtgtaagattatgattcgtacaagttagcttctttcttgattaggtccactgtgaatcatgcacacgtttatgaggaagatattagatcgtgtaagattnnnnnnnnnnnnnnnnnnncaagctaagtttctttgctgatcattgattgctgagtagttctaagctgattatgtcaactctgaatcatgtacaagtctatgagctagaaaacgaattgtgaatt

SEQ ID NO: 36441 - DNA, 5175 bp, Arabidopsis thaliana landsberg
tatttttaaaagagttctttccctttgaaaattctttcatatgtagatacatgtatatatatgaaattgtaagttattctagtttatctttagttacattgtattgagttaaaaaaatcttcagtgttaagagtgaatagatcttacaaaacgttgtatatacattatgttttttatgcggatttaaacgctatatgtatagcataatttttatcaaattcttttttgttaaggctgattttgttattataaagagagaaacaatgaaaacttaaaactatgaaactccaaattgtgatcaaaattgactagaatatatatcttttattgtggttaggtctagtttctaatggatctatatacaagattacaaggtagcatgacaataataggtaatggattatatatatacaaggtggcctgatagtctaatagcccaagcggtacatctccatggtccagtattggacgctctatgtttgttcaattcaattttcttgtgctcttcaactacatgccgtttggccaagagaaaagcatcatgtacttttataaagggatattgagagcaacacgagatatatgctccacatgtaaatgacgctacaccaagaatcatttatgataattaagttgatacctagtagtttctagactattttatttgcttcttgtaactgtgagaaaaaatctttaaaccgcttcaacaaacttttttgtatcaaacccaaaaggccataaccaaaaaaaataaaatgtgtcaaacaattgtttggttgattgctaactggtgaaacggctcgaaatcatcggttaataactttttattgtgactgccttaacgtgttttgaaccgatttaaccatttaatcaaaccgactaaacattctaccaaaacaaattgttaagttgaatgctgatcttcaaaacagttggtaatcatcgatcaaaagggttcaaacaaataaactatttttttctcctgatatttatgatcgacaaggtccgatttagagacaatttttacgatatagaataacacaatttagtggagtcgaattccagtaaaaaaaacagaattaaatagacttaaccacttgactaaaagcatattcccgataaattaaatttttgtgatcacaaatttacaaaatatattttcttccttaaacgacctgttaatgtcataatataacactacattatacagaaaaaaatataagaattccaccatatgccaacttgttcatcccaggctgtcacttagccagccttggacttttgtccattgaatttcttctttttgcaccatacaatgaaacaaacacttacatttcacatacatgtctacatcttcgtgtgtacaatgtattttttttttttttttttttgacggcgtgtgtacaatgtatataagaatagcatctatatttttgtattcacggtaatgtcaacatattacagttagcgaatttaggggattatctctatagaggctatctaatttacaactatgcttcaactcgctttttcttttaagaattgcgttcgaattcaacatatgtctaatcataaaaatagtaatattttcctaattaaactttactaatcttttttttagtttaagaaaataccaactttctggccaatatcaaaagtgtttttcattattgattcatttatgtatattaattatgagtataataaattatcaagtcatcattttctttctttattagactactaagtaccaaccattaattagttgggggttttgtgactaagagggtatatgtgttagtgtcggttgtcactctaagtaaatagtgtatacatttacattcatagtaaacgaacgattcacaatcttagtattattcataatattcaattttgatgtgaattgtatatattttgatcttataactcattacgatattatgcacctaagtttcaaaataacttgttaggatcatactgcacaaacgaattatatgtaaaactgtatagagaatccaactttgtcggcaaatattttgtcaaaatgacttattagccaatcacatctcattccaactaagccacacctcatcacttcaaacatttttctcatccatataaatcatttacctctcaacctcacttttccactatactcaaaacacataaactcatcttcaaaactcaatggccaccactcctctcctcctccttctcctcaccgccgtcttcctctccacggagataaccgctcaacgcgctgctccggctcctggcccggctggtcccatcaacatcacggcaatcctcgaaaaaggcggacaatttgttactcttatccgtcttttaaacacaactcaaataggaaaccagataaacatccaaatcaacagttcatcagaaggcatgaccgtgttagcaccaacagacaacgctttccaaaaccttaaacccggaaccctaaacaaactaagcccggacgaccaagtcaaactcattctttaccatgtcagtcccaaattctacacattggaagatcttctctctgtaagtaacccggtcagaactcaggcttcaggtcgagacgttggtggggtttacggacttaacttcaccggtcaagggaatcaagtcaatgtatctactggtgtcgttgagacacgtctcagtacttcattgagacaagaacgtcctcttgcggtttacgtggtggacatggtattgttgccggaagagatgtttggagaacgtaagatctcaccgatggcgcctccaccaaaatcaaaatctcctgatgtctcagatgattcagagtcctctaagaaagcggctgctccgtcagagtcagagaagtctggctccggtgagatgaatactggattagggcttggtcttggacttgttgtgttgtgtttgaaattcctcctttgagtttgtttatatatattgagttaattgtgcgggttgtaataagaaatttctatatgtttattatgatgcatgatttgaaaactgaaataagagattattatttcgtgtgcatatatatgtattttctgaaatatataccatgttctgaagatatttgtattattattagttctttcgatctgaaaaattgacagcctcatacgattgcaatatacaagtccatgaaggatataaagaatatagacttgtcacttgtctctcgtgcgaacgtttattatctataacctctgacattctgcaaaattatccctttaggccattaccaatatatcgtatatagtgtgacattttagtcaatcaaaattaagttatataaatttaacaatatatctagctgtaaattttgtctgaaatatagaaaaaacaattcagttcaatttctttcttttttagtgtaattatccctttcttgaatcaataaagacaaagattaagcatttttccaaccttttacagaaaaagaaaaaaaaatcagatttttacgtgttatgcaagaaaaaaatatagtgataggcccaatagcctcttacacattcaccgcgatagcttttaaggaaaatgaatgtgaaaaaagttccaaacgttcctggatcacctgcactctctgccttgcttaagctcggtgttattggtggacttggactctattgcattggtagtagcatgtacaatgtcgatggaggacaccgtgccatcgtgtttaaccggtttaccggtatcaaagatagggtttgtattgttttcttataagagttaaattactctgtacctctattacttttttgtttattatccagagggtactcattttaagataccattgtttgaaagagcaattatctatgatgttcgttctcgaccttacgttgagaatagccaaactggaagtaatgatcttcaaacggtatgtgtgtttgtgtagttgtgtgggtatgcttaagctgtatctctatctgattttgtttctgatgcttggttgatgttgttcacaggtggctattgggcttagggtacttacacgtcctatgggagaccgcttacccgagatttacagaacactcggtcagaattatggagagcgagttcttccttccattatcaatgaaacactgaaagcagtagtggctcagtacaatgcaagccacctcattacacagagagaagttagtatctcaggattcttactctaatgttctgtttgtcaaaatcctttaaagtttgtaactcttcttccaggctgtgagtagggagatacgcaagattgtgacagagcgagcagctaaatttaacattgctttagatgatgtatctatcacaaacctcaaatttggcaaagagtttactgaagcaatcgagaagaaacaagttgcggctcaggaagcagaacgggctaagttcattgtcgaaaaggccgagcaagacaagaaaagtgctattatccgcgctcaggtaggttatcttctttttgtttaagcattatgtgtctctggtttattagaagttgtgtgtaatgacaattatgtgattcacagggagaagctaagagtgctcaactcatagggcaagctattgcgaacaatgaagctttcattactctgaggaagattgaagctgcaagagagattgctcagaccatagctaaatcggcgaacaaggtttacctaaactccagtgatctcttaatctccaagcaatgaacttggagcccagccctaacaactagagaaacaaaagtcactttggacaggtttagttttcatcttgtttttgctatttatggattagtttgagatttgaacagtactagataacaaaatattctcattcacctagttttacaaaaaggtgcaagttaacaaataaatcaaatcgtgtctaaccaagaatcaaaatcatctaaaactttggatgaggtctggttcgactgtggtatgatcgatactggagtactttcgagcaaatcatcaagcacatcattaaaacccgtcatgtgaatcttttgatcagatgggttccctggtttgttgaattgttctgtgctactatgagatttgagaagagaatcaagttccgtttcaaaagctgaagatttacctgaggcactggccactgggtttggctgtgtatgtgcttcactaaaggagttaaggagcttcttctcatcagcttcaattgctgaagatt

SEQ ID NO: 36442 - DNA, 1028 bp, Arabidopsis thaliana landsberg
  unsure (1)..(1028): unsure at all n locations
aagtagaagttcgttctttttgtgtgtaattgaccgttgaccgttgatctgcattagcggtcaacgggcaagttgtgtgtgataatgttcacgaatccaaaaattaattgataggcgtgatgttctttttttcttttttctttattgaacaacaaatataggcgtgatgtttgtattcagtagtcacacattttcctgggaatgtgactaccaactaacatttaagaccatattatatactgcacaacttttaatcaatggcttcattttccacgagctatcattttcccaaatgaaaaagtagttgatagttttctataattaatgtatcagaaagtaaattgataaatagtattataaaaaaaaagaccgaaatatttatcatagctaaggtccaaaaccgaaaactgaaaaaagtaaatgtgtaacatacaaattgacaagttttannnnnnnnnnnnnnnnnnnnnngtctcttaggccttttactaagcccaagcccagtagcccacaggctcctcaacatttccggttgactacttaaccgggaatatggatatgccatataccgacaattaaacttaaaccaaatcgaattgaaatcttaaaagagaaggataaaatgatgagatgacccacttgaccagcgtggttctgatgtcgtctcgtccacttacgatgtggggttgggcggcatattcgttcccaccacgtgtctcctcaggggctgaccacgtgattcccacgccgaaagtggaaagagaaacagagtttgagtatcagaggagaatcttaatagtaatattaaactcttgttctgtctgtggtcactttatatattctttttgatttgatcaaacaatggtaagtacaccatctgtgattctgtatcactagtactgtcatctgtgatccgtctcacgaacattgccttatggatctctaacattaacactaaagcaatagtgatatacttatctttttgattaggattttaaacatgtaccaacaacctatagagagagaga

SEQ ID NO: 36443 - DNA, 1863 bp, Arabidopsis thaliana landsberg
cacagcaacaccatcctttatgttttgcagaatctgcttgtcgaatagccgttcgctgaaccggtcaattggtaaacggacgtttatgtcaccattttgtgggcactgagtggttaattcgggtaggaatgttggattgatagtcgggtcaggttggccaccaggtaagaaatcatagagccgtttggacatgaagaagcaggccgttgttccgatagtgtgagcagctgatacggaaagtagaccactcaggtttagatctcttaaattcttaaaactagtaacaattttttttgtcaaagttttctcatattgaacttgaaatgtaaactaaataaaaaaatgacgcaaactgagccggaccaggttcaaaatgcatgatcactactggcttagactcagcatgttgatggtttcgtctttgtttagtcacacgtgaaagttgataatttcacgatcgtatcgagatcagtattggtttttgatgaaaaaaaaaataaaaaaaaatcaatactctatagaatggggccgttagatatttatgacgttttatcagattaattgccgatcgtgtaacaggcccattttcggggtgaatcaacatttctgtgctataccagatttagtggttaagatgacagaacatcaaaacatttgtataaatgcctaaagttgacccaaaaagcctgattttttttttttacgaacgattctttaagtttcgcaacgtataggtaaatattggataatttgttatcgttagaagaaaattctcacaagtttaaaattttaaatttcacgaaattatttttctgcacaaagaaacactgctggcttagctggaaaaaattccaataatgttttcttgtattggtctaccagaatttcctaacgcacgtgacactaacacacgaagaagagaggaaacggacgaaacatgcgaaacgtatcatggatccgggaattgaaaatcatataacttgaacttcgaaccaaaaactttgagaaattcgaaaccaccaaacaaacatgaatgagagagaagacgaagaagaagaagagatacatatcactgagaagcacgaggtatttggagataagtccaatatgcatgaacttagcctcccgcactctcaatcgagtcactcacctccggcatgtccttagccaatgacatgttcgaaacccgaccatctctccgcccagttggcacctcatacgccggtccattagcaagtctatctcacccaaccttacctgtccccaaacatcattcatcttacgtcaaattcactcactaaattgtcaactaaattcacttgataatctacttgtaacaaaacattgtaagtcagaaatgacaagaactacataagaaccattttcaattcttgtcaggttcagaaattcataatgaattgtttgttgccaacaattggtcatcaaaacgtttttatttcgattcaaattattaagataaggctaatataaatgagaaaatagagaattgaagtaacgtacatgaaaatcgactccgtcagcgtccgaaccaagaatctcgtcggagaacggtgactccttacctgaccaagcctctaaaaccccatcgtagtcgagcttcagcaacggactcactctctgctccagctttggattcgagtccgtaacttcagagctcattgattccgccgccgccggagccactttctttttcttcttcttctttttctttttcttgtctgcctccgccgtcacaatcatctcattcttactactatccacgacattggattgaccatcatcagctgtggcggcggcggcggtctgaattctcggcgaaatctgatcaaactacacagtagg

SEQ ID NO: 36444 - DNA, 2882 bp, Arabidopsis thaliana landsberg
gaaacttatttcggaaagacgaaagataggtaagttgttctattacaaaactctttatctcaagttttagagttgtgctttgtctcataaagttgaccccaatagatcgatcacaatgctttgatattgacagatacgattattaagactgaagatgaaagggaagtaaaaagaatagccttcttctctcaagaacctctagaagaagaagaagaagaagacattgatatgatcgaagaagatacagaaagagaggatcatagagaaaataacgacaagatcatggaagataatgttcttgaagaagagtctgtcgttgacttttatggattcttttgaaacttgtcttctctaagatagcctctcgttgactttttcgtttcttaacctctttacttgatcatgtaattatatatatatgaaatgaaaaaatgttttctgtctctttgcattggtccaaaatcaaaactagagacacaaaaatgaagtattgtaagccatcaacctcttcttggtttgagtgagtaaaacatttgatgaagctttttctggttttcaagacatgatcgatgattcggtttgatcagaatcagtttggatctcatgagccaactctctggttagagaatcagctcgatcgtcgtgtcctcctgcaaatgtgtagactttgaatgcaaactgaaatgccctccaaagcattttagcagatcctactgtcttcttcaaactcggctttgcatcgggggacacgagcttttcgtctctcttttcctgtgaattcattgttaatacgataagatttcgtacaacaaaaagggttaaaacgaaagttgttttaacattattagcagttagttaccttcaatgcaagttccatgcaatttgatgagatatcaaccattgtttctttgatctgaataagtatattgaaatcgaagtggatgttgtggctctggaacttctttgattcctcatctttggttcgatccaaagtgtcaatgtctcctttgatctgtttgaataatcattgagttttggatatttaagttacaaaatgtagttgaaattaggatcttagggaagatattaaataaattattgtagttaccttggtgaagtaacgttctactttatcaagaagctggttcaaaggaggttctattttcatgttctgtagctcggtgatcataccgtgtagtttcgtgtacaatgcaacagccattctcattgcttcgagtttcttctgcggaaacccttcgcatcgcgcaagaacctaaaaattttagaacactttcacaatcaagaatcacaaaaacagaggatattagatatgaaagtgatggtaaaaagatgtttaaatgttgcagacctgtgactcgtctgttaggttttcaagaactgattcgacgcgacggtggaagctaagaagctcagtcatgtctttagtctggaacttagtgatctcaatcttcagctcatttattgacgtcatgtactttgcaatatcggcttgtatttgcaaaaaatatgcagatttctttgtgatctcagcaagagcatcagccattccttgctttccaccagctggagcgcttccggctccagcttttcttccgcttccgctgccggtttttgcgttaggatcacgcccttctactttccctttaaggattctataaaggtttcctagttgtgttgaccttttcagctttgtggcagctttcttgggacgcaagcttcttgcagctcctggtggcggtggtggaccagctgctccattcgccatacccattcgaggtggtggcggaggcggtcctgctgctccgtttgccatagccataggaggtggcggcggtggcggtgctgctccattagctagaggcataggaggtggtggagggggtggtccaccacttccactatttcccataggcattggaggtggagatggtgctctgttttgcataggtggaggaggaggcggtggtggtgccgcttgagttcctggaggtggaggaggcggtggtggtgccgctgcagttcctggaggtggaggaggtggtggtggggccactgcagctcttggaggtggagccggtggaggtggagccgctatagttgttggaagtgaaggaggtggcggtggtggtggagcagagccttttaaaggcttaaatgctggtggaggcggtggtggtggtggtggagcaaagtgtttcaaaggcataactgctggtggaagcggtggtggtggtggtggagcaaagtgtttcaaaggcataactgctggaggaggcggtggtggcggcggaggaggtggcattgatattgctatgtcagcaattggcggaggagtaggaggtggtgatggaagaggtaaagaagcagtttttataaaggatagtggaggaggaggaggcggcggtggcgggaaaagttgtgatgaattttcatatttttctgaaggattgagtttggattcagatgttgactccaatgaagagatcttcatgatagtgtcttgttcgccatcaagaacaacggattcttcatcaagattaacagattcttctgtctccattttcacatcaatgctctctatttcatccttcttctgcttgatctcttcaacaatactaatctcatcttcatcattgctttcatttggttcctgagcttctttctgtgacaagatgtggatagcgagtcgtttaacatcgataggactaagcttttcaagtgcttgaactctcatattccataaaagatgagatgcagagtttgcaaagtctccaactcttcccggtgaacccatcatcgattctggtagaactgatcttggggtggtcggtgacccgcaaaacgagtttctgctaccaaag

SEQ ID NO: 36445 - DNA, 6153 bp, Arabidopsis thaliana landsberg
atatatatgttctgcttgtgtgcaataataagtgaatacatgtaggaacatattccatgtttttcattagtaattgcattaacagtaaaccaattcttttttttatcaataatttcatctgtacaaaatggtgggttttgggccaatatattttgattccctgattctttttttacttggttgaattttgtttagggtttgtatatttttatcaaaaactgagtggagcactggagcttttgatttatggttattagatgatcaatggagaattcttcgctggtgtttaatttgttgcttttttgcttttctgaacctaagcttaggatctgtatttgttgtagaagcttattatctattggagaaagtaatcaacgtcttggttagtagtagtatattactaaaccttaattacctctgattctgatttttgaatattgttgtgctctacctcttttgtatttttggagtaatttccccttaaattctatttttcagtgaaacttttgcattgtcatacaaataaagatatataatgtaacaagatccaaaaaagagtagaaattaacatgaatatattcttataggtcatcttccgattcctctttaggatattcttcatctatttcaatggcttcttcttcctcaactgctgcttcagcttctagatttgcttcatattcttcatcgacatcttctattccatcataaaagtcatcctcttcttcttcgtatatttcttcttcttcgtcttcgtcaatccatttaaggaactcatgttcgagcaaactatcaactgaccacctcttagatggatctctctccaaacactttgcaagaaaatcctttgccttatcagacaagtaattaggaatatagggaacgctaccactttcaccaatgagaattctccaaccttaccaatcaagcttaccagactcgttctcctgtcaacatctcaagcacggtacacccaaaaccccacacatccgcaccataatccaaaacattgtcccttataagctccggtgacataaaccttgcagtgatagagaacgttgcaccataatttttttttagatactttccaattataaagaacagtttattgtggagtccaaactctgaatcataaacgaatcgatccgcgagaaactcgtggttataatataataaacttatatatattatatgcattattgttgcttgttgccaaagccaagacagaaaaagatcattgcattttgaaaacgtcgtgttgaattgatagttgaccaaaaaaccaaatataatcaggataacaataaaatcaaacctaacgaataaacaaattgtcgatctgatgatgaaataattaagagtgtaagtataggaccgtcttttgttatggatgggacttgttcgagtctggtatatacagattaaatatcttctgacacttctatttttatatcactaagttttttcatgtgcttcttcttctccatcgaacataaacagagaaaacaatcaatatgagcaatcatcaaactttgactttcgtttttggagagaaggaggtgttgaagcaattggagccgtggtgtgaacttaaagacaaagtggttcttgtgacaggagcttcatctggtatagggagagagatctgtcttgatctatgcaaagctggttgtaagattgtagcagcagctcgtcgtgttgatcgtctcaactctctctgttctgaaatcaacagctttggtgcaatcggagtccaagccgcagctcttgagctagacgtttcatcagacgcagacactattcgaaaagcggttaaagaagcttgggaaatctttggaacgatcgatgttttgattaacaatgctggaatcagaggcaatgtcaagtctagtttggatttatcagaagaagaatgggacaaagtctttagaaccaacttgaccggatcttggttaatatccaaatacgtctgccttttgatgcgtgacgctaagcgcgggggctcggtgattaacgtctcgtcaatctctgggcttcatcgcggtttgttgcgcggtggactagcgtatgcttgttccaaaggtggtgttgacaccatgacaaggatgatggctattgagttagcggtttataatatcagagtgaactcgatcgcacccgggattttcaggtcagagatcacacaaggtcttttccagaaagagtggctcgagaaggttacggaaaagattgtaccattaaagatgcaacagactgtggatccggggcttacatctctcgttcgctatctcattcacgattcttctcaatatgtcaccgggaatacatacattgtcgattccggaactacactgcccggtgtgcccattttttcttctctttgaaaatcttagtcaaaatcttctgtgcttgtacatacaccgtgataagaatgatgtctttccaataaatggcagtactggcattaacaatgaatttactttctcagatatttttttttgtttatgcgtacaaagagaaatcttgataagcttgagaaactaagtgatgatcatcccattcgtctctatacgtctctggatgggctctcttcttcacgcccgttgcaaaatacatctctttcctccattcctctgtttctgagcaaccgcattgtgaagccaaccaactattgtactcaaactgcgaaacaacaaaaatgttgttaatatgtttctgtttgctcttggtttatcataagtggaaacataagttaaagagaattcatacttgagaaatgcccatttggtgagtatatcgctttgcaatcccttgggcatcaagtgttgagtataaggttttgatttccatcatcatatcttcctttgaaggcagcggtatccgacccgacaaaacaccagcgatccacttgctttgcagctcaaacataggaaaaggtacaacctgaaattgaattttttacagattattcaacatattaaaaagctacaggaaacatatgaaattgctgtataccttccatggtatccccacaaaggagagccacggcgcaaaggctggagagaagacgtctttgtacaatggcccgacacgattatcatctacagtaacatttccattggtttcaagaaacgggaagtgatacttatacctataggaagttaggagttttgtcaaacaagaacactctgaaaaagaataccgaaaaactcaaaaccgaaaacgaaagagaaaataaatacccagtgcaatgcataataacatcaaccgatatcgttttcccattctgaaaaaccacagaaccatccttatggacacactcaatctgcgtgacattcaagaaaacaaaaatggttctcctcctcatcaacgaattatggtaaagtactaatcaggagctagctaactcaccatcgaatgcatccataaattattgtaaccaggccgttcgatatatgtatcagcctcatttgacctacaagccacatgaacctctttggcaactctagcaatatccctacttatatcatcagcacttgcagagttccctataagcacaacaacctaaaccaataatacaacacaatcttcacatcagttatgcataacatgatctttcacataacatcacaccatcacatgtttttgtacctgatctctaaacggttcaggtatacgataattatgactatgcatctccttccctggccaagaacttatacctaaaagtttccaataacaaaatcacaatcacacttctcactgttcctatggaaacttcgatgaatcaacggagattaccaggaatttcagcgtgacgaggttcaatgtaatgtccattacaaacaacaacagcatcataaatctcatcacgaagaactttcttctctttctccgtagattcaattctccatttcccgcttccttcttccgccgccggagcaaccttcacaaccgccgtatcaaaccgaatcatctcctcgatcgcaaactccttagcgaaatcttgtaaatacgccaaaacttcaccatgactcggaaacctcctcggatctctagattccgatacaccggaacgaaccacgaacgggaagtccctgtatcccatacactcacgggggagattagttcggagagagccataaacgctcgaatgaacaacggatcgggtcgggtcaacgcttaatggatcgggttcgatatgatcggtgtatatccaggttcctccgacttgtttttgtctctcgaagacgaccaccgagtgaccttcccgtcgaagctctcgcgccgctactaatccggcggctccggcgccgataactgccacgtggtgtgatctgattggtgataaggaaggcgccattggtttttttaacgagattcgttaacgatggtgaatatactacggcctttttataaatatgtggcccaaaaactcatgatccacacacaccacgacacaatgttaaaaaaacaaaaacaaattcctgagaaattatttaaacgctgcgttttatctagagggtaagtggaagtcccaaaacagttttatggcccgcttcaaaattcaatcgttagtaaaccggtttggtaatcagttctaaaccagaatcccaccggtttgcatatctctctctccgtgtagggtttgcgatttgcagagaggagtgagagtaagagtgagattgagaatcagctgaagccaaaacgagaagatgaggatctcaatttcgagtgtagtttcatcgacgacgagtagatttgttcatcggaatcttcaggggaaaggtaatcctcgaattgctccttcttccattgatctttgcgggatgtgttactggggacgagctttttctagtggcagtggtgattacagagagatattgagaaatgggttacatagtatgaagttagatgatgcaattggtttgttcggtggcatggtcaagtcacgtcctttaccttccatttttgagttcaataaactgttgagtgccattgctaagatgaaaaagtttgatcttgtcatctctctaggtgagaagatgcagaggttaggaatttcacataatctatatacttacaatattttgatcaactgtttctgccgacgctctcaaatctctcttgctttagctcttcttggcaagatgatgaaactcggctatgagcccagcattgtcacgctttcttctcttctcaatggatactgtcacggtaagaggatttcagatgctgtagctttggttgatcaaatggtggaaatggggtatagacctgacacaatcacatttacaactttgattcatgggctttttctccacaacaaagcttctgaagctgtggcgttagttgatcgaatggttcaaagaggctgtcaaccaaatctggttacttatggagtggtagtaaatggattatgtaagagaggtgatattgatttggcttttaatctgctcaacaagatggaagctgcgaaaatagaggccaatgttgtgatctacagcacagtcatagatggtctttgcaaatatagacatgaggatgatgcactcaacttgttcactgaaatggaaaacaaaggagttagaccaaatgttatcacctacagctccctcataagttgcctttgtaattacggaagatggagtgatgcctctcgattactgagtgatatgcttgagaagaatatcaaccctgatttagtcactttcagcgcattgattgatgcatttgtgaagaaggggaagcttgtaaaggctgagaaattgtacgaggagatgatcaaaaggtccatagatcctaatattttcacttatagttcactgatcaatgggttttgtatgctcgatcgccttggtgaggctaagcagatgcttgagttgatgattaggaaggattgtctaccaaacgtagtcacttataatacgcttataaagggattttgtaaggctaagagagtagacaaaggtatggaactcttccgcgagatgtctcaaagaggattggttggcaacacagtcacttacaccactcttatccatggattttttcaagctagagattgtgataatgcccaaatggttctcaaacagatggtttctgatggtgtgcatcccaatattttgacatacaacaatttgttagatggga

SEQ ID NO: 36446 - DNA, 7976 bp, Arabidopsis thaliana landsberg
ctctctttcttcaatcacagcctcgttgaatgcaatctcgttgtctagcaatacaagttcttgtctacaacaatcaaacaaaggagaagataagttgaatcataaaggttaggagatatgtgtaaaagaatattttttcgggatcacctaccttttcgactcctgaagttgtgcccgctgttccgggaccttatctacctcacccgccatgtagctatataccgagccagccaagacaaataaggaacatgattatcaaaaccacacaaacaattcataaagtgatgctttttgcttatgataatcatgttcgaattcgaattcgagcttaacatacatgaaaccacatataatcaatcagttgtgttacctagaaggaagagcagattgagggacgaaaggagtataagtggtttctctttcagcagcagtttgttgagctttctgaaactcttttaaaacagcttgaaagtcccttgcaagcttagcatctgcaatcttcttacttgagctacacagttacacaacaatcaaacaactttcaattcatcaaacacacaacaaaagagtagcttaaaaaccaaacaagaagaaaaaaaattccattttacattgacaccgctttgatgatcagtttcactagcttctttaagtttagctgaagtatccttcacaagctgtccaatatgcaaccttgtcttgtgcctaaaacaagcaaattgactcaattagaaacaatttcaagtaccctaaaactcaaaaaggagataactttaactttgagaagtacttacagcttctctctgagctcaggcgtatctttaggagtaccaagagtattgacaagacgatggaaagtggaaacacttgtattgatctgaaatataccagaagcaacagcttgagtcgtgtcttgtctacaaccaccaccattgatgttccttgaagaagctaatgatcttcctcttcccgcctctaaatcttgaaaactcattctttctctctctttctcgaaaaccccgccactaaattatcctcttttattcgcccaagaaaacaaagcaacaacaaaattcgatttacagtcgataacggagatcgagggaagagaggatgtgatggtgatttcaagattccccggtgagtttctctctctccggacagattgagaaaaaacgtgaaccgcggagagagagattgagcaaaacgtgaaatgtcacattacctgtatgaacggaaaaagcttgtacttttttcattttttgatccttaacttttctataatattccaaacgtgactctatagtttagaatcttaacggtatatcctccttttattataaagtgataaatggtctacgatgattacattgctctgagctcaggacacgtggatggtagacattggtggagaaagtgattatgtcacgacgttaattgattattttaaccaagatactaacagattacggattaattagaattagattaaggattatgatagattagtccagaatttaatgaataaaatctctagatagaactttacgtgactaaaaagggtcaaaagcaaaagaagtttaaaattaggactcttttttaatcatcgcacgtgagaaggttccgaccatatcacgtgccaaacccgaataagactcgtttttccaaggcgtttaaaatcaggtcccacttttttcttttatttttcactcttcttcacatcaaatccgcgaccagagatttttctttcctttgatttttcgtttcgtttcgtttcaaatattgttcctcctgtgtgaaggaaaaacaatcttccatttcaatccgcgtcaacgcgattttcttcatgacggtgagcttatctaatctcttcgctttttgaaactagttagttttggtttttgttttggatttatcctgagaaaggtcgatgtttttgctgttgatttgattgaggaagatgtgaacagatctgttgattttgattgttgttttctaatttgttttgcgagaaatggcgttgattattagtgaagaatcgctagtttttttattttagaggatttgaagctgttctctgtttttgatttgggtgaaaattactgtttctgatatgaagaatttttttttttagggtaaaattatttttgtttggattaggatattcactgtagcatttgttttgttttgtaatctgttaatatctgatctgtgccataggattagttttgagacaaggatttgcttttcctagattctgaggttctttttatcttcttgtattgatgatgcaatgtttctgtgttttctgatcattgtattgataatattggttgctttaggagtgtgtgtgtgtgtttagtcattgttttaggcgataaggaatcgagaaatgtgtaatcgaacaactaatgaataagtctgagatttgatttagctggtgaaatggtttgaaattttagtttttaagtcacacgagattatatttcacttgcagatgacaacagttaaagtgagcaatgtttctctaggagcaaccgatagagatctcaaggagttcttttccttttctggcgatattctgtaccttgagacgcagaggtttggtttcctctctattgttacttttgaaagttttagattacagcttttagttcgtcaggttctttactcttttgacatgtttgtacagcgagactgagcggactaaactggcatatgtcacttttaaggatctacaaggagctgaaactgcggttcttctctcggtatttttacttcttagcctgattagtttctcagagaaactttctctatatgattgtatcctttgagtgactgagtattaatgtaattctttcatttcagggagcaacgattgttgattcttcagtcattgtctctatggctcctgattaccaactgtcccctgaggctttagcttccttggtaagctcgtaactcatcatctcttctgagatttttcacaagttaaaatcttaccatttcattctttttcacaggaacccaaggacagcaataaatctcccaaggcaggtgactctgtattgagaaaagccgaggatgttgtgagcagcatgcttgcaaagggctttatactgggaaaagatgccatagccaaagccaaaagtgttgatgagaagcaccagctaacatctacggcatcagccaaagtcgcatctcttgacaaaaaaatcggtttcactgataagatcaacaccggcacagtcgttgtgggagaaaaggtcagggaagttgatcagaagtaccaagtttcagagaaaaccaaatcagcaatcgctgcagcggagcagacagtgagcaatgcaggttcagctataatgaagaaccggtatgttctcacaggtgccacgtgggttactggagcattcaacaaagttgctaaagctgcagaagaagttggacaaaaggctaaagagaaagttggtatggctgaagaagaggataagaggaaagtggttgatgagtttgctagagttcacttgtctgaatcaccaaaggcagcttcatcaacgcaagaagccgaacgtgaatcaaaactctctgaatctcctaaagcaaagaaagattctgaacatcttgagccacaaccgaaaccattgcagcaacaatctcctccacctatggcttcagctcctgctccggctcaaccttgagatatgcaagcaaagacctttctgattcttgttgtaaacggtaaaacttggaactaatctctctcagattgttgaagatgaagattgaacttgttatttaggacgaagacttgtgttcttgtaacattggattcatggtcgatttggtaattagaccttaaaaagaaaacaattttgtcctttttgtttttcttaaacttatttaaaccgggctaattatcatggttaactgaaccaaataccgatcgatttttatttttaaatcaaaaattttattagagcaattagcccgtcaagtgattttatgtaactgaaagtaacaaaccaaagtagatgttacaaacacagttgacaggaaacgctttgtcggtgatttaagaaatctaactataagaagattttaagcactttaaattcaaagaagcacttctaattataagaagattttaagcactttaaattcaaagaagcactttaaattgatacaattaagaataaatgtatatattgacatttgacaaaactaaaggaataaaatctcgaccaattaaacacattatcaaaatattttgttctcaagtgaaaaaagaacagatttattcatggtatattaaggaaaaagacaattcgttttctcacaattatatattgtttgtaaacacatcatcttaattgtgcaaactatatcaaaattataccaatagaaaagagcacaggaaaaaaatggagaaatcagctttgatattcatcggtattctacttttttcaacatgtgagtttcacggcaaaaattatgtaccaattgtattcatcatccttatcatgtcatgagcgtttctataaatcatttcggtgatttttagcaggtacatcgattatggcacgaactggatatgtatcttgcaagacgaattctgactgtgttaaactcaaatgtccaacgccatttggtggccccaaatgtattagcagtagttgtgaatgcccccttaaaagactcgtgacattacccaatgataccaattatggtgtggctgcctgcattgactattgcaaggcaaaaggtgaaaatgtttatgcatgtatcttaaaccattgttactctcacaaacttcccatgtaattttattaagtttttgcgcataaggttttcaaatatctaattttattactattaatatcttttgaatatcgataatatcatttaattactctagtttatgtttggacatttgactgaaaattaaacttatagtttgaatgtttttctttcacttatttgttagattcatttgtatattttgtgtacttaatcgtttatgaacataagacaagttaaattgatattttatcaggtttgttagtgtcctaaattagacttgttttacataaatattagaaaaaaattaaaaatatatttgtctatggaaattacagagacaacaatatttgtagctcagcccagataataatcagttcaacgaaaatatcatgacaatccggcaaaaatttagtaaaaaaattggaataaatccgtaaagccttagttcaaagttcttcgtcaatgatttgcttatcaagatattataaaattgtttagcgagatttttggtaactatttgagtaacgaatcgattaaatacacgccctctcaaaatgttaatatagaagatcaaatgttatcgctggcaaaaagataaatattttatttccaatttactaccttgattagaaacatcaaactaggtaatttttcactcattctaaaacaaattaggtataaaatcttattacatgaagtaagtaacgtatttaccaaaacattaaccagtaaattagcaaaacaattgcttgctggggaagaaaaccaaattataaatactctccaaatcctccagttttagtcacacaaacaactcaaaacacaagagaaagatacaaacttattcaataaaaatggagaaagcagctttgatatttatcggtcttctacttttctcaacatgtacgtaatttttttggataatatgtttaattacattcatcgccatcttcttcttcctcatctatattatatatcatcatgaattcatgatcaataacatatttaatctcataggcacacaaattctggcacaatcttgcaacaatgactctgattgtactaatctaaaatgtgcaacgaagaatatcaagtgtgagcagaacaagtgtcaatgccttgatgaaagatacatccgtgcgatatcgcttaacacgaggtcaccgaggtgtaatgttcaatcttgcattgatcattgcaaagcaataggcgaagtaatttatgtttgttttacgtaccattgttattgtcgcaaacctacaatgtaataacaaagttatcataatcatagtatctttaacttcttttactgcggcaaatttcaacatatattgttttatcataactataaaatctgtctttaataaaagaaattaaaacaataataatatatcttacaaaatactaattatttacgagttattgtggttttggttttattttacaagtatagattggcgtttttgttataatgggcttttgggtacgcgattgtaatacacggacttggatcgcgcgttaaagaataaagtttgacggatccaaaattttgacttttttttttgtatcgactgagcaaagatttgatttgactctctgcttccttcgaggaaaacaaagtagagtgttggacaagctttttgtccatctgttattccgttaattatcgccgttaaacagggacggacgccgtttacacttcctggcccggtaactatttttgagtgcatatatctctttcttaccttttttatcttctctagcttatccgaagccaaaacaacaaggtaaggtaaagtaaaaagaattttgagagtaaagtgaaaacgaaccctttaaactcagtcttctctttgtctgatttaaaatggaaacgaaagacaagaaagaaaaaggacatatggttttaaattccgacaacgttttcggttcggtgtcttcgtctccgacaacaacaatccaaaaccctaattactttacctccttcgagaaccctaatttcccttacatttttccggtttgtcttcgtctccaaaaaccctaacttttttacatatttttcttaaaaaattaataactttattgtttttgtgggtttagaaagaagagtatgaggtgatgagcaagatcgaaagcgggtcgggtaagtcaaccgggtcgggtcatgacccactggagaatactgcaatcgaacaagagcctcctgcggcgaagaagaaacgttaccatagacatactgctagtcagattcaacaaatggaagcgtacgtcttcttgcccttttagtttacaagtttattatgtcaaaaaaaattataacgatggtttatgaaatgatgtttaaaatatgaaattttgcccttttattgtagattgtttaaggaaaatgctcatccggataccaaaacaagattgagattaagtaaaaaacttggtctctcgccgatacaagtcaagttttggtttcaaaacaaacgtacccaaatcaaggtaactaatcactctttagtttggtttgattttaacaaggttagttagaccatataaaccggtttaaaattggggttagaaactctggctaagaccattcatgttaagaaattaagcttttgttgttgctaatactgagattaacaggcacaacaaagtagaagcgataatgcaaagctaaaagcagagaatgagactctaaagacagagagtcgaaatattcagtccaattttcaatgccttttttgctctacttgtggccacaatctccgcctcgaaaacgctcgcctccgccaagaggtatgtatattcgaatgaatcaaatcttggctgttgttgtttatctactgaatcatatggttatcatatgttgcagcttgatcgtttacgcagcattgtttccatgaggaatccttctccttcacaagagattaccccggagactaataagaacaacaacgataatatgttgattgcggaagaagaaaaggcgattgatatggaacttgcagtttcttgtgctcgagaattagcaaagatgtgtgacataaatgagcccttgtggaataagaagagactagacaatgagagtgtgtgtctgaatgaggaagagtataagaagatgttcttatggcctctaatgaatgatgatgatcgctttcgcagagaagcttcaagagctaatg

SEQ ID NO: 36447 - DNA, 1778 bp, Arabidopsis thaliana landsberg
  unsure (1)..(1778): unsure at all n locations
caaaatatttactaatgtattcacaaaatatgtaatttctgttcgtaaatcggtaacagcagagtgtatatgtggattagtcaacagttattaggtttcacgaactagatgaatcatatatgtgtagaactttttctctaaatatagttgtgtcattaagtataatcttgactagactgaatttggagagagatgcacatcatattagaccaagagtaacaattgcatatggaattcactgttttatgtcattcacattaattttttcaagatgtttaatgattaactttttacataatgttttggctgctttatttttgataaaatttctattttggctgcttgttgttgtgagaatattttttcaaaagccagataaaaaatggagatggggcatcgtcgcacatggtggcatggacacatttccaaaactacaaaaaaataagtgttttggtaagtcgaaacatatatttatggaaaataaaatgaagttgttcgggattcaaaagcatcttcggttaacatttaactgctagtggtgagagaagcttatacaatttggggatatgttgggtttatcataaaaagttaatcttactaaagaaaattgatttccatttctctttattatagccacccatgtggtggttactattttaactgaagccaaactttgaaacttactaaaagttataaagttaagaacttaaatttggttttctcttggcattttttttagtaatgactaatccaaatttaaatatcttgttttgtcaacaaatttaaatggctttagttctgtcaacaaatatatcttgtcagttttactgtttaaatttataacatggtgtgtgtagtcaatagaaagtgaatgcaaacgtcaaaatacgaatcttataacctgaggtccaagtttttcttttccataatgcgttcattaacgcaattataaaaaccaagactntaaatacgaaccatgataaataaatataccataatcaaaaaaaatcaatcaataataattcatagaaagacagagaaagacaatttcgtaattaactataaaatctggtggcattgttattttctcttcactatataaacttggtctctcccaaacctcacaaatccctcctccacctgaaacattttctctcactttctcgagaaaatataacttcagaacttttcagagttagtttgacttcaaacgtgggaaaaaatggccggaagtcttgtaaaatgcagcaagatccgtcacattgtgagactcagacaaannnnnnnnnnnnnnnnnnnnnnnnnnnnnnnnnnnnnnntcagccgttgtgtaccgtcggatgttccatctggacacgtggcagtttgtgtgggtagcggttgcaggagatttgtggtgcgtgcgtcgtacctgaaccatcctatcataagcaatcttctggttcaagctgaggaagagtttggttttgctaaccaaggaccgttggttattccttgtgaagaatcggttttcgaagaagcgatccggtttatatctcggtctgattcttctcggtctatccggtttacttgtcctgatgatcttcagaaatgtaacggaggaatcaaaatcaaaagcaagctagatctgatgattgaatctcgaccgttgcttcatggcgtcgctgagaaagctatctggtgatccgacggtgcagattgttgtcagttcgtatgattctgacccggtacgagtttaatcgccatggaaggaagtacagaagaaggcgagtttttga

SEQ ID NO: 36448 - DNA, 1611 bp, Arabidopsis thaliana landsberg
ctagaatatgaaaatcattggaaaaaaaactaataatgaatgtcagcaagtaatagagtgacacctgtcggcaagttattttaattttcatttttgttatcattatggttttggtcaattttataaatgatgactcttctcctcatgtatgcaggtgtatatcttgtgtttatcagtggattaaatacatttgcagctaggtaaaatatctcaacagtagattgttggaaagagttcaactcataagtgtggtgtggaataaaacaattatcgtacttgaaatagtctaactactcaactgtatatttatttgtttgttgaatataccgcaagataataaaattttaacagtgtttttttttttccttcatactaaacacgacaaaaggaaaaaagttcgtatacataattatatattatgtgtatcaataagattttaacttaaatgccataacgtgattttgttggtgtagcgtttgagagctcctgagagacgtatcaggatgaaattgacaatgatacacacatattagtacatgttggtgagatcatagagacctgccgaagacgacagaaacattgaaacaatcttgagacaatgcaaagctttcatcactaaagtgaggtttaagagctttacatcttcaaaagctatctatcttcttttttattcaactcaattgtactcgtgaacgtgaaaccgtttaggtgatgaccacttgtttcctttgatcactggacaaccacctataccaatcagaaaagattttgagaggtttggtttcagatatcaaatgggttccttgagatttaaaaaagtttcaagaaagacacaccatgcaaactagaagggtctagagacgcgtcaggcttcatgctccagaagagtaaagcgtctctcttctttggcagaacagagagtccttctttaccacattgtgagagctcgtcccaccatgggacatcactaacgtttcctttggctgcagggaaaactgtttctccgccttcatcgacatccgagctaataagtacaaatcaaagaaagaagattaacaaacacattgtggctaataagaaagattattgtaagggtttaaaggctacacacaggtacattagtactgtagcaattcgttgccctcctttcctgacattgaactcatcaaagaaatagtcatggtgaggctcatatctctgcccaacttcataatgaagaacttgcagcccctctccattttctgtaattccattacattaactccacaatgagttccaagacagagaaacagatataaacattacctggaggaatgaaggtgaaatctgaaatcctattctcaatctcttccactatttcgtcatgtcctctgttaagaaaaggtcctgaactggttcgtactctgcataacgaaggatttgcaaatttagaattctcgaatctttccaaattaagctgaaaggtaaaaacaacaacactagttagagtacagaacctgctgtcgatgctctttccggttttcacatcaaccacctttgatttcatcatactaggtttcgcaaggctaatcaagtgctcacattcttcatttgtcttccaaaatttacaga

SEQ ID NO: 36449 - DNA, 1915 bp, Arabidopsis thaliana landsberg
gtgtttgtgtgtgaattgacgcatgatgaagaacaacacatgaggaaaaagttatttgtcagagagagctgtattatttctaaattgtataagcttcgcttttgatgctggattattcctaatcgttgttcttatttttttctttgtgttgtgaaactttctacttcaggttgcagatgtgaaaaagatgaataaccttgttactgatcttcaaatgtttgctctcaagtctcttcagattccgttacctgggagacatcctccttctccatgtttatctaatggctccttaaaccatgggtactaataaagcttattacttttaaatgatttattatttgctatcatttaagttccagtgatggattcttatagctgattgttgttgatgctttgctgcattttgtgttccaccatcagcagagcagttgttgatgctttgttgcattagtttgcattttgttgcattttgtgttccaccatcagcagagcagtttacaccatcagcagagcattttgtttcttatttcttaatttattcaaagagccctataccagcttttcttgattggtaaaatggttttggtactttgctgtaaaagtctcagcgaaggtagaactaggatcctattttctttatatcacctgcagaactagaaattctataggaaacatctcaatttcgagacaaacaactagtgcctttagttgtgttggactgaaactgcatattatcattatggagtaatcctcttttcatggctctaatacatggaatcttatttgcagagagggatgttcatgccacgaaccggaatcaccaaaccatagcgaacaggaagtgtttgactcatttcagtctctgagattgaaatcttcggaaaagaaagtttctccagccatgtactcactgcaaggttattacgggctaaaaccagcagacagaacagtctctgatggaggatgcttcgagatgggaaattacaagacggaaacttctcatcatatcttcaacaacggtgataacggatatctcagacctttcccatccacaaatactcccttaaatcaccacaggaaatctagaagcttggtcaatgcgcttatcgaagaggttaaccaatcacctgataataatactcaagaaccaacatctgataagtttatgagaagacgccaaaaatctgaggccgatttttcatcccggactccagaacttgtgttgaaagaagagaacggtagcagcaatggcggatttttatcaatagctggaaaaggcttagctttgagatcgaaagcgtcaagcagaaccaatctagcagcagaatctgagaacggtaatttcaatccggtatcaatgaacttgatggatgctccagtttcagacagctttagcagtgtaagaaaatcgtcgagtgcatcgagtctacaagatccagatggtaacagcaataatggttcgttgtcgctatggccaacgtcaaagtggagcttgaaaccggatttgcttacacctgcggccattacaagttccatctttgatggattaccaaagcctttaactggtcgaagaaacaaaacggctctggactaaacacaaggtcagtttctggttatttataactgccttattcttttttggggtactatacaaatcaattgtcaaaagaagctatttagcttaatgcggagtaaatacaaaagtaaagagattagaggaaaacaaaattgaaggaaggaagaaagaaaaacttccggaaattgaaatttataaggaagcttctgatgatgtaatgattgggtcttttttgtaagttatattctgtaccattttctgggtggaaaatgtatcgacaaaatctgtagcgtagttttattttatttttgatttaatgatacattgtcacaacacata

SEQ ID NO: 36450 - DNA, 2442 bp, Arabidopsis thaliana landsberg
tcaaccatgcacaaacactttattttctagaaaatagagaccatccttgattcattttttggttaggtttgatgatggattcaagtcttcaattggatttgaattttcggtaacttttactaattggtggtgtgttttactttcttaattaattgtgaatgtatatagtattcatgaacacacacgtcccctctctttggtaaccgttacccatatatagactttttctttttctttttcttttatatacataaacattgcactctattaaaaattgtgaataataatcacgttacttaatagtatacgtgtgtgtataaaaataacaaaacatcatcaagcaaaatcctgcataaaaaataccaaaacaaaatagcctcttcccctcctgctaaaagacgtttcagctttcagccctagctagactcgcatgaatgaggccgaccattcttcttctcctactcttcaatttataggtttttgaaattgtggtatgactcatgttgttttgctcaagtcgaggagtctctccattttaaaggtattgtgtggttaaggagatgcatcgagtcactggctgatcaacaaggtcttcgacaaaaatctaaacacaagaatacagcataggtgagtgcatcttgaggtaagcaagaaataagaaagggttatctttttgaagggagtgttcggactttagggcctcttcatattttttcctggaattgaaacactagaaaaggatcaactgaaaagcaaggtaaaatgtcggtgtgctttgcccaacgatgacctcgatatccaagcacgatcacaaagaagccagcccaaatgaaacaaaaatagcagggtgagcagcaggtcgaatgtatcctccatatccatcttttgcggatgagcgaccaatggaacggtgatgtgattttgtcgaaaggtaggctttggagaatgggagaacaagcctagtacaaacgcgccaaaaatttcatggacgtgcaaaaagaatctcgttccaagtagcatttgtttccattggaaccatttgaatgccgttgtgatgtacttttgagatgatccgtttcttcttccttttttaaaaaaatgcattgagcatttgagcatcaaagacgattacttatagtatgaatgttttaaagcacaagagaggttggaaaaagttattgtttcatcagcatttcaaaatattggtatcaaaccatacaagaaaacatgttgttgtgataagtagtgaagtactagattatgcaatgagttttggtttttgatttttgagcccaaaataataatgactagctttagaattaggcacaggtacacaattgatttagggattcgtttcacactttattttgcatatattggactttgtaatttgtattactacgagttctttcttgtgtgtatacattatgataatatgatgatcatcctttttggtttaaacatgaatccaagtttcttttttgatatctgtattggtaatattttcctgccacgtgtggaggtctcacaagagccacatggacaagacacgagaaatctgaaatctcaaaaactcaacaacacgagaacagctgttctgttgcttaggaagatctattacctctaaccacaacactacaaagagagtactagttaattagtttaatttactggatttttctaataatttctattgatattcgaatgtaaaactcgatgtaggactacaattgtccatatatgaagttgaaatacataatgtaaaatctgattatagaaaaacaaaaaattgtaggttaactatcagccacatagaagaaaaacaggatctttctttgaagttaaatttataaactaatctccccatttcaatgagctgtatatcaactcacaagtcgtaacccgtgccatcattaatattgttcacgtacattttccttttggcagaagattacggtttgagttatactatttcgtggaattacatattttaaaaaatctttctccaaaactatttattttctcttttgtttatttcgtactaaactatttcatatgatgcagaaacttaaactgatcttaccacgtaaacgtggcaagaattaatttacacaattaataacaaatatataatctatattatatttgacagtaattcgagatctttagcatttaatttagtgtttttagtttggtgttcgaagccatcaattgatttttatttacatggcggttacatatttagggggttaacgtggcttttaattcatagaatgtgattagaacacacaatttataaaaattagttgtccccgtgcaaaaaaaagaaggtatacatgtgttatgtgtcaacgttggtacgactttgaaggatctaaaaggtcaaactttaattgagagttgagacagtgataacttggttttgactttcttacattcatc

SEQ ID NO: 36451 - DNA, 2017 bp, Arabidopsis thaliana landsberg
  unsure (1)..(2017): unsure at all n locations
ttctaatattacatatctttgcggcggttccccccattcattttggcgaacatttttgtttatgcaaacaagatgatcgggtcatcaactaggttgcctgcaatacaacgcttggtcaagatcaaaatcatagttgagcaattgcatttcaagatatcaacgcttttgttgcatggtggaaaactcatagaagcagtgacatggtttcatcaacataaaacatcatatgaaaaggttgtcggatccacagaatttatttttctccattgggactggatgagtaggcagtttcttgtctttgctgagttgctggagacaagctcagcaactggtcagagcttaacatcctcaaaccaaggaactgcggaaatatctttgactgagtttgagttttaccctgcctattattatcaggtcagtcaattctgctctatgtaacacatagtcggaacatatctaaacttggtggtgcattttgtgttaaatcttttctgtgtcttttaccatttagttaaaaacaatactacataaacttaaacacctacctctaagcaaatgctggatttttcgtcctctttctcataaatttctgagctgtctgttcctaggtacagtatgttgaaaatataatatgttcttatccactgggaaattttcgttttacacgcagttggctgctcattacttgaaggataagaaatctgccctggaactgttgttgtcaatgtctgaaatagctcaagagattgatagcagctctgcatctattactccttcagtctatgtgggtcagttcgctcagttgcttgagaagggagaagctattacacttcactcgtaagttgttcataattcatcccacaaatctatgtaaaagaaaactaattatgctaccaccatctctaatagtatgaattctaatgtatttgcagtataacggatgaagagtacacacggtatacaatttcagaagcaaagagagttcaggattcccttcaaattattggttggctgaagagatcttatgaatcatttaccaaccttaaagcccagaggatggctgctctttgtgcctttgaagtagcccgggagtactttgatttggctgatcccaacaacgcaaaattcttttnnnnnnnnnnnnnnnnnttgtacagacaagaaggttgggtaactttgctctgggaggtgttgggttacctgcgagagtgttcgagaaaccttgatgctttgaaagattttgtagagttttcacttgaaatggttgccctgcctgtaacatcttatgacaattctgggaacttaagaaacaaaaattatggtcctggaggtcctgcaacaatttcaggaagagaaagtatacatcaagaagtttttactcttgtttgtcgtgaagccgagctgttatcatctaccgaaggaagtgggttcaaattagccactgatagccctcttcatctcgagattgatcttgtcagtcctctgagacctgttctcctagcttcagttgcttttcacgatcaaatgatcaagcctcacgctttgtgctcttttacgttgtcactactttctcatttacctcttccagttgaaatagatcatctagaagttcagtttaatcaatctacatgcaactttgtcatcagaaattcccagaggcctctgtgggcttcggcgtctaacactgtgaaaagtggtagccaagtggagaatgcgccatcgctggtgcttgtgccgaataattggttaaggttgacatatgcaatcaagtctggttagtgtgatttaattataagggtgttgtttgtatctaacacactttgcacgtattgcagttattcattgaaattcaaacctgttttggacgttttcgtattcttagttaccaattagcagaactgaagcttcagaacttgtatctatcttatgaatcgcaaccgggaagttgttttcttggctgcctaacttatcacacatctctttgtttcatctgcagagcaaaccggctagcttgagc

SEQ ID NO: 36452 - DNA, 1171 bp, Arabidopsis thaliana landsberg
tcaatcattacaaaagctatttttcggccatatattgtgttactgtactacagtacatggttcgtctaaagctatgggttcaagtgcgtcacataccaaagagttaagaaggcatgaggttgggtttaacatgctagtactatcttatacaccacatttagcatgtaaagacatttaagattttaggccaatgtaatccactttttgaatcagcaaaccaagaaaggtaaaaaacaaaaacaaatcaagctaagattttgacgttttggttctaaaccagagagacaaagacaaacccaagtattttttatagtgcaagcccaatagagtttgcctaggcctattttcattttaggattggaaaacactgcaacccaagaaacgaaatcgcactaaacccaagtacttggtttttaaaacacatattttcctcggtcactttcttggttattctacgggcttctgcatgccacgatcaagtcgggccagagcataagccatataagcaggattaggttccaaaaactttgtaaggcactcaaagttttttttttttttttttttctgggtttttaatacttaaaatgttatgaaaatgatgagatttaaaccccattttttttcttttagttttgataactaacatttttctttgtcgttaccattgaatttctcatattcgtttttttataagtttataacattcgaaaatggtaacaaaatttttaatttcattcgataatattgtactggcgccgacgataagactggactatagtagtgggttgacatgttttgtatagatggaacatctcctttgatggagaggtgtgcatagtagttgttggccattgaaatgcttggtcagtcttacttggtttgacatcaagtcgtaaactcgtaatgaagtaggctgcccgctgaaagtgtcaagggtgcaacctcatcctttagcctccccgcttatgttggtacaatagtgtaaaagagagaattggatgtgaagttgtgaactggattcctgtgagtcgacgaggatacttgtctttttaggcctgagctccaccactgaatgctaataattccacctttcttaatggcgatgccaccttggatttattatattactacctaacctagaactagataactgcactcggaatttatatga
